United States Patent Application Publication US 2008/0114160 A1 - sequence listing, part 15

SEQ ID NO: 5739 - DNA, 11359 bp, Oryza sativa
caggagtaggagtagtgtccaaggaacaaagacgtgtctcctcagcgattagatctgcaagagcctccgccatagtaggacgtgtaggacgtccaagcaactgaactctaatggactcaaattgagaggaaagtctcatgacaaattgatacactagattttcttgatcatgcttctctctcgccttgcattgtgcacaacctgaagcaccttttggagtctgtgcctcaagctgtccagacaaccgagtaaaggcattataaaattcttcaatggactgatcttgttgttgtaagttgtgcaaattctgcagcaaggaaaaacgcaaagctccgctttcttgagtgtacctctgtttgaggtagtcccacatctctttagcggtagtgtgatccctgaaactcatccgaataggcacctctacactcatgaatatgaatcccataacacgatcatctgctgttttccacgccttaattttagttgcatccgttttctcatcaggaggatcatctgtgaggtgagatgcttgaccaatcgacctcaaaagcatacgagctgaaagttctcattcttgataattttgaccatttagcttaatgtccgtggagagcagagctccacctccaagaaaggggtcggatgttgccatcaagaccagcagaagaaaatttgacaaattgactggacagagacttgcttacaggacttgatgtattgtctcctgaattagcaccagcagcacacagcggcagcagtagtggaagagcagcaacaacggctgagcggagcaaccgcgtgacgagcggctgcaatgagcgatgcactcacgcttgacggacgaatcacactgacttgctgtgaatcccgctgctgatccggacgaggaggacgtgaagaagatttgcccgatagggagccgccgccggcaagccggagcgccggcggacaacggggatcgagggctagggttcagcccatgagctctgataccatcttacagtgatagataaatttggggaatttactatgtactattgacttatggtcaaggaccacatataatgtatacaagagatgaaaagacacatataccctttaacatctacatgtatcaaacaatcgcataaccggagtcctaccgtcaagcttggggaaattgtcttggttagggagttttgatatttcatcaaataaaattgaagggcacattccaccagaaattggtagtatggtgtctctattcaatttgagcctcgcgaacaacttgctccatggaaacataccagaggaactaggttctctacagaatctcgagtatttggatttatcattgaacaacctaagcggaccaatacagggatcaattgagaactgtttgaaacttcaatcactaaggctgggacataatcacctcggaggaagcatacctattaaactagggatgctgacataccttcaagaattgttggatttaagtgacaattcatttgccgggatcataccaagtcagctgagtggtttgaacatgcttgaagccctcaatctttcacacaacacattaaatggcagcataccaccatcatttaagggtatgatcagcctctcatccatggatgtgtcttacaataatttggaagggccagtgccacacattaagttcttggaagaagctccagttgagtggttcgtgcataataaacacttgtgtggtacagtcaaagctttaccaccttgcaaccttattcagaaaggtggcaaaggaaagaaattcagacccattttacttggtatagttgctgctgctggcatatctattgtgtttatcatgtcactagtgacatggcaacgcagaaagatgaaatatggggagcaaagtgaaaatggagttggaaacacaaaagtgttttcagtctggaactttgagggaggagatgcatgcaggcagatttttgaaacaacaaaatatttcaatggaactcactgcattggtatgggaggaaacggatctgtctacagagctcaattgccaacaggcgagatatttgcagtaaagaaaattcatatgacggaagatgacgagctaatatttaagcgggaagtagatgctttgatgagtattcggcatcgaaatattgtgaaactctttgggtactgttctgcagttcacgtcaaatttcttgtctatgaatacatggatagaggaagcttgtcaagatatttggagaaccataacactgcaattgagttggattggatgcgaaggataaatattgtaaaggatgttgataatgctttgtcttacatacatcatgattgctttgcacccatagtccatcgagatataacaagcaacaacattttgcttgatctggaattcagagcttgcatatctgattttggtatcgccaaaattctagatgtagaggcatcgaactgcacaaagcttgctgggacaaaaggttatcttgctccaggtaaaattttataatgtatcagttactttatcctcttgtattttttgttaacattttgacaagtatttgagctaacagcttaggcattcatctcattagtattttctgataatagttattatagtcaacctcgcaaagatgcatcttagattgtacaaaatagaatagaattccttctatacaaatttattgaaacaaggtcttaatattgatgtggcagagctagcatatacaacaagggtgacggagaagtgcgatgtttacagctttggagtgctcgtctttgagctgttcatggggtgtcatcctccccttccgaccgttgccgccgccgccgccgccgggatgccacctcgccgccgccgccgagtccggccgccgctcccaccctcccctcccctcctctcttccaccaccgcaacaccaccgccaaccccgcccgtgggcacccccaaatccgaggccgccgaccgccgccctcctcccgcccgccgccgcctccccctcgtctccgccgccgccgtcgaggaggaggacggagagtggcaccccctgccgctctccgccgccgacctgtccctcccgctcaccctccccacggggcagaccttcctgtggcgccgcacgtctctctccccgctccgcttcaccggcgccgtggggcctcacctcgtctccctctcccacctcccgtcctccgacggccgcctcgccttcctcctccacaacaacggcggctcctcctcctcctccgtccccgcggcggcccgcgccgcgctctccgactacctcaacgccgccgtgccgctcgccgacctctggcgccggttcgccgccgcggacgcgcggttcgcggaggtctccgcgcggctcgggggcggcggcgcccgggtgctcaggcaggaccccgtcgagtgcgtgttccagttcctctgctcctccaacaacaacatcgcgcggatcgagaagatggtgtgggcgctggccggctacggggagcggctcggcgaggttggaggataccaattccaccaattccccacgatcgagcggctcgcgcgcgtgtcggagcaagagctccgggatgccgggttcgggtacaggtcagttcacaaaggattttcatctatagtcattgttacttatgttggagtagtattggttgaagcatctataggttcattttgatgcttactttgtattttccaattaacccatttggcattggtaggatctagatcttgtgttaattataattcagacataatgggtgactaaattcgcgtgctatatcaatgtgctgataatagcagagctcgtagacgataaaacgatgatcctaccattactgtttatacgatgaatatgtagagaatctcaacttcacatttgtgtggtgaggtttcagctttggggaaataacattttgaatcaggcgtaacacttgtttggattgcttgaatcataactcagttctatcatattatgtatactacatttgatttgagatactagtcaatagcacactgatttgagcaaatgctgtgttctaataaatgaacagggcaaagtacatcgtcggcactgctaaaatattacaggccaagcctggtggaggcgagaaatggcttgcctcattgcgtacaagggaactcccggaggtgattgaggctctttgcacccttccaggtgttgggccaaaagttgcagcctgtgttgctttgttctcactcgatcagaaccatgctattcctgttgacacacatgtctggaaggtatgaaaatgagtactgctacacataataaaattttcttacaaaactcttatactaacaaatgtctcaaccgtttgatttaactagatggaagttgcaacaaatctagatttactcacggcttaccacattagagtttgtaagaattttgtaagaaaattttagtatgcatagacttttccatgaaaaattgttgataaaattaattaattcacatccatgtcagttccctcactatcattttacacattcttactatttgaatgggaacctgttttgcacattctaccctgatcatatttacttccaatttttgttgaaccataagctctgcataacaaggtttgccctttttcattttttttagttgggtgagggtgggactttcatcatttgaatgggaaatagtattcaatgtattcacaattgacttcactctctagacataaaaacaattaaagttgatgggaagtcttgtgaaggaggttttttcacatgagttttatatgacctacaaacaattgtattttgtttttaagcccttcctatatggatttaatgcaggttgctacacaatatctgatgccggagctagctggcaagagcttaaccccaaaacttagtgttgctgttgccgatgcatttgttgctaaatttgggaactatgctggttgggcacagaatgttctctttattggccagctgtctgctcaaaaactcatggttgctgaaactacaaacacttccacgaaacctactaaaaggaagcgtagtggaaacaatgtcaaaacatgacaagaaatatcacatgtagagacaatgccaaggttgactttacacgcggttttgtttcagtaaccataacatgtttgacattcactaactaaagttgtgttatttattgcggggatatcaaattatttaaccagtttgcactacattctgctctacgttacatcgagtaaaatatttgatttgacgatggatcattaacatatatggtcctgggatttctataatctcagtggcacaaagttctgataaatgtttccacatttcagaattgttcttagaacacaatggcaactctcgtggtagtaggatccaattcaaggtatattgaatattgattacattaaaaatgcttgttagcaacttctgggttatagccttagcaacttctgggttatggcctagtgacataggaatgtcgagtcatttattctgacttttttgaaacattgatagcttttttcctgagactttgttgacttggcctgcttgtcaaagatattgttcaaaatcttcaattttaattttgtcttgttatatgcatgaatgcccactgattttgacatagcaaagtttaaagttgttggcaacaaattagtgatctcatctgtataattgccaataaatagatattgttatgttgcacgagacatgcttggtagatgttgtatccctataatggtgctgtcgtgtagctaaggctgttggcatgagaataaatcacactggccctgtgtggtgtggattggaattgttttcatttttttttatgaacttatagaagttgcctcttttgtgggcttgatgttaagagtctcaagggcacatctgttgatgttaagagtctcaagggcttaatgatcaatttgggaaggagggagtagtattttgcattgcgcttactgtcttcatttatataaaacggcttgcatggcctgtttacaaagcgattataaaccaaagattggttattgatgcaaatgaaaataagtttctgaaacaatttaggtaacactactcaagagttgagagcaatgttaattcaaatgaaggattttgaaaagcagtgataggatctgaataatttttcaatttcactggattcttttataataatcattttcttcctagcatctacaacacaacagttcttttttcttaacttctttttaacatcatgtagcttggtgttccatacctttatgatgctttggtggttagtaccttacaacgaggcgttcaaatgccgagtaggtacggactgctgtgggcacatccacgatagaggagcacattcagaaaactggtattttgttgagaagctgataaaaaagaaaaagttcaagttgttctttagcgctcatatctgtttcatttttttgtggtttgcaggctgtgatttcgtattctatcctgtaccagctacctaccatggttttgagaagtgcccaaatttaattcttgccgacagactttctggtctctaggttgttttgcattggaagattattatggtaaatgagtctcctgaacattgcaggatatcttaccattgttagaactcatccctacgctattaatttgtgcgctgtttatttgaattaaccatctgcttatatctaagggaaatagcaggaatcccctatgagttcatcccttttctaccagcaccatttctctcttgtttttaaagttattttaactagtaatatgcacgtgcttttctaccagcaccatttctctcttgtttttaaagttattttaactagtaatatgcacgtgctaacgctacgactatattgatgtcaaaagataatacatgttttgacaactaagcatagaataatgtaaaatcaacaaactttagaaaactttaatatgtggcgaggaaggtaagtacgtgttttttttctcattttgatttggagtgtttaatttatccaaattctctatagtgtttatactgagtgatcaatttatccaagttctctatagtgtttagtgtttaatttaagttccaaacgaccatgaaaccttatattacttaggtggtgtttggatccagggacttaactttagtccctgtatttagacactaatttagagtattaaaaatatagattatttacaaaactaattacataaatgaaagctaatttgtgagataaattttttaagcctaattaacccataattagagaatgtttactgtagcatcacataggctaatcatggattaattagacttaatagattcgtctcgtgaattagtccaaaattatggatgggttttattaataatctatgtttaatatttataattaatatccaaacatctgatgtgatagggacttaaaagttttagtcccatctgaacagggtcttaggccgtgttcttcccccttctttctcaactcacttctctcgtttttcgtgcgcacgcttcccaagctattaaacgattagttttttcaaaaatttactatacgaaagttgtttaaaaaaagtcatattaatccattttcgaaaaaggctaatacttaattaatcaagcgctaacgaatcattctgttttgcaggttggagggattagttccctaacacagccttatatgacacaaatacacgctatggtttatgtctgaagacctcaaacttgtacagagagttatacatacatttgcatatatatacaattcgaaagtgaatgctaaagcagattgcttgttttcagtaggggtcaagtaataccagcgtaacaaatagataaatgtttcctcacaaaatagtacacaagtgatactattttacagtacatcgagaaatcagggaatacttttatagtaaaataatccacgatcctcattggcaagacagggaatgaagaggttcccattatctgacatataatctaagtataacaaatacagctaatcaaggccttaggcagtgtgcatcaaaaacaacaagaacaaagatgaatgattgatgctagagctcacaatggcaaaagtagttgagttgttgatagccatcagaaaggacaatacatatagcttaatctcatcacatcagtcagaaacaaaccatgaattactcaaagcccttgtgcaatattcccatcatcacagcgtaacaacatggagcatcctcttattttggaaggtcagttaccttcctgtccttgaaggtttaaggttttcagaggccattgaatgcagcttgaggtgcccgttaagacattagggcagactccccttgttgatacatcggctgatgacctgtagactgcggttatgcacccatccacaaaaaagttaattagtatatgcggggcatactatcagctatatacaaatgacaatcaaatagtgtgtctgtgttcccaaatcagataagatgtacccatttcatcagtgaaggtcaataagtatgacataatctgagagcatattttgagagtttatgaactcccgcatagaatattcatgtctttgatgcacaaaaaataattaagccttctaagaaaagaagtaacgaaatatcataaataatatttaggcaagtacgtatattttaattcatagtgaaattacagcctattattaaaatatagcaacgattgatatgcactacctaatatcgacgaggaagcgcatgtccaagattgcatggttttagtcagcggggggaggatttgagcagaggcatttcaaaaggagaagatcagtgtaaatcctagcaaaatctccataacatatcaatagattcaaatagaaagccaaatctcttatcacatttcaccagattcaaaggaaaaaccaaatactcgcaagaaccagcttctccaaatcctagccaaatcccctaatgcattatcagtagttctttacacattacacattacacaaatggtagtatgccctccatagaaaaaataaaaaatcaaaacttttaagattcatagtctccactctccacacattatttttttagccgggccggcctaagataggcggaccaaatttacttaagaaaggggtatgtacatatttacaaggttccaacttcgacaagaggctgtcgaagtaaaaggatgttgtcacaagggcaacttcccgaaagaaaaaacaattacatcatgctgttgttactctcctaaaactttgaaaaccccggcttctttccagaccacaacctcctctttaatcaaagcaaagaggctacccgctgtccggctctgactctggaaaacacgtgcgtttctctccttccaaaccatccaacagacaagcaaaactagcgtgtcaaaagcgcccctgcagctagtctgaactccttgccacgccaagagccaccattcccctagttccaaccctgcttcagccggcagttggatgccaattccagcccaacccttgatcatcctccatactctggtggtgtatgggcaggaaacaaagagatgctcacagtcctcgtcgctgctggtgcatagtgagaatgtttgatggtgtggccatccgcgcttgctcaggttgtcggccgttaggcaacggcctttttctgccaaccacataaagaacttaacctttgtcggtgttctcgtgtgccaaactagattgccacaacgcgcctctgtgtttgccataaaaaacatgtcataggcagaggaaggggtaaatcttccattcgaggcccacttccatattgtctcatcctcttcccctcctcgcagctgcaccttctggatcgcatcccaaatttgaaagtactccccaatggctcggttggatggagctcctttgatgtcgcgcacccacctatggttctgtagtcctctcgccactgtcaaacccttgcgctccacatgactgaagattaacggaaatctcgcctttatgctcccaattggcagccaatccgcaagccaaaactttgtgttttcccccatctcccaacacttgccgtgtggctgagaagaacaggtcctgtaactccttcggctgcttagtctcaatggttgtccaaggtctgtcgcgatgctctcctctctttgccaaccatttaagccgtaacgccatgccgaagaagttttgcatacaaagaaatcgctggtggccgcagcctgcctcccatcccgcacatggcgccagctgagattgccttgtttaccagggcctgcaggacgtccatcaccaatacagtattgtagtgcttctatcccattagactgactcagttaatggagagatgtggacagggttcagttgtaaattcaggaagccacttagagaccataccttgtcatatatcttggcatcattcagtgagcctgtaaaatttacagaagatagaatgagctctttcttagccttaaaaaagacatcaactttcagcaatgaaaagagacagacaagggtaagcaaaagtagcttaatgaattatagacggcactgaaatacagaggtcaaacctgagataaaaaaaaatgggggtaaatattagagcagggcatcactctgaaaattattaggtagaatccttttatagatgctatttgactcacgactcatcaccacaaaaccaaggactgaccgataattattgtcaaccgtgctaccaagactaaaaagaaaatgatattaaatagattttcaactgaatggactgaaagcatacattcacgttaggtgataagatttcagcaaaatcacaagattcaaccagaaataaaaacggtacaaacagcaggttaatgccatagtaccaacaagtagatttcattcgcttaattgttccaacatagcaaaaataaaccacattgatcttccaaacaaaagagaggatttgagcagataaaatgattaagaggcttaaaatggttctaaactcctcagcaggattcgtaccataaggaaatctcaaagaggatcttacctagtgcgggcaccggtgtagtgcaagcgtacgggccgatatgtgcgccaagcagcagcggctgcttcattgcacgcccttctagggctgagatcgcggttgattcatgccggcggacgggcaggccgcgtggtgacggaagcagaggcttcgaagcgtgttggaagccagaggccgtcgcatcggcggcggctgagggggaggggaggagctcgcggcccgcagacggcggcgaaggggattctcggcgatggtgtagcggcggcgacggggatacggcgacgatggtggcgtgggagagatggccaggagagcagtggaagccggcggtgcgggattggggagggggagggatggtcgggggggggggggggg

SEQ ID NO: 5740 - DNA, 9713 bp, Oryza sativa
  unsure (1)..(9713): unsure at all n locations
taagtcaatagtacatagtaaattccccaaatttatctatcactgtaagagtagataggtaagtttggtgcactcaccccaccgaggagataattgtccaaacagtttatttgagctcatgtcaatatagacaaggtttggatgaaggcccaactcggagatatctccttcaagttgatttcgctcaagacgaactctaactagggttttgcagtttagtaagcttgttggcaatggtccaacaaggctgttgtgatcagcagtgaaattttgtagccgacttgctgcgcatagtcctgatggtaactcaccagagagattattaagactgatttccaaaaactctagattcactaagttgccaagttcttgaggaataaatccaaaaagttggttagatacaagatttatggaatagagtttattcaaattccctaagctgttcgggatggaacctgtgagattgttatcagcaagtgataagttatttaggttcaccaggttacctagttctttaggaatgtgtctagaaagtttattgctccaaagcaacaagttggagagtttagtcaaattccctaagctgtttggaatggaaccaatgagcatgtttttggaaagatttaaattctctaaattcacaagcttacctagttcttgagaaatatgcccagaaagttgattgtgccaaagaaacaagtgggagagtttagacagattccctaagctactcgggatcaaacctatgaggttgtttaaataaagcgaaaaagttctttaagttcaccaggtaacctagttcttgaggaatgtgtccataaagttggttttcaaaaaagtgacaactcaatgagtttagtcaaattccctaagctggttggaatggaacctgtgagcatgtttttggaaagttctaaattctctaaattcacaagcttacctagttcttgagaaatatgcctagaaaattggttttcaaaaagtgctaagtcaataagtttagtcaaattccctaagcagtttggaatggaacctgtgagcatgttaaaggaaagatctaatttctctaaattcactagcttacatagtttttgagaaatatgcccagaaagttgtttgtgccaaagaaacaagtgggagagtttagacagattccctaagctacgtgggatcaaacctgtgaagttgtttgaataaagcgataagttctttaagttcacaaggtaacctagttcttgaggaatgtgtccagaaagttggtttttataaagtgataagacagtgagtttagtcaaattctctaagttgtttggaatggaacttgagagcatgttgtcacaaagccttaggccctttaagttcaccaggtaacctagttcttgaggaatgtgctcagaaagttggttgtgacaaagatccaagagcgagagtttagtcaaattccctaagttgtttggaatgtgcccggaaagttgattgccccaaagaatcaacacagagagcttagccaagttcccaatactgtttgaaatggaacttgaaagtttgtttatgccaagcctcaagtcttctaagatcgctaagttcccaacttcttgaggaatgcacccagaaagtgtattatatagaggtataaggtagtgattttagtcaggttccctaaattatttggaatggtacctaataatctattggaattaagtttcatggacctcaacttcaccaaatttccaatctgctcaggaatatatccagagaggttattatctgaaagatccaaggacttgagctctgttaacatattgatattgatcgttctgcaggagcagggatctgagctctttgagggacgcaccactccaagggatcctccccgtaagcttattgtgtgagagatcgacgcttgtcagcatcgtcagtgcagagaagttgaggacctcaagtgagcctctcagcctcattccacgcagagaaatcttggtgatcacaaatttcccttgtcgagcaccgcacccaatgccacgccagctgtggcatggccatgccttgcgatcccaggactgcaggggttcctgggtttgcagggtggccttccaggcgatcagcgctccagcttgctcttcgatggatggcatggcaatggcaggaggggcaaggagtgaggacagtagtatagctaatggcaggaccaaatttaggggagataagggatccatggcttgggtagagtagaggactttgctcaagctaaggttggtctgtgttgttcttatactggacagtgttgactgctactgtccatgatcagcttgtaagtctatatggtacagtgcttactaccgtaccacatttagttgcacattggacttggaaaaaaaaattcaacgatcgtaagataagtgaaagcaacatggatggaacacttacatgattagttctctggtctaatccaaacaaggttggagtcgagactcgaaacatgagattctcaagtcaattaagcaaatatggaagtcatcacctttctaaatcaacgtacccagggggcaagtagatatggaagaatggagccttgttcagattctcaagtcaagtagccttcctcccttactggttgactagttgttggagaaaaaaattgaaaatatattatttatttttctttttctcagaaatatcggggatttaatcttatttgtgtaaatagctgggagaccgagcggtcggtctagcttgctcaaccagcgagaccgacagcacacacacccttgccactaattagtgattaattatcttgactagccgtcaccggtacgttgcacggctatttatcgacacgtgtcatgaacatcaattaatttagttatatgttgaatgtgttttcttactatggcttacatgaaaagaataatccaaattaatcattattcgtgggttgtcttaagtttttcaattaaggctgtgtgtgtttagttcccttcaaattttcaaaaattctgtcacatcatatgtttggacacatccatggagtattaaatgtggacgaaaataaccaattacacagtttgcatgtaaattgcgagacgaatcttttgagtctaattacgtcatgatttgacaatgtggtggtacagtaaatatttgctatgacggattaattaggcttaataaattcgtctcacagtttacaggcggaatctataatttgttttgttattagtctatgtttaatacttcaaatgtgtgttcgtatacttcagcaaaaaattagttgtgaggctgtgtttagttccctttaaacttccaacttttccgtcccatcaaatatttggacacatgcatggagcattaaatgtggaaaaaaaaccaattaaacagtttgcatgtaaattgtgagacggatcttttgagcctaattatgcatgatttgacaatgtggtgctacagtaagcatttactaatgacggattaattaggcttaatagattcgtctcgtagtttacaggcggaatcaataatttattttgttattagtctacgtttaatagtcaaataggtgtccgtatacgaaattttttttttaccaaaacaactaaacacggcctaagctaataataaaataaatattgaaaagtctaagatggatacgacttcatatttaaatttagtaattattagatattacaaatctaaacctacaaaatccatgatatttccaacggtatgttttacttgtaaagtatatagccggtccctaaacttgtacgattatgtcatttaggtctcaaactataaaaatacatatccagatctcaaaacttattaaattgtgtcaatccgatcccaaactgccatgccatctccaggatcttacctggcatgccacaccggatgatgatgtggcagcatcacaaatcctacaccaactggcaagtgggcccttctttccttttttttcccatcctctcatttctccgtttctcttctttttcctctgttcttcccactgcatcgaccgtaaccatgccctctggtcgagctgtcacctcggtgacacgaacagcgcagcgtccacaggcaagaaggcaacggcgcggcagccgcgtcgacagaaggcgcgccatcgcgtgggcagtgacgttcccgcccaagccgagaacaccgcgaccaccaagtcgacgccctgatgctcctaggcagctgtgctcagtcggaagttctgacggagcgccgctgcttcgcacgccatcgccgcttgtacgacggaacaagatagaaaattggagaagacaaagtgaaaaaaaaaaaaaaagaggaaagggcaaaaagagaaaaaaagagagtttttttttaatgtgggtcccatttgtcagccaaagtagaggtattgataataccacatcagcgtctatgtgacataccacgtcagcaccatgtaagatgccggaacggtgatggctatgttggaccggaatgtcacactttggcaagttccagggtttgaatatgcatttttagggttcggggacctagatgacacaacgattcaagtttagagaccgggtctgtagtttactcttttacttaacataaacattaaaatattacatagctactatcgtagatattaacattaattgtattattccttcaacttttacaagcttaaagatttacaaattatattgctaattatatttttatgtggaatcacatattggtcggcacatattaaaaaatttatatgaacaatatgttgataacacgtgcaaatatgtgcccaaagccatcaataagaaatttttatcgtcgaattttttattggattgtgactccatgccaatatcaaacacaactcactattctcgctattgatttgttgtcgaattaaaaattattaaatggtgaaaaaaatataattaagactctctcttgatacttagtaattcataatttctaaactaaattaataaaaaaactccaaaaaaaacaacagtaaggctttagcgtgaattaaaatcagaatacaaagaaaaacataatgcttataaaattaatagcaatagcccgtgcaacgcatgggttgtcggctagtataattagcaatagattgggagcccatacattcccgattactcgttgttcttcttgcatcggcggtggaccttcccgattactctaggagcaggtacaatagaattgttttattagatgcaaaaataccatgttagattgtttggtgctttcaaagagagaagagagagaaggaatgcaggccacaaaataagcgccaactacaacacattcctccacacctggtgagcctcattccatgctcagctcttcgtgattggtgaaaccgtgctagcctgcgcacaggataggaggggagagagaaaaggtaggaaggagagaggaggttagacccactttatagtaaattatttttatagtcaagagattagggccatgtttctttcagcttgggattattataatctagattattgagtcagattattataagctagattgttataatctatagtagaataagcggttagttgtttctttcctagattattagagcagattattggtttgcaagtctaaagagggagtggggtggcatggtgggtaatttttcacccaataatctggaaaaagctcacctaaatgagcttatcagattataataagctgggctccagattataatatgctacttcaataagttgtctgtttctttcagcttactcccaataatctggattataataatctcaagctgaaagaaacagggccctagatctatctactcccttcatctcttaatataagggattttgacattttgcttggactgtttgatcattcgtcttattcaaaaaatttagaattattttttttgacttactttattatccaaagtactttaagcacaacttttcattttttatatttgcacaaattttttgaataagacgagtggtcaaacagtgcaagcaaaatatcaaaatcccttatattatggcacggagggagtattatagaaattacgggtctgtttggtacaactccagctcctagattcannnnnnnnnnnnnnnnnnnnnnnccaaacggttcagattcgccaaaaactggatcggaacggggtggatcgctccaaaatattgtattgaggtggagcggcgaaaatgtagctccacggctccactccgaaaataattacagcactacccattccttttcactgaagttataggaaaatgccaccactctacccccttcgattccctcccgcattgggcgagcgacgcattcccaaccccttcctcgcccttctctcgcgacggtggaagagaaatcgtcgcacggcggtagcggctgcgcacgtcggtagtggcggcgcacggctgcagctcccttcctcacccttctctcacaacgacggcggcagaagcaactccctccctctctcggctggggcggcacgcggtaattgaggcggtgcatgacggttggaatggctccgtggctgcgcgatgcacagcggcgggtgtggcacactggggcgacggcgctcatggcggcggggttgaagcacctctaaaactatctatagatgacatgtataaactatttatagattacagcttacagctgtctatactattaaacttgctctaatggcaccgatcagagctgcttcctcggcgatcgtgccaaaaacgcgagttccttttggatttcttttttgaccaatgataaccgttgcattgtcatcccttagagggtattgttaaaagatcctcgattcctaatgcaattgatgtagtagtggcttgatggaagcccagtgtttttatttgatccagtatatgggtggtggtgaacctctcattcaccttcggtactctccgaactgtgcgggatggtttcccatcacacggctcaccaccaccacaagtagagaatcccaatgtgctttttactaggaagatgaggatgctattctttaaagaaccgagcttgacaagcatttcccatccatctttccccttcttgatgagcgcactacgactcattcaaaagagagagtaaaaggaagaatttcccatgccaaaggatcagaactgatcaggtctcaatccatttgtacttgcaatttcatcatgatccttatcaacacaactaatcgatacatttataagaaatgaaccgcagcgaaccctcagatgacccgtcttgccaaatcagttactggtcctaaagaatttgtatagctcatggtatgatatttgtctggagtttatggtgatgagaggtgtaattggtgtggtttgatcatctctcagttcaccgattcatccatccggtgtgatggacgactctccagtagaagatgtgacatcgtcgcctaataaccagaagaagcactccttcattgggcgtcatggaggtgccagtgctcacggatttttggagttctagagagcatggatgacctttgcagtttgcaacatcaacttcattgagatggatgatatgagttgcatcagtttcaacattgatgagttgttcggtcagattgtccattaattttgctttgtagaaagaaattcttctgtatgttggatatcccagtcctatggcttcataagacaaggatattcgacacctattctaacactataagtggagagggtgggagtgatggccaaacacagcggtggtgacgacaacggttggaatgggaggtgatcatgggagaagagtgacatgccgcatgaggcacggaggcggaaaaagcgatattacacattctctcaagtctactgaagctctgagaactgagatgacctgaaaattctgcaatttatcaggctccgttttgaatgtcaggcaaacagtaagcaattctcagcttatctcatgaacaatttcaaaaatgataaaaccaaaccgttttaagcagctactacttatcatcactgaaacataccaacacaaggagagcagagacaaaagatgcatctgaaaactttgatactaaacatacaattatacagtatttgctagaataggagaacaagaagcctcattgccatgtagtcagagaaaatggtagccatgtataccatccatcataaatcttagagattcgtattacaatttacaacaaagcagattgatcaaacaaggtagcatagtaagcacaagaacatcaccagcaacacgtattagggtcgtgtacaaaatgcaggtatgtttgacaaccacgcaattaacaccaacgaagtagagagaacacaaatcatcatacaagtgatgctttataatacttgacaagttgacattaacaggtgcaatagactgacctacctatggtgtgaattgccacattcttgtggggaaaaaaccctgagcaacatgagaaacagcaattttctgacaacattcactggtagtacgcagggatgattatgtcaacatgtagatggtcaggattgctaggtccttcagctgtagaaaacatccgagttacatgttgcattgttggacgacgtgatgggttggggtccaagcactggacagcagccatgatcactctaaatatttcacttgctgtctcagctttaggaagtgggatccgggcgtccaacaaatccttcaatgttgtactttccttggccatggagaaggacaaaaggaaatcaccaggatgatgccccatgaacagctcaaagacaagcactccgaagctataaacatcgcatttctctgtcacccttgttgtgtatgcaagctctgccatgtaaaaatttaagactttgtttcaacaaatttgcatatgtaaatagtatagaaggcattcgatgctatttttacaaaatgagatgcaaatttgcctaattgtatctaatatactactatgaatcaaagatatactagtaagacgaatactttaacagttagctcgaatatttgtcagagttacaaactaatatacaaaaggacagagcaactgatttagtacaaatttacctggggcaaggtaacctttggtcccagcaagcttcgtgcagttcgatgcctccacatctagaactttggctataccaaaatcagatatgcaagctctgaattcctgatcgagcaaaatgttgttgcttgttatatctcgatggactatgggtgcaaagcaatcatgatgtatgtaagacaaagcattagcaacatctttgacaatacttatccttcgcatccaatccaattcaatcgcaatgttatggttctccaaatatcttgacaagcttcctctatccatgtattcgtagacaagaaatttgccgtggactgcagaacagtacccaaagagcttcacaatatttcgatgccgaattctcgtcaaagcatctatttctcgcttaaatattagctcgtcatattccatcatatgaattttctttactgcaaatatctcacctgttggtaactgagctctgtagacagatccatttcccccagttccaatgcagtgagtttcgttgaaatattttgttgtttcaaaaatctgcctgcatgcttctcctccctcaaagttccagactgaaaacacttttgcgtctccaactccattttcgctttgttccccatatttcttccttttgcattgccatgccactagtgacatgataaacacaata

SEQ ID NO: 5741 - DNA, 21864 bp, Oryza sativa
aagttttgagatttgattgcacgcattctactattattactactagtatatatatgtaagaaaaggagatagtaactgtgaagtgttcataaatcctaatgtctggagctatgtagatgtaggtctgttttgcttttgcagagattgaccaaccctctcactggtcactgcacattcctaatccttttcaggaccaccaaaagacaccccaaaaatctttgcacaagtcaattcccagacaggttatgagccagcactactgtagtacaatcctagcaaagtgcaattttccactcctttctttaagcatttgcaaggaaaaagatgcagcaagcttttgagcaggtagagggagatctctccaagtctgggtacagtttgattctaggacactagaacaggagatgaatagaacaaatggagggataaagtagggtagggacccccccccccccctcttccctcccctatcacacacagagagcagagtacggcagaatcagaactgaaagtgtgtgtaggagcagcagctgagccttttggcagacaatccacacttgttgactctggggctgggagcaacagcagtacaggtaggaactgagccaccctgccctgcagccaagatcacaggcaaggctgccatggaaagatctccacagcccagccagccagccatgaccacaacaccccatccatcatctatcacaagccccataacctgactgactgacagtcacacactcttctctatctctttcactaaaacaagttgaccccagagagcaggcaaggtactcctcagtaaccagaagtagacaagaaatgcaggaactttctgtgccttattgaccacatgtgtgagtgtgtgcccaaaggtgagcaaagaactcacttttgttcaggcaagcaggggcagagtttgatgctgcagagcaagcaggagggcatggttgcagggttggttggtctctcaccagtgctagcttccagctttcatggccccgctcatctcatcagttcaggcagccaagggagtactccacctccactacttgtacgctcctctggtgtgacagtaaccatggagatactgtaaaagttcagaactgtaaacagaagctgtggagacggatgactgcagttacatacaagaatgttagtagtactttgtaatacaaacatgatgagatattgagatagatgggtgctgagaatgcagtcagagaatagtgtaaagatagatggcgatgcaagaatgagatgtgagtatgtgtgagatcaagaatgagatgtaaagaccagtagttgcgggcagggcttagagaccataattacacgagacaaggtgtgcatacaccacagtcaacaagagaggggaaggtgaggtgaggggggatgcagcaagcaaagcaagcaggcaggcaggcatccaatgcccccacacacttggtttctctcttgccctgatccatgcaaccagcagacagccctgcgtgtgccatgatattggctaatttggtgctttgctcgtgtgaggtcatggcaggatgcaacacatcttgtatccgtgtgtaggagctgcaaaaaaaaaaaagaaatagtagcatcaatccgtaaacagcgaggccgaggggaatgcaaaaagtttcagataaacctaaacctatgtcaagggtttcagtttgaacaaagtgatgcaaaagtgtaaaatgtcacctcagggtcactgttgaggaagaagaggctgaagctggtttgttgctgatgttgcgattagcagatctgctatctgctactgacgtttcaactgcactagagatcatcagaaaagactagccagaaaatgaaccctcactgcaagacaaaccgactcaaacacataaacagggagatttagtgcctggtaggaaacaataacaactataaagatttgacacaatcttctcaatagtcatcggaggatgcatcgaatatgtaacagggaaactgcacctgacagttcagaaatgtcccaagtgcaaataggaaaagatgtctgcacaacaaacaccaggagagggccatagcccatgggtttcagatggacaccgacataataatacaaaccatattagattgcatcaacgatttatatggcaagtatctgttactgcacatcacacagcaccaaccacatgctacatttgtactcttgtatatgtacagatctcagaatgcttattatgtatgagcatgtcacgcatcagatatatatgatggtggaatcaagaaagttcattctcagctgcaacagaacgagtaaaacacttgtaatcacaagacagatcagaaacagcagatataattcactatggttgtaccaggatgtgaaagctcatagtaaatacttgagaatgaaacagcagatataattcactttatgtacaagtaattttcatatatgtatagttgttatatattacaggaaacactctgctgtccatggaaatgatcacttgatccatcctcacagatttaccgtaaagcaatatgtccatggacttttcactaaacttacaagcaagtactttaaacagctaccaagaacatctcttgtccagtaattgtccaaaataactcctgaatattagcataccctcacatctgaacagaaaggtagtcttgcctagtttatatagcaacaaaggttggtgcagtcctcatggcgaccatttgattacatgattaacgtgtctgctgccatgaatagtaaggtcaaaccaataattaatcaaatttatggaacatataagtggatgagtttgtacgaatacatatgcacgaaagcaaaatccaacatcccaatataactaatagtatataccagctaatcaagaacggacataatattctcttaaaaatgtgacaatcttaaactaatagatgatcgtgtagcatgtactgatgtaaatacgaggcaaataccagcacccaatgctaacaaatactaacaggtaaaatattgtgcctgacattctgcatcaattgctcattttctcttgatgaacctaatttagactcaacagaacacatggtatgtctccggcacataatcaagacgcactagttcaaagtactacgttgtcttgtgcctagacagcaaccaaatcaaaagcatgcattggcatcaactaatatgaggcatataaaattttaaattaatcgcaatagcgtccaaacagcgcaggtatgaacccaaggcttgctaattctgtttcaccagcctacaaaatctgcaccactaagacgctactcaaatcacaggacaacaaaattaccaacccgacaagaacaaccccagacaactcaattcaccatccagcgtttcgccacaagcaatttcagcatctcacgcaggaacgcggaggagctcctctggacggtccccacccgtgcagtgcactgaaacctagatccggagtgcacggaacaaccaaactgttcatcaatcccatgatcccagcacaaacccagcacaatgatcacggctcacgtgatgagccttacgttacgagacagcacgctacatcccaattatccaagcacccgatcaggggggctacggaatatccacacgctaaacctagtttggggagcgatcgaacagagatggacacacaccctgaccacaccaagcacacggaatagctagctatctaaacaaatcacgaagcgtgtgccgcgagtagactcacctggtacggtaggtggtaggaagtgttgggggcgaaatctctgtagggcgtggggctcaggtggcggcggtggcggggccgcggaggtcgtcctggatgggggggaaggagttgcagcagtagcagcagcagaagcagcggccccaccgccggaagcagcggcagtagcaccaccgcccccgcacccgcgctctccccgtcgccggcgccggcgccggcccgccgcccgagtaatccattagaaagaaagagagagtgggtgtgatgaagaggtggagtgggtggaaagtttttgggtggaggtggaaaaggaaggaatcacatatggagtgaggaaagcaaagcaaaggggagagcttcagtgtggaagcgaggggttctggaagctcctcctccatctcttggattccatcgtctgccttcccgccattcccctgacaccgaaagcgcgcgagttccatcgtctgaaaaaaaaaacaacaaccagtcaatccacctacctgaagaagaaacgaggtgtggcttgggaatttgaacttgattggcagattaagaagatgagaatagtgatcaccgatggaaaatgtcaaccgtcagcacgcaatcagtgatcagtccaagatggcgagcgtgtccactcgtttctatcccttggagttcaggcaaacaagcttgaaaagaaactaatcagctctgcaagaaacggcctccgcctacactgattatcctgatactccagaaagaacagtgatctactgatcttgttctcttacagtttcaaacagatccacccaagaggcgttggcaaacctaataacaagatagagtgagtagaaagaattctagtaacagttgagactcaataacgaactgcatcaaatttgtaaaattcagtaatggtgctaatggaaagtagccattttgttttgaggatttcacaattaacaatatatcaattcagatggtttagcaattaaaaacaaaacacataaatattgatagacctgagagttcattagttaccaccacctgcacgaaagttcatcatagttccatccaccattttaaaagaggattaatatgcctacaatcttcataagacagggaataacaatttgaagcaaactaaaagataaaatcaattgcagtattcatcatttcacagaaaataagcactatatcatggcaaaggtggtattgaagaacagtctgtgcaaactgcaaaggaagtctattatggttttctccatactcaccttggttactgatatatcgaccataaataccttggccagtattttggccatcctttgacgatgtccatgattccaatcatactcaataatgtaaaatctttttcaccaatagtcattgcatgagcatactccatcacgaaacacatggaaacgatgacggtcacgcacaatgatctcccgctcgtagagcttggacacaagcttggaatgcacatggcaatcacggcacactcgaaggttcttgacaatacgaataggaacgccctggggaatgtttaagataccaaatgctaatgccagcctctcgctgtggtaggatagggcgatgcccttatcttcctcatcatccatgtccataatcacctggcttgtatccttaacatagccaattagttgcaatctcctctctatatcttccaatagtgcatagattttccttgtgagaggatgtcttgtatccccggaaataaattcatggaccaaaccatttaactctatgaagctcaaacctgtttctttcttggctcccctatcctccatcatctgccgaatggtccttgcttcttcccatcgaccattgacagcatataggttgaatagaacaacataacggccaccatcatatggctctagctcaataagccgcttacccacacgctcacccacattgatgtcattgtgcatttggcatgatgacatgagtgcaccccattgagaagcatgtggctccattggcatatccagtaacagagcttcagcttcttctacattccctgcacggccaaggagatcagctaagcatccatagtgctccctttgtggcttaatgccataatcctgcatggacttgaaaacccttttcccttcgtccacacgccctgtatgggtgcatgcacataaaacagcaataaacgtcgactcatttggcatgaaacccttctgaagcatccttcggaataattcgagagcacgctcaccatagccattcatcgcaagcccaccgatcatcgcattccacaacaccacatcgcgacgatgaactccatcgaaaacttgccaggcatcctccatgcacccacatttgcagtacatgtccacaagagctgtctcaagcatgagatttccacgcctacctccaaaactccctgtctccagatacctatgaacccaacgccccctttcaacggcgccgagatgcgcgcatgccttgagcacgctcaccagcaccaccacatctggcctgaattcctcccgcatcatccgatcgaacacccataaagcctccccaaactccccggcacgcacgcacgcgtccaccatggcactccaggaaaccaggttccgctcgggcattctggcgaacacctcccgcgcagcgcccaggtccccgcccttgccgtacccggacaccatcgtgttccacgagacgacgtccagcgcggcaccaccggagtagagcaccctgcgcgcgcggtcgaggaggcccagcgagcagtagagcttgaggagggagttggtgacgacggggtgcgcgagcgcgccgcacttgaacgcctgagcgtgggcgaggcacgcggcggcgaggcgcgcgcagcctgcggacggagaaggggacggggaagacgacgacgacgacgcgagggcggcgaggaggagggagaaggtgaacggggtgggcggcgatgcctcctcgcggatgcgggcgtacagggcgagggaggcggccgccggggcgccgcggcgggcgagcgcggcgtggagcgggcagcctcgggagggcgccgacgagaaggcggcggcggaggaggaggaaggtggggtccggagccaggggaggaggcggcgggggagcgcgggcgccatggcggacaccttgcgttcagaacagaggtgcaaagaagtttgagccttggcgcgccacgtaaaaacgaagagactcgcaaacgaatttgaatccttcagctgacgtttgtccttgaattcgatttatttcaccatgattttgtacgaaaaataaacgattactagtactactgtacgaatttggtgtagaatcttttgcattccagacttatcacgggtgttgggcacatggtaaaaggggtatcagtataatgaactccaggtttattttactactagtatgaaatcaggcactggttttccaacttattccatattttgcaagatacttgagttgtgcaaatcacagtagcatatgaaatattcccctctttttatcaggaaattttgttacacaatggtctagtatgtactaatagattttatgttcagatgttgtgctatttttcaatgataatagatgtgtatctgctaagcttcttttttctgtagctctgcgtgcaggaaaacacaagcataaaatctgaaaatgatgtctttcggagatgttttcatcattaaaggtcaacaaatgtcatggatcttacagctttaagtgaagcaacacagatatgaggctcaagaataacaactctggtatatactaacatctaaactatgatcgcagctatatatggctagttgaacatgaaaattgtggcaccgagagggggatcaaagagaacaaaagggacaagaaaacaaaaaccatggcatcccagcaatgtcgccgaagaacgtttgtactccataaactgccctggcttcttggccaccaaaacatggctgatcacttcacggaacaagccacacatacaaagtttttcgccccatctgtctaaaccggggtcaatttttagtcacactttatgttcctgtagatccttctcacaaacagtgtcgatccaagatacccgacagcacctggaccaaaattcgaaccggtatcagttgaaaccatcaaattcttgggtttaagcatgctaccggtgtagaagagcttaccgcagagtgttcctaaacctaggcagaacataagagtgtagccgaagtagaaacttgtctgaaagaatcctgacatcttggtcttcacatggtaataatatacggagtagaggtaaacatagacggcagtagaagcagcagagaagaatgaagtccactgccagtggtagttctccgcattcagcaggaaatatgtaccaacgattgttacacagatggtgacaattatgaggatcaaaaagactagcaacatgaacccatatacatagtacacctgtcaatagatgatcaggaaggatgcataagtctcaactctcagggctccttagtaatgaagcctgtatgggaaaattagtgttgcctgttttaccttgtagttccaaaatgatgtgaagacaaagtacatctcaatgaagatgctaccaaaaggaagcagtcctcccatgagggcaatgacagaaggcgtgaggtaccatttcttctcagggatagggcgaggaatagtctttactctgcatggattatttggggcaccactccagtttctaccaacaacagttcccaaaagagcaagagggaaagatatgaaggcccacaggatgaacacaaccaccatagtaccaaatggtatggcagctaatgatcgatagaatatagcgattgtgttaagcactaggccaattccaaagcacataaacggaaatagtgatgctgtcataatcattgccttgatccagtttttccctgctcagcaaaccaaggatttaaatgaggtgagcatcttatagtaaaataggtgtgtgcctgttcaagatgtaaagtaaactgagttcatacccccatgccgtgaataaagtgcaccactgacatatccagagatgaatgaagtaagggcataacaaacaatgaatgttgtgacaatagctcctcgcctacaataagaatataaggtgtgagagatgcgcttttgcatagaatcagaaagtacgattagacttaaatgcttcataaagtagttcagctacttgtgaaataaaagcaaaatatcaaaaataaagataaatgtgcactccaaagaaccttttaagcagttcattgacaggccgaaaattagaaaagggggctgggtttcatgtgaaggcggtaattatgatttgacaattcctcacatgtcataatgtgattgtagttataaccacacattcaggcacacctagaatctggaaagccttactgcgaaaaccaatgcagtcctgtctacgttaacaaattgtgtattttaaactggaggtggtgtatgctgtttggcttgacaaaagtaacaagtgacaggatggagaaaacttaggggcctaaggcatttagtagaagctgcctttatagaaatcggtgttaattgtagtgatttgaggtaaatcataaatgatgtgcatacccaatatacagcattccgatgattgccaacaaaatcactagcagaataagagcagacaactgtgtgccaacaccaacaagggctgaaagaagagccaaactgcgaggaggccggaaaacatccccatggacaagcttccatccagattcttcactgacatctctttcctgatattgaataaaaatgtcagcaagaggatgtatgaagcgcataacagaatttgtacattatttgaatatagatagtcaatcaccagagtttcaagatcatcatcgtcgcgggcatactttgcatagtcatttcttagagtgcgcatcaaaatcattgacactagcccagtgagaaagataaccatcatgaaagaattgaagattgagaaccaatggatctgccataaaatggattatctgtggtcagaggaaatgctgcaagatatacatgggaaattgagaatcaaggcataattttttatgtggaaaattggcaacaaaatacataagaaccaaggtgcagaaccaggctttaattgcagaaactgagttcttacctggtgttcaaagaaagggtagtcaaggtatacatcaaagcggtgagcaaatgttacattggttggttcccacttgacagaatatgtcatatccaatgccttacccgcatcaataagctttggactttcttgagtaagattaacatgaataatctacaggaatgtaacagtagtaatactcagtttcttgaaggtcctgcgaaggaataaatgcaagttcatgaaacccaaacctgattgccattgtatctgatgacgatgttcttgtgagtgaaaaggaaatatttgttatcgctatttctgtctgcctctccaacaaaacctgttaagttataagttattagactatatataagatctttgagagaaaatagtaatgataaaagaggatacataccccatagaggcaaatcatctttgatagtggcatagaatttcccagaagtgtgcagaaaaggataataagtaaatcaataagtcacagtgcgtaaaaatgtttatgcgtactgaaaaatggcaagtaaacacaccagcggagtcaagaaggaaaccagaacagcttaccaatgaagaattcaaaccaatatgaactctcaatcgcatcagataactgtttggccttgtcaggatcaagttcaattgaacaaatggtacccttgtcaacatcccctgagacaaaccatgatcagtcttaaacactgcattttaccttcccgtttcaatgttcaaaactgaagcagcataaaaagaacaatgcacaacaaaagtgattgctcacttccaaactttatgtcgatctggctgtcaatcagctcatttccaccgagaacctccccaagccctccccatttatgcacggggttattggacggatggcaaaacggaaggctgtagtagttgtaagtttcctgtgggttgttgtacgggccaaccttgttcacccagagcataaccttctcctccgattggtactacacaaagcgaagaacacgacacatcgtaaatgttccaaagcaccagacaaacacattcttcctccaaaatacacagtaggccaaaatatcacctaaatcctgagttaattaccgcaagaccaaacattacagtcagactaactgcactagacgttacagatcaaacgagtcaaactttcagaaggaccacggatgccgatagagacgaactctcgcattgcaacccctccatttctcaccactcgcgcggcgagatctctagcagagaccacgcgacgagaccccgatccagcacgagggagggactggctacccggagatcccgccccgccggagcccgcgccacgcagatctgaccctcccacccgggcgagcacggatctagcggaaccacggcgcacacgtccccgccacggcggcccgaacagaccccgtcgccgccgggtgggtggcgaccgagtgttccgacgccgaagcgcgcgccccccgtctgttgttcccagcgaggcggtgaagtgggaggaggagctggttggttttttaccttgtggtcggagtcggaggcggcggcaaggggggcgaggaagacgacgaggaggacggcggcggcggtggcggtggccgcgtgggcggcagcggaggccattgggagggacggcgagtgcgaggagaggagagggagggagcgcgggcggacgcgcggtgcagtggctctctcctctctgctcctcctattgtgttattattacgagagtactactactagtactagtatttttttttctttctttttgtttttttatcctctcccgggctgttcgttttgtttctctcttttttttacatttattaataatttaacactgcttgaaacgggcttcgattgttttacattttaacccactttcattcactcagatggtctcatgtatttcctccataaaaaaaataatctaaaaggggatatgatttatccaaattcgttacattaagagaggttacatcctggtcacagcgtgttttaggtttttcttttttttacggatagagtatcaatcctataagttttaattaaaataaattggacactggaaaaaatattaaattatcaaatgtcttgtgtgttggtgtcatcaactggtgttgctgacttcctgcatggaggagcgagatggttgatggggttgaggaggttttgaggagaggcacctctcgccggttgagggtaagggcctgtttgtggaactttagattttgagaagcagttgtttgacagccagtttctaaaaatctggaaaagccctgaaacccagcttctccagcttctggtttcttagttcattttttagaatctgtaactacatattctcagaagctgtgcattgtttggggtagcttctagcagaagcagcttttgtaaaaagctgcagctgggacaagctcccccaaatagggcctaaggctgtgttcgctagtttcggttaggaacacatgtcctatgcacgaggggtctattagcgcgtggttaattaagtattagtatttttttaaaaaaaaatagattaatttgatttttttaaaaaaagtaactttcatatagaattttttttgtaaaaacgcaccgtttagtagtttgaaaagcgtgcgcgcggaaaacgagagagtggagttgggaacctatgagaaagaactcagccttataaaacgtgcaatgtcttacggaggggtcgattagtaaacatattactttctccgtcccaaaatgtaactacctagtataggatgtgatattatctagtcctacgaatctggataggaggtagtacaacaaatctggacagcttcgtagtggtagcactggtggagaaaccatttatactcccggttggcaaccccctttagtcccggttttccaaccgggactaaagatgggcctaaagatctttagtcccggttgaaataaccgggactaaagatggatctttaatcccggttggtaacaccaaccgggactaaacgggactaaagagagggtagcggcagttccattaggtctccttttctttttttcattgttttttagccagagtttaatccctatatttcctctcaaatcgagtgggatgcatatccaaatcaaaccccaaatcaaaataacatcccaaaatattcacatcacaaatcttaagttacttgtacacacaaatcaaatacatcacaaatcttaaaaaaaaaattacacacaaatcaaatacatcacatattatacatctcagatccatacaacaaatcacaaaattatacatctcagtgaatcacaaattgtaaaaaaatagaaaagaaataatggatgccggtagcgccacctgccgccgctcgctactcggccttgcgcggcgcctgctgcgtgcggccccgccggctgcctgccgcgtgcggtcctgctgggcacgggaagggaggaggcggcccttgccgggatgggaggaagaaggggaggagggggaggagagggccgggatgggaggaggaaggggaggaggaggagagggagatggatctgaggagagatcggatgggaagggaggagtcggatgggaggggaggagggggaggagaaggccgggatgggaggaggaagaggaaagggtgatgcatctgaggagagaagaggccggttgttggtgagtggatagggaatatggattatatactacgcatgatttggagtaaagatctagaagatcccaaccgggactaaagtgatgatctttagtcccggtttgtgacaccaaccgggactaaagatccccgcccctctgacaagggactgacaggggatgaaccgggactatctttagtcccggttggtgttaccgggactaaagatcgtagaatggctgtgggattttaaaccgggactaaagaggatctttagtcccggttctttttgtaaccgggactattgtggttttggggcgaccgagtaaagatcagttttctagtagtgtagataatgtcacattctatattaggtagctatattttgagacagggtaagtaatgaatattgataagttatataagaagttttgtgcaagtgtggtaggtatttaagtagaacattagacgtgtagtatttatgtaaatggattaacaaaatatagaatagtataatttctattggtaattaaatagctgcctatgtgatatagtgtgacaaaggttacatgtagtaaacttatactacaaataaatagcatttttccttttttttccttttactttatcctttgaatatttcttgaattgtggatattttgtgttttcatcaaactcgttgttatagtactagagtatttttcaacttttttcattgtacagttgattgttcgtatctacttgtatagttttctttttccagtgtccctacatggtatttcactttttgttaaaaatgtcacttttagatttttaagatttgttcttcattattatattaatagaatacttgtcgatacctcgtgccatttcatcacgcaagacaatatataaaaggtccttttccattctggccattttgctcaatatataacggccgatccatgtttttttttgtcatcttaatggtaccaacattattcatgaccataggaggattattgggcacctagctatttatgtgcacagtgcacttgcaaagaaagagcatgtacttcatcattcttcttgtagtgaattgttcactgattttattatagcggtaataacacaaatataaatataatcaaataaaaccattttttgcgaggataaaaacctttttcgttgtggttgattatattatagtcggccaatagcgattgaatatacatactgggcattgcccaaagtacttttgacggtggatccaatggtattcttctaagtgattgataaatattgcttatcatagtttgagaaaaaaaaagtcaattgtgtgtcatgtacttctgtttggtattgaagagaataatatgtctttcatattgttctcttcaccaaaggatggattaagccttcttatgtcataagagtataaaaccatcctctcacatttctttccatttaactataaaacactactcaatagatcattaatcaagatgattttgctacaagtataactaggtgaacctcgcgcgttgctgcaaaagtttaatatgataacaccgagtaaaaatattgtgtaagatagctagataatataatcttgcgtaagtttatgtggtttataataatttaaatttaaatagtatataaaataatgattcaaatgtaaaagtaagttgatgtagttttatgagagaagaaaaggagggagatagtttggatcatagattaatcatctaagagctaaaaacaattgaggtgatatgacttaataaaagaagaaaataagtggataatttggaccgtaaataatcatctaagtacaaaacagttgagtgatatgggttaatgagaggagagagagagagagcacattttcggcatgtttggcacaactctagctcttaactccagctttaagccggagttgtgccaaatggtttagatcctatgtttttaggagtgaagttagcagagctactccttaaatatggactacgaggtggagctgggtttttattgctccatagctccattccaacccaaaagacccactgccttcaattttttttagcatatttacacacaaacgctacagaactacccaaaactcacctcctcacccctctctatccctcttgaaacttcacctcccatgggcgagcacagacggcaagccaacggcgatgctccgacgggggcaggcgagcagtgcgagcagctggcgcgagtggggaggacgcgctggtggcgcacgaccgttggtggggattctatttttttttaatttttttagatctagagctaaaagctagccaaacatttttcaacaggtcttcaacctccaacaggagctagattctattggagtaggagtttggagtcctaccaaacgggaccttcaactaagttatgaattaggatgaatgtaatccatccaataaaaaaaaagccaacttagaatgtgtcccctcttagtataatgaatcaagatatatctggatatgcgtgtgtatgttcatataaataagtgtgtcgtgttgtgcgttgtctatgttctgtgtttataaagaaaaaaaaactaccatggcatctccgacggattgagatccagtgcagttgttactatcactgcaactttagtagttgcaaggtagccgatggatcaaaaacagcggctcagatcatcagaaaatactgttcacgaatcactgtagcgtatactatgcaggggatggcagagtagatccaagctgttggctgcatcgatccaacggtcataatatgctatcactgctaaagttgtagtcgttattttaactgcattggtcataatacgctatcactgcttaattcatccccgaccatgagtagtcctaaagaaaaaggaaggagagtgtgagggtattgcaggaacgacgtgggtttctttattaccgtttccaaccaacgcgctgttggaaccttcgccttgtcttcgtggctatcttgggatcggtgagcttaacgacgcgatcatgatcatgccaggccctgtatagttcataaaacaaaaattttacgttgtcacatcaaacgcatacataaaatattaaatgtagggaaaaaaatcaattacacatatttgcgtgtaaattgcgagacgaatcttttaagcttaattgaaccatgatttgataatgtgatgctacagtaaacatttactaatgatagattaattaggcttaatatatttgtctcgcagttttctggcagaatatgtaatttgttttgttattagactacgtttaatactttaaatgtgtctacgtataatccgatgtgacaaccaaacctaaaatttttcccaactaaacaaggcctaatgcgagttgtcggaactcgggaaccctcctgttcggcgctgatcaatggctcaggccctgtttagttcccaaaacaaaaattttcacgctgtcacattgaatgtttggacacatgcatggagtgttaaatgtaggaaaaaaataattacatatattgcgtgtaaattgcgagacgaatcttttaagctaattacgctataatttgacaatgtggacagtaaacatttactaacgacggattaattagacttaataaattcgtctcacagttttctagtggaatctgtaatttattttattattagcctacgtttaatactttaaatgtgtatctgtatatccgatgtgataatcgaagaaaaagaatttccccaacttgactgcacgctgcagcccccagcttcggttgtgtacaataaaataccactgtagtagtactattctctagtacatcgtggtcaacactttggcagttggcacgaatcaaagtgaccttacgacgcggtaggagtcaacataagcaaaggcaaagaacttgcaccgaatcgggcacactgccgacaggttagaagcataattaagcactggaccgatacattgacgggagctaggaatttacaaaaaatactaggactgaatcaatcaataaagacctcaaccaatgcaatttgttgaatcctcaaaacttttcatgattttttaaaggatttacaagggattaaaggaaacaagcctgatgttcaatccctaattatgtgtctccgccccggaccgataaccgctttcaaatgcaagtttgagaaagaaaatgaaggaatagaaaaaaaaacaaaggattgtaaataatacagaaataactagtgcctgattagactgcagaaaaaaaaatgaaatttgagaaacacataaactcgagaagagaaacagaagaaaacttttcgttaggctgaaccttatgttaaaattaggtgatacacctgctttgctttggaatttatgatgggtatacgtgaaatattgcacgatattgaatattgaaacattatgaaaatgacgtagggagaagataacgtgtcatgcttgtacaaaatttaagatgctactacatctgttctaaaattttgtaatctaggatgagatttgacccataaaaattcattgtcttaagttgagtcaaatcccatactaagttgctatatttttagacggagaaagtactccttccatttcataatgtaagtcattctagcattttccacattcatatatgggaaatgctacttatatatgggaaatgctacttacattgtgaaacggaggaagtaatagctaatgatgatgagttgatatacttgtatgttgagctttaacttataataattgtataacctatatagaaagtatagtttctactggattcaatgggtccaatcctcaatttaaaatagtgggctcaaagccagcacaaacagacataaataatagctgtgggccgaaaccaccgtgtccgaacggcattgcattgcacgtatgcacggcaaaggttgaattaccacggccgtgtcaggtggaagaaagctgtgattcttcaacattggtaagcacatcgaagcattgttagtttggtccaatacctcttgaaaaaagcaggtgaaagcataaaaggttgcaaacaatgattgtattctgtgattgtccttttgaatttgattaatgggagcagcccaacattaccaacctgcataattcagaaggaaggggggtaattctcaattctgaccaactacccagccttattttgaatattgtacatgtatgcaaaactataacccaaaagctaagattttgtaaatcatatgcacaagcactggatgaaaaaacgactgatctgagcagctcattcttcgtcctcagtctcctcatcgtcgtcgctgctagcagctctgtacctcgccccgtccccaacattatctccctcttcctcagtctcctcgctatcgtcctcgtacagcacattcctcggccactggtgctcttcgacaacactaacaggaggttggtatggctctgtgtaacccctgcgcttagggaccttgggcagtggcatcttggccgtcaaggagggcttgcttcttcgcttcgacatcttcgaagaggcggcttgagcaccggcatcctggtagtgattagggtgctctttcttcagatggaggttaagtttgtactcatgaatgtatgccttggcacaaccatcataaggacagacgtatgggcgatcagctgagggagtgggtggagctgctgacggtttcggtgtgtgactattatgggagtggtctgctagaccactgcggtttgttgcagacccacctggattctggagaccaccctatatcagtgttatgaaagtaagtggtcagaactggttccttcctaagcacaaatctggaggtataattagatcttaccttttcatgctgttgcttgatatgagcccttaattttgattcctgtgtaaaccttcgagcacattctgggtacttgcacacatgatagttatccacagaatgtgttttcatgtgtgcctttaaattaaaatccaatgagaaagcctgcaataaccaggaccaaatatgttaacaagaaacataccaaaacctaacaaattaacagcaacaattaccgataatgccaaagggggtggggggtttattccataattagaatgtttgaccatatccaagcatggcccaaaaaaactcaatactattagagaaagggaataagtgttgatatgccactccatatggactatttaacatgtatttgaaatttatgcatcgtacggaaaatgcagtcaaggaatagaaatgaatgacaaagtttacaatggagagatcatattaattacctttccacagccttcatgagggcagacaaagttcttctctcctgtatgaataagaaaatgcctcttcagcttagagctgtctaaaaatttctgcaaagtcagattcaaaaagaaaataacattagcgaacaacccagaagcagcaatgccatagtgatccagaaaggccaacgcaggcaagaaagattacaggcagtaccttgtcgcaaccggcatagtgacacacatactgcctctccccgtgaacatgagcatgtttcctaagagcccctgcatcaacaaaagttttcccgcagccctcatagctgcacaggaagagaacctcggtggttggttcaggttttgccagttctgcttcttgttccttgtccctggatttgagagctgacaacctatcctctgtaaagaaataaggtgaaaatattaacagctgaaagggtagttcacagaacaaaaggcatgcccaagcccaacaaatgaattcaactagtttagtatccttattggttggacatgccgaatgagaactctacactgctcataaatatgtcgaagtgaagctcagatgtagtgcagactgcaaaggcatgggatattggtcaaaagatatacttgtaactcgctaaaaaaacgtttgacaaaatttcaattgttcgctacatttatctcagatcaagttatttatttactagaacaaattggtttatagggtctgaaatttggaaatgataaaaaaaacatagtaaatctcactattccaaaagtcaaaaggactacacctgtgcctcgcagtcccaggtacttggactgcaatgcttatgccatacagtaatgaacggacagcatgaaaaccgaaagcgaactaagggcgcgttttaactgggtgattggatagatcatagacagacagaggaaaattgctcatatggatggattaaatattactcactccatctacttttgatggtcatatttcatcttggtacacagaccaaagataagtaattctacttatcatccatttaagcatgctactagttattcctcgtaaacaagcgattcattaatatttacatttctcgatgcccatgtagtcaatcttgtgtggaagaatggagagtcacgcattaaatctgagaaagtcattaagaggataggttgttggattgaaatatgcttatgaaaaataaaattttcagatttggaaatatgcctatcaaaagtaaatggagggagtataaagctagcaaaaagcttagaaaaacttatctaaacaatgctgatgtagaaagcttttttttaaaaacaaattgtacttccaagagcttcttttttttttttaagaaatcgtacttccaagagcgttgcacaaataatccatacatccattagctgtttagaacgcgtactaattaccgtcaaagctgtcacaaagtcacaggccaagcaaatcgcatagctcccctgcggtaaagctagccaggggaggggccaattcagaaaaaaaatgcctaaacaggtcctctctgataaaccaacctcccatggaattcaagcagccggcaactgcaagggatcccatcgcgcatgataacatcacgcgcgagcatacggacgataaaccgcacatagcaaagtagtaacagggcggggaggcaaagcaaaaaattgaagagggcggggcgtacctcgcacccatttgtagagcgcgcatgggccaccggcgacgaccagatcctgcggaaccctaacaacatgtataagcgcgtggcgcggacgagagatcagatccgaatccgaatcaaaccaacaagaagctctctcccattagaagaagggattggaattcgaggaggaaagaggaacggaccactccttgacccatcggtggcggcggcgcccggcagtctgcatcatcgtcgacgtcggttaatttgcggcggcgttaggggggggctaaggggagaggaggagtggagggtttgcgttgcggctagggttgagaagcttgggggaggaggaggaggacggctgggatggtgacggcatggtggtggagggaggtggtggtggcggctaa

SEQ ID NO: 5742 - DNA, 52866 bp, Oryza sativa
  unsure (1)..(52866): unsure at all n locations
tgcgcgtgtggggacatgctgcttgtcgcgagcgagagagagagagagagagtcaagagcgacgggggcttttgcttggcctcgagggcagttgagccgagacggaatgcggagcagagggaagtactgaaaatctgacgttctgatcctctcacaaaatttattttataattaacccgtgtttaaaactatagtcaaaactgaacctcgagcttagcaccgagttatatgcttgaatataaaaaaaacaagcatatcagagaatagtgaacggtaggaacattaaaaaaaccaaaacttttagcagaaataaaagtttgcgcgcaggcggctgggctggcacggtgacggcgcaaggcaccggcgcgtgcacgtcggcctgggcagggcgcctggcggccggcggctggggtggggagggttggccggttgggatgggaaggggaggtgaggagaagaaatagggttagaaatgtgggcttttatttgctattgggtcaatggacctaaaatggtgggtggtgggagggttcagtttgggcttcttttaagttttgaatgggtataggtatttttcttttttcctatatatacatatatggaatatatacttcatatatgtattttttgttcaaaaatcttgggtattcatttgaatacccacgaattatagtgggcccgcccctggataagttgggccgatgaggacatcgggtcctttgaagggggtatatgtgatatcctggcctaattaggatttggcctatgtggcggggggtgggggtatgtgacatcctggtccaattaggatttggcctgtgttgcccatgagagatatgtgcttgtttagttagcaaagttggaaccaacttataaatcctcttccctccaaccatgccactcctgggtttaccttttacacgaaacaaggatgaaagtgtaagtggggtggtatgtgtaagtgggctcgtccgtcgaatgggatggctatgctattctggagggagggctattacacttttgcacgtcactagtctgactacctccttgacacctattggactacccgttggttagaccgctcgttaaatgtcggtcccgctggttaaaccactcattaaatgtcggtctgattgtcggaatccagaaaaaagcgtatcaacgaaactcttgaaagtagattaactttattgcatcaatatgtgtttacaaagtgcatctaaatcactcctctctcaactcacaaactaggattgaaacatcgaagcaaaccctaatttttctctccaaaagatgatctctcctagcctcaagccatcttctatttatacccataatgtggttgtctctagccacgaatccaactagaactaagacttctaatcacataggaaacataccaaaacagggaaacaacatccccatagaattccacactccaatattcctaaacttagactccaatcaaatttgactcatttttccatacgcgcacaacaccatgtgtatgccatatggaaaccttaacctccatatgcattgttctctagtccgagcatcccacatgatatctttgaccgtctggacctcaacttctcctaagcctagtcctgatctatcatcggttatactcctccatattcgagtacaagttcgcaccaacttgactcacatcagcacacaatagtatcatatacgaataggaaccatctgaaagtcataaacatgaagcaatctagaaattccacgaaaataacccgaaaccgactctccctcgaagtctaccagtctgacagtcgggctacccagtctgaccacccaaacataaatgtcatgatatttaacgacctctaagaatagtatagaacatagaacgataaaccaaataaccaaactatggtatgatgagggagcgataatgaataagagaaaaatataagaaataagctcatgtaagtgctcaaaggtttgatggcctctaagaataaataaaacatggaataagagaaaagtattcaaatcatatcataatgtgacgaaggagtgataactgaacgaaaagatatagcagatctaaatctaatgtaagtgtgatatgatctgatgacctgaaagaataagataacatattaaaaagaagatataggagattcaactctagtatgatgaatgagtgacaaatgaatcaaaagggatagatgatataaggccatgtaattgcctgaaggtttgacaatatctaaaaatggataaaatatggaatgaggatgcaagtggttaaatcatggaggagtgatgaatatgaaaagatatactaatctaaatctaacgcacgtttggtatggctcgatgatatgtaataataagataaaatattgaaaagaaaagaaaagtggttcaactatggtacggtgaagaagtgataaataaatagaaagaaatagattatatgaataaatagctcgaacaactaatgacctttgagaataaatagaacgtggagagatgatgatggaagtgatcaaatcatggtgcaatggatgagtactagatggatgaaaactatgtggtatatttaaatataacataagtatgctatggtccgacgatctctaagagcaagatagaaaaccaaaatgaagaaataggtggttctattatgatgtgacaaaggagtgataaatgaaagaaaagaaattgatgtgtgacacatgagtgataaataaaaaaaagaaatagctgatataaacccacgtatatgctagctacaaaacaaaactaaagatatcaggataaagtgaaaaggtcaattaggcctagagggggggtgaataggctaatttaaaaacttaagtaaagtagaagcagtaattttcggaactaggctgggaattttcggaacttccgaaaatgcacagagctagcagcgcacacaaaaagaagtatctagatctagaagtctaccacatgtaatccaaggcacatacagcaactagaccaatagcggcacaagcaagcaaagttagaggagagggatgaagagatatcaccaaggtgaagcttgcaaacttgttcccggagttcaaatccttgaggggattctactctccgttgaggagctcactaagagccgggtcttagctaactctttcctcaagaggttgcactaagcactcctccttccactaagaggtatctcttcccttgcggaggcgagatccgaccttcacaaacttctcccggccaaccacaagtagatcggtggctcgggagtgacacctagccgtctaggagtcctcaacctccaagagtaaaagatgatgcaaagaactcccagagatgatgcaagtgctcacaaatcttcacaaagaccacaagaaccacccacacaaactcgaatccacactctcacacacacaccaaatccaaatcaaacacgggtggagagatgaatcgaggaagcaaggctcaaatgaactagagagagagagagagcaagccaatggcacaaataattggaatggaaccagcagccctcacaagtgaggggaggtgggtatttatacccacatcacaaatctgcccgttggagtgcaataaaagggattttcggaacttccaaaacaatttttttcaagggaatttgcaccgggaattttgatgaaagcaatttgcaaacctttgataggagatggagtgaaaagaatggtcgaacatttaggccccatttgagcttatggctagcacgcaataaaccacacaaaacaatagccacaagacaaatggatgatccaaagatcaaatgagagtgaattaccatgagacaagatgattcaccctcgaaagagggaatgtgcgaatctattgcaaattgtgttaggaccaacattcattgaaaaatgagatccccatacacatagattcaaaatatccacaaaaatgtgactagtgtccatccatgaattgaatgttcattttatcacaaggagtaaagtaacctatactagaaaccaaaaacaaatgtatgcaaaagatcaagctacgtttcgagaatccaagatattgagttcacttctcaactcacaaaacctagcttcatctagaggcttggtgaacatatccgccaattgtttgtcggttctcacatgttggatatctatgtcgcctcttgtggaatggtctctcaagaaatgatggcgaatatctatgtgtttggttcgggaatgttggacggggttattagctatcttaatggcgctctcattgtcacataggagtgggattttggacacatttaggccatagtctctcaaggtttgcttcatccaaagaagttgagcacaacaactccccgccgaaacatattccgctttggcagtggatagggcgacggagttttgcttcttggaagaccaagaaacaagggacctacctaagaattggcaagtactcgatgtgcttttcctatccactttgcacccggcataatccgcatcggcgtagccaatgagatcaaacctcgctcccttaggataccaaagactaaggttaggagtgtgcactaagtatctaagaattctcttcacggccacaaagtgacactccttcggagcggcttgaaatcttgcacacatgcacacacaaagcataatatcgggcctagatgcacaaagataaaggagtgagccaatgatggaacagtataccttttggtcgacgtctttaccttgctcattgaggtcgaggtggccatttgatggcatgggagtgtggattggcttcgcattctccattccaaacttcttgagcatgtccttcaaatactttatttggcaaatgaaagttccttccttgagttgcttgatttgaaggccgaggaagaacttcaattcacccatcatggacatctcaaaacgcttggtcatcattctactaaactcttcactaaaagacttgttagtagaaccaaatataatgtcatcgacatatatttggcacacaaaaatatcattattatgccttttagtaaaaagagttgaatcggctttcccgatctcaaagccgtttttcacaagaaaattgcgaagacactcataccaagctctaggggcttgcttaagcccgtagagtgccttatggagcttggacacgtggttgggatattttggatcctcgaagcccggtgattgctccacatataccaactcgttgataggcctgttgagaaaggtgcttttgacatccatttgatatagcttaaaattgaggttagtagcaaaagcaaacaatatgcgaattgactcaagtctagctaccggcgcaaaagtttcaccaaaaactaatccttcgatttgggtgaacccttacgccactaacctcaccttgttccttattacgaccccggcctcgtcttgcttgttgcggaagatccactttgtgccaatcacattttgccgaggtcgctccaccaaagtccacacttcattccaggtgaaattgttcaactcctcttgcatcgccattacccaatccggatcattaagagcttcttccacccttagaggttcaagagaagacacaaacgagtaatgctcacaaaaatttgcatatgagaacgagtggatactcccttgttgatgtctcctaagatgttgtcggtgggatgatctctttggatactttggtggattcttgggcgagctaagttgatcggtgagggtggaacttgctcgtcttcttcaccttgattcaagcttgaggtagagggatcgtcggcttgggttgatgtaggtggttctacttgtgttgaggaagaggctccttgttgtggctccctaggacgtacgtccccaagagccaatcttttgattgcttcgctcggatcctcctcttcacctaacacatgtgattcaacttgctctacttgagagccattagtttcgtcaaatgtcacatcacgcgcgatctcaacaatactggaggttttgttgaaaacgcggtatgtgcattcatttgacccatacccaagcaagaatccctcattcactttaggagcgaacttagaggatctagcctttttattaagaatgtaacacttactaccgaaaacacgaaaataagagacatttggtttgttaccggtaagaagctcatagggagtcttcttaagaaggcggtgaagataaaggcggttgatggcgtggcatgcggtgttgacggcttcggcccaaaaacggtccgatgtcttgtactcatccaacatgatcttcgccatctcaatgagagtcctattcttcctctccgctactccattttgttgaggtgaatatggagccgagaactcgtgcttgatgccttcttcatcatggaaactctcgatgcacgtgttcttgaactccttgccgttgtcgcttcaaatgttcttgatcttgaggtcgaactcgttttgtgctcttcttgcaaacttcttgaagatggcttgtgtctcactcttgtcatgcaaaaagaacacccacgtgaagcgtgaaaagtcatcaacaataacaagaccatatttgttacctccaatgcttagataagcaattggcccgaagaggtccatgtggagaagctctaatggtcttgtagtggtcatcacattcttgacggggtgatgtgctccaatttgtttgccggcttgacacgcgctacacaccctatctttctcaaattgaacatttgttagtccaaggatgtgatcgtgctttagaagcttgtaaagattcctcataccaacatgggctagcctccaatgccaaagccaccccgtgttagacttagccactaagcatgtctcatgtttggctttacttgaggaaaaatccacaaggtaaagctctcccttgagaacacccttaaaaactaccgaggaatcattccttctatagacggtcacatcaacatcggtaaaaagacaattgtaacccatagaacataattgagaaacggacaaaagattgtagtttagagattttaccaagagaacgttggcaatggaaagatcagagattgcaatcttacccaatcccataacctttcccttttcatcgtccccgaagactatgttatcttgtgaagtgccatttggatcaagagttgaaaacattgattcttctctggtcatgtgattggtgcatccactatcaatcacccaacttcttccaccggagacatattcctacaagagatcaatttctagttttaggtacccatacttgcttgggtcctctcatgttagtaacaagtgccttaggcacccaaagtactctcttgatagaaatattcttgccccttaggcctacatacttagcaacaacataaccactagcattcttcctaagaacataagatgcatcaaaagaaccatgtgaagcataatcattagtaaggatacttttggccttaacaaaattgctaagaccttagggactcttgatcatcacactcttgtccacctttccttttggtggaggaacatacccaagaccctcatggttgaagttgtccctttgatagcctaggtactcctttagggccttactacccatatggcacttaagtaggccattgtgaaggagtcccataagcttctcattttgcttttgcaaagcactcaaagaaatagagttagtagcacaagcttcaatatcaatatctttgcatttcacacatggttcatcgcttgggacaatttttgaacaagatggctcgctagggagagagacactattctttaaggtttcgaacttctcttcaagagagaggtatgctttgtccaagccatccactctctcttgaagttgagcgttcgccacctcaagattagcatgagactctttggtttgcttgtaaagctgtaccaatgcctcatttttctctctctccttagcaagctcactcttgagttcatgacaccgctttttctcacgaatgagcaaaacatcttgcctctcaagtgttgcatattggtcctcaattttcctaagcaactcactcaagtgtggtagggattccttagttatggatttaaacaattcgtcatccataacctcatcctcctcatcactaacaagatcaacattaaatgacttgagaggagaaggtaccttaggctcctttgccatgaggcaaatgggagcatcctcatcacttgagttgtcgaagagtcttggtggtgatgaaggcttgacggcgaacgcgacgactccttcttcatcacttgagcttgactcggagtcggagccgaagatcatcacaaggtgagcttggccataatgttcccgcttcctatgcttgtgcttctccttcttctcatccttcttctcacccttcttcttatcttccttgatgtgggaaccatccttgaggtgggggcaatccgcaatgaagtgcccgggctctttgcacacgtagcacactcttgcggagtgtcttccacttgacttgttggagtagtgcttggaagaacctcccttgaagaagccgcttcgtctcatgaacttgccgaacttcttgacgaagagagccatctcttcatcatcgatctccgccttgctcttgctcttgcggttctcttcttcttcttcctttgccttcaaagccaagtcttccttcttgatgcttgcggttgagctttggttgatgtattggatgacatccttggactcttgcacgagcatgtcatgggcaaggatgcgtccgagaaaatcacgaggtgtgagagtcttgtagtccggacgctcacgaatgatgatcaccaaggtagagttccttggagtgattgctcgaaccatcatcttgaccacaacatcattggtcatgtccttggagccaagtcccttgatctcattgacgatcttgctcaactggtcgtacatgtcgcttgggctctcaccatccaacatcacaaatctctcaaattgccccttgaggatctccaccttggactcacgaacactatccgtgccttcatgcaagttccgaagcgtgtcccaaatcactttggcactctcaatgccatccacacggttgaactcacttccactcaaggcgctaagtattgcattagcggcttgagcgttcttgtgctcgttctcgtcgtcctccttggtgggatcttcgggattctgcaaaacatagcttttttcgactattctccaaatagatgggttaatagacttcaaatgcatcttcatcttatgcttccaagcggcatagtccgtaccactgaaatatggagctttgccgctataggtactcacataagatgtagatgtagggggatagtcataagggatcttagctcccttatcaccatcgatcccatcccctgcttggcccgacatgatctctccaagcggttaagcctaattaggatattaggctctgataccaattgaaaaggtcaattaggcctagagggggggtgaataggctaatttaaaaacttaagtaaagcggaagcagtaattttcggaactaggctgggaattttcggaacttccgaaaggattttcagaacttccaaaaatgcacagagcagcgcacataaaaagaagtatctagatctagaagtctaccacatgtaatcaaaggcacatacagcaactagaccaatagcggcacaagcaagcaaagttagaggagagggatgaagagatatcaccaaggtgaagcttgcaaacttgttcccggagttcaaatccttgaggggattctactctccattgaggagctcactaagagccgggttttagctaaccctttcctcaagaggttgcactaagcactcctccttccactaagaggtatctctacccttgcggaggcgagatccgacctttacaaacttctcccggccaaccacaagtagatcggtggctcgggagtgacacctagccgtctaggagtcctcaacctccaagagtaaaagatgatgcaaagaactcccggagatgatgcaagtgctcacaaatcttcacaaagaccacaagaagcacccacacaaactcgaatccacactctcacacacacacacaccaaatccaaatcaaacacgggtggagagatgaatcgaggaagcaaggctcaaatgaactagagagagagcaagccaatggcacaaataattggaatggaaccagcagccctcacaagtgaggggaggtgggtatttatacccacatcacaaatctgcccgttggagtgcaataaaagggattttcggaacttccgaaaattccagatatgagaaatagtcgaagtcaacgcaattttcggaacttccgaaaatttccagaacgcttctgtgtattttcggaacttccgaaaatttccagagagctctcaaacggttctgtgtattttcggaacttccgaaaatttccagaacgctcaaacacggttctgtgtattttcggaacttctaaaaattcttttcggaacttccgaaaatttccagaacgctccaaaagagaaatgcttcgaagaaaaattgattttgagcacatgcatcactccttatatgtctatgcatcatcccccttaatagtatggctttcctacgacacaatgcgaggaaaaagatacaatataccatttgatcattgccgcattgcatcgctatgtcgcattcatgggatatgcattgtattacaacacgttgaggacataacaaccttcatatttgcttgaataaaaatgttagtcctctctaatcgcattgtaatcaatcatcaaaatcattaggggcctagatgcactttcataaagaaaatcttacactcatatttaatatcacacattctatcttcgcgtcatctcatcccacaccgttctgcctacacatctctttctccctctatttttttttgcctttgtaggaaaacatgtatttaatatcacaatgaatttatttgttattgttggataaatctgtacgaatgtaagtgtgtgattctagttggattgtttatcagtgtgtatgaatgattatatgaacacaatttactatgaatcaatgcaaattgtatcacttttttttgcattgattacatccttttttttgaaaatcagtatcaccagcgattaatgtgaggaataggcaatgatactacttatggtagtcgtttcaaaccccggttgtggtacctcgaactatcatcatcatcaattatccactgttggttcaaaaacggacagggatgtcattgttttgattgacattgatgtgttatggtccgacaacctataagattaagaatttaagatatataagaaagaagaggtaggttcttttaccatgatgtgatgaaagaacaataaatgaatgaaaaaacatatgatatgaggacatataagtgcctgaagatttgacgactcctataaataaataatatatagggaaaaagatgcaagtgatccaatcttagtgtgacggaggagtgaaaaaaaagatgtagtagatctaaatctaacataaatatacatgatatgacaacctctaaaagtaaaataaaatattaaaaggaagtgacaagcggttcaactatggtgtgagaaaagagtgatgaatgaataaaaacaaatagctaatataaacacacgtagatgctggccacataacaaaattgaagacgtactaatgaaggaaaccttatacttatattcaatattacacgttatatctccatgtcatctcacaccttgcgccgttccacccacattttctttgtgtcatcacaccctgcaccgttccacccacacttgcctttctttcccttcctacaaggcagattgcaaggaagatcctattgccattgtttgttttcacaccatcccatttggaaccttttcttacgtgcgaacgatgctacaccaaaatctatcatgacaaaagcaaaaacctaccgaatccaaacaccataaaaaggcttcatattcaaaaattcaaaccagttttgactgtgggcacacattatcttaaaaaaatgactgtgaccaagtgaagtggtggcaactgcaacatagtcctaggctactataatttgtagtggtagaattattaattttgatatatacttaatactttgcgaatgactataacttgtacatagattgcttgtggtttttatacttgctagttaacaatagatgtttaattatgacagtctatacctattaatagatagttccgtcatgttggttaaaaactcatggtaccagtgggtacccagtacccgacgagcatggatatggttttttttcccacccagcgaagagtattgcacatgggcggacaaggagttttcgggtctcgggtcaagcatgttcttgctccacccaaactcgaccgacccattgtcatctctaaacataagtgtccatagtatgatgatatctaaagtataataaaatattagaaagaagagataagcggttcagctatggtgtgacgaacgagtgataaatgaataaaaataaatagctgatataaacctacgtagatgctagccacgcaacaaaaactgaagacgtctaaacgaagaaaaccttacacatgtattcaacaccacgcgttatatctttgcgtcatcgtaccctgcaccgttctatccacactttagtttttttttccctttccacaaaggcccattgcaaggaagaccgtattgccattgtttgatttcttacatgctaggaaaaaaatagtcacaacaaaggcaaaaaaaaaactacgaattaaaacaccgtaaaaatactacaaattcgaaatttcaaacccattttgactatggccaagatttatctatattcttttgtgattaaaaaattttgattgtgaccaagccaaagtgtgatattgatgaggagcatacgaggatgagaggagagaggggtggtgtggtggtggtgtggtgggggtgggggtagtcgacaaagcgcccaaagtcaaacccaaccaaaagtcattggctccatcgctgcggtgggctgacagcccgtacatttttttaatccacccccgaccgtggactttgcaccatttcgccccccctttttttagaaacaaaaaacccacaaaaagtcgcccacccaaagctcgcctcgcctagcgacgatcgcgagcactcctcctcctcctcctcctccgactccgatcaaatcacaccggagaaacctcgccgtccggccacaccggcggcgcgcgctctctcgctgtcgggggggttggcggtggcgcagccgcggggcgagaaaaatctggtctcggacgcccggctttgttgactaaaaccgggcgggcggcgggcggcggcgactacttcgcacgcgatccgcgccttccttcctcttcttcccttgtttggtgcctcgcctcgtctctcctctatttcttttcgcttggtttagttggatttttgcgttcttggtggtggtggtggtagtggtcgtcgtcgtcggcaacgcgggagacttagcgttcttggtggtgttcgcgatctttgcggcgtccagtggcagtggattgcggtggtgggattggcgcggatcctgttttgctcgtttggttgtcgatcgccggcggtggattccggtggtggaggtgtttgggttgtgagctcgtcggcggcggcggcggcgcattgggtgttgggggccgagatgggcggcgtgtgctcggcggggatcccgggggacaggtcgccggcggagctgtcgttccgggcgatggggctcgtggtggagcaggagctcaaggcgttcccggccgtcgccggcaaggtgcaggggaagcacaagacggcaccggtggaggtggcgccggagcctgatccgccgcgccgcctctcccccgagaaggccccccggctgtccaccggcggcggcggcggcaaggctcgccggtcggtctccaaggagccgcagctggtgcgctcctcgtcggagaagctcaaggccggcaagtccaggacaagcacctccggcaaggcaagtctcccgattctttttcccccctctatttcttcaagcaacaggattagcattgccatttggattaatagatggttaacatcgatcatgaacatttttgcttcaaagttgagagactgcaagatgtggactccgtcttattttgttgacgtaatttaggcatttcttacactgcaatttgtagcataaacaatgagacaatgatctagttgccttttatttttatttttttttctgtgtatgtgtatcagattgtgcatattcaggcatgagctttgcatttctgaataagctctcctgacctgctggctgctgaccggtttccaccgtgtaatggtgcactctttgcaggcttcagacaaaggctcggtgtttggtagagccagcacatctgggattgggaaagcagtggaggttttggacacactgagcagcagcatgacgaatttgagccctgtaggtgggtttgtggcgggcgcgaagatgaaggggagcccacaaaagattcttgcgtttgaggttgccaacacaatagtgaagggcatgagcctgatgcagtctctgtccaaagaaagcgtcagatacttgaaggggaccgtcctccgatcggagggcgtaaagcgtttggtttctagcgatatgagtgagttgatgagaattgctgcagccgacaagaggtttgtgatggatgagagtgatcttgttgctctagttctaacttccatgatctgtaaatgagatcttcacattctggtcatctttgcaggcaagagctggcgctattttcgcgagaggtgatcagatttggcaatcgttgcaaggatactcagtggcacaacctcgatcgctatttttccaagtaggttcacagcttcacactgattacatgtcctgatgattgatatcagagtatgatgaactcggttttgatcttgtgcttgtttgcttccaggctagaatcagaaattacgcctcaaccaaacttgaaagaaatagcagaagcagagatgcagcaattgttgacactggttcggcacacggctgtgagtacattacacccttaaatactcccctagtcacgaaataatgcgatcatagaatgtgtgcaaccacgataattttgacagaacattctctggaatatatggtttcaatgaaaatgatacgagtgaaatatttatggtataacacacatatttttctggatatatgatagtagaattcagtgatcaaagttgctacagttgagtttgaaaaggaaaaggaaatgtcacgctttgattttggaggcagtatgtatttagtggttatactgaaacgagaatcgattccaagtgttatttattatgctactagatcatgtttgcgtcaatcattaatctgtttgctatgcatatttcaccccatgtccatctgctccatgctagcttttcctaatacagtttctgtttcatttttatattgttcataggatctgtaccatgagttgcatgcattagatagatttgagcaagattatcgccgtaaattggaggaagagaaaaaatcagttgcttttgaaagaggtacacctatcatcatcaatacctcacacccttgtagattgaattaggaagccattagtcgttccctttgagaatgattgtttgagtacaatgaatgagcaggggacactgttcagattataaggcaagaattgaagagccaaaggaggcatgtgaaaagcttgaagaaaaagtccctttggaataagatgctcgaagacgtaagcgtttgtactgaaatttgcatgagatgaaatgtttgtataatgacagaaagataaccctgtcatctgggtttaatggttaatctgaaccatgtaatcttcattctgtttgtaggtcatggataaacttgtggatattgtccactttttacatgtagagattcaagaatcttttgggacctatggtatgcctagttgctcagaattttcaatcatcaagtcactaattcagtatggttaccaactgattactttggacttctccatgcttttggtctcccttttttctgtagatggagctttacaattgaatcaaccttcagagagccgtcagacgttaggatcagctggcctctcgctgcactatgccaatatcatttcacagattgacaacattgtaagtttttcttcaggttatttatatatttttctgttcatgtcaatacacaaaatttagatgatcttaagcttatcaggtgaactgtcaatgttttcccataggatttaatagctggtgatatttttccatactatgatattatccgctcgaaagtatggtctgtattcccccaagttatggccatacaggacaatggcatgagaaagatagaatgatagaatttgaaaagccacttaagttattgggattcttaaactgcaatggtttctttcagaactgctgcttttgtgttcaggcagtcaacctctgtaaatgttacagtcacaagtcacaaatttttgctgaaaaatatatttgtagagttagagatcttatgattctagtaaagaaaataatgcaaattatacttctactgaattgacatcaagtacaattatttgttgaacattgactgaattactgaatctgtttactgacttgattttggctaaccgaaggtttcccgaagcaccgttccaccacaaagcacaagagatgcgctctatcaaggactgcccccaactattaagtctgctcttcgaaaaaaactacataattgcccacaaccacaagaggtattttgatgcttaataaaagaatcgctcgataaattgcattagtgattcacatcctaaatttgtgtcttgctgtggtaggttccgatcactgaaatcagatcttcaatggagagaaccttgcaatggattatccctattgccaacaatacagccaggtatagcactgaaaagatccagccagcctttgattctactccagatactgacgttctgttcatcattgcttgtatgctacatcagagctcaccatggattcggatgggtcggcgagtgggcgaacacagggttagatgctcatcattgctcatccgtgcactccatcaattaatcagtccaattattgtgttatcaaaacatgagaaaacaggaccaaaaattattaccatgctaatcagagaacaagaaaaacacttcgcgctgttgattttaacaagttcaaagttcaaactataaattactccctccgtccctaaatatttaatgccgttgacttttttaaacatgtttgatcgttcgtcttattttaaaaaatttaagtaattattaattcttttcctatcatttgatttatttttaaatatacttttatttatatatatagttttacatatttcataaaagtttttgaaaaaaaaaggttaaacatgtttaaaaaagtgaagggcgtcaaatatttagggttgaagggagtataaaactgtagattggtcgaatgctcgaatatacatcaaatcagttagagttgttccacaggaatattatcacattttcatctggaagcatgtacgtacgagttgcattgctgtattgttatattatcttttatacataatatattccgtatcattatctagcagcgcaattgcgtgtgtacagtacatccagcttactgaacgcaagaaattctcatcatgtttaattccaaactaatttatttacacaggaacgatgcgatgcggagggcggctgggcagccagacgtgatcaagatcgagacattctaccatgcggacaaggccagacggaggcgtgcatcctggacctcgtcctgtggcttcaccacctcatcagctacagccgcccaagcaacggtggcaggtccaggtcgccgagcaggtcgccggtgcgctccccttcccttacgccggcgcaccaggtgccgacgacgacgtcgtcgtcctcgccgccaccgccggcggtggcgaggccgagcggcggcaccggcggtggcctcaccagggaggaccgcgcgatgctccaggacgtgtacgcgggccgccggcgtcgcgctccctgtcacagcaggagccaggagctgtcgtcagctcgcggcggcggcggcgccggcggcgacagctcgtcggcggtggcagccgcggcgcagctgagcaagaacgacaggctgagcaagagcagcaacgatgctccggcgcggagcggcggcggcggcggcggcgggaagctcttcccgctgagcaggaggccctcctccgccgtggtgtcgcccgccgtcgacttcgacatcgacggcatcaaggcgctggcggatgcacagaagcggcagtgaccgtgacgtcacagccaccatcttcttctccgccgcaaattttgctcaaactgtccactgctcaaacgcagcgacgccggaaaaccgtgagaaaaaataagagaaaaaaaatcaagaaagaaatggagatggccagatgatgagaaaccaagatcggtgatggatgcttaattagggtgtgattgatacatgatcaattaattaattaatcgccattgtatattgtaggagaaagaaagaaagaaaaatagatggatagatagcccaagaattgcagctgtcaggtactgtactaccatgagacaatcatggatggacatgttatatagtactccagctgtgcaatgcctgaagactagtagtactactacatatatcaacagactctgcaggcacatatagatagtgaccaaaaaccctcctgcttgtgaattttcaacccttcttgtcttggaatggaatgcacagtttcatttctgtttgtctgcactgttctgtgcaggtacattcactccatgtgctgcactacatgtacaatgtgggcttgcatgtacccaagttcatgagattgttggaggggggacccttgcaaagatctgctagcctctcctcgccctgtgtgggtcatggatgatggatcaatccatgcatggtccatgagggagagggagcaaagattcaggaagaaacagggagatgatcagagaggttcagaaaagaagaaagataacatggacgatcgcattgtccttgtgccatcctctgggctggagtccactctccagctactacagctgtggatcaatccatatgcaggtgcacctcaagggattcagatcaggtgcagttatagctgtgactgcaacttaagaactgcaagcaatttcagccgtccatttcagtgatcaatggctcagatctagtgatacagcgaccgtacaaacagtattatgtactacagtgttttgctacagtgctataaacagtatgcctcactgatctggaccgttccatttgcatctgttgatgaaaattggtactgcctaagttgcagtcccagcagcgactgcacctgatccggattccacctcaaggtatagctgcatgaggaaggggaaggctgccgcatgggctcatgggggcgcaataattcgccatgccaccatggtggtgaggagtgaagtggacaagtggtgccgatctctatgtgtactatgttggtctctatctcgcgtactccttccattctaaaataaactaatataagaaaaaaatgtgatacaacctaatactccctccattttaggttataagatgttttaactttggtcaaagtcaatgcttaaagtttgaccgagtttatagaagtaataataatattttcgactcaagataaatttattaataaatatatattcaattattaatttactaaaaaactaatttggtaatgtaaatattactatatttgtctataaacttagtcaaacttaaagcagtttgactttaaccaaaaataaaaacatcttataacctgaaacggaggaagtatattctttgcctccggttaggttcagcaaccggaggtaaatggaatggtgtcacatacataggtgtgaattacatcaggagatagacgtcgcgcttgtgtggttagtggttgggaaattaggcattggatatgagaggaagggggcccgtatcgaaatttattaagagaggggtgagacaattttttttagaactggctagccagaagatcgccctcaagcctttctcatcagttaaactagattaataccccaccgcgttgctgcggaaaattaaattgcataatatgtaaaaataaaatgtaatttgattatcaaaactaaaacaatttgatacaattttaagcctaaaaaataattgagattgcatgtttttaatgagagaagaaagaatagacaatttagaccatagatctatcatctaaaagatagaaataattgagttgatgtggtttaatgagagaagagagaatatcattaactacatttagtggggatgaactatataagtatatataggattgaatggcaaaacgaccgatgaaacctttactgactgcggtaaaaaaaaagtaaatacaaatggtttggatgcaattaaaatactacgtactagttaataaagcatatatacacaattaatgatcatttttactagtgtactccctctccgttggttttttaaaatatgattgaccgtgtacataaaagtatatttacccatgaatcaaatgataaaaagagaattaataattacttaaaattttaatttttaataagacgaacggttaaacatattttaaaaaaccaacgacgtcaaatatttagggacgaagggagtaaaaaaacaagcagctcgtgatgaactgctcataagctcatgagataaaaaatccaaacatggccccgttcgactcattatatgaccaccagtttgagccgttccaagccacgaccttccagctagctgtttttccgcccctgccagttagcaaccaagaacgaactcgatcgatcgctgtattcttctgctcattgccgcttgtttttcatctggaacgaagcagcaaacaattcaacacaacacgacgcaagacgcaagcaaagctttgattgtcatcagaaatgtcaccttgccttacggctcatgtcatgcacaccacatgcatatacatataatacatatactccaatttttaatagataacgatgttaactttttatcacatgtttaaccatccgtcttattctaattctaatttattttgtcatgaattgttttatcacttaaaaatactttaagcatgatttatatcttatacatttgttcttataaattattttaaataagacaaatgatcaaatatatgttttaaaaatcaacaatatcatctattaaaaaaacggaggaagcatgtactaccatacaaacaccaccattgccaatcaatctgccatgccaagacccagcgagaggaaaaggctccacgcttttcggcaaggaaacaatcgctgatggggttcggtggcatattgcacacacatgcacacatggagttgtttggttcactcctaaacattgccaaacctagctaaatttgtggcttataaattgatgaccacaccttaggcaacttttagctaaaagataggtgtatgacatgtagactttgaattgaaaaactttggcatgccacaactttggaagtgaaacaaacaagtattctagaaagtgtggtaaagtttgacaaagtgagggagtgaaccaaacagctattaactagtattccagtagctagcatgaaggaattaattaaagaatctcttctttcactcgcattatggttcccctttggctgcaaagtagtgtgtactctttctacaggatgaagatgctgcttgatgtagtagtttaattattgctagatggataataagaatctataattaatggacaattaggatgccttgtttataattaactttatatatatgcatgaggaatccatggactatatattattgtggactttagcatggggttagctagcttgcattgtcaggactcaggaggaaaaagagcttgagctgaccactatcaattttttttaaaaaaatccttaattaacaggatcatggcctgtgaataattgttgcatcactagctagtgagcaacttcttttttcaaaaaaggaatgaaggctaacatctttacttggcagacactccggtgtcttaagaatactcattagttcaaatttaaactgaaacattttttgtgatagtattttggagactgaaacctactacaagaattatatggtcagcatgtcgtaatataatcaaccagttggtgtgcagttacatcgactgttggttaatgatttatgacagccccgacaaaaaaaaaatccccaaggttgctataacaagtaaggtcacaactcgcaaatagcaaaagaaatggcaggaattaagaatccgtgcgagttgacagtgcggtgcttctctgataatctcgcacaatcttgtcgaaaaggacacattgcaatttatataaaaggaacagttttaatatatatagaacaccctatctttagatcccaatgtagcagcgatatatatatatatatatatatatatatatttatatttattaaatttgtttggtgctccatggtgcccgggcaccattgttgaaattgagtatatatacatatatacatatgtatacatatacatatacatgtatacatatatatatatatacatgtatatatatacacacacacatatatatatatacatatatatatatatatacatacatataatgtagcaattttaatatagagcaccatgtctttagtagatcccaatgtagcaatcatccatccatataattttggttatagccaataaacatggtatcgtgcgcttttattacgaagaatttggcatatacgaaagggattgtagcttagcgattacagtgctcaagtagttcagagttggttaaaaaaatcacttgctaaccctatataaatacttattaagaattaatcaatggagaacagatcctcatgcagtggacagtggtatcaaagaaccagtccgtataggggtcggggggcagagttcgcgatctttctcggacagattggttgagacttattcttcttaatgaaaagccgaggaacggtcattcccgccagtcaagtttttttttttaaaaaaaaacattgtcatatgctccaatttattaagagaaattttaaaccaagtttgatatatataactcgaacttgggtggtgcaagtatacattgaggtatgttctatacttctactcatatgttgccatgtgtataaaaacactataagcacgctcatttcggcagcctgccatgtctgtatgtaacattagctatacctaggttaagttctaagaagaaattagggtaagatacatcatcatttttcgtgagcacacttttcaaactattaaatattatatattttttaaagaatatatattgaagtttttgtaaaaacaaataaatccaagtttacaatagctaatacttaatttaatttcgtgtgctaatgagttgtcttgttttttttaaaaaaaaaaattcaatcctaaccccttttcgacactcagcctaaagatagtttaaattaatttcatgcttacacagttgatcaacaatggccacccagagaaactttagctaaagataatttgatcagcaatggtcacccagagaaactcaaccacaagttcaaacctaagcccaacctcagtgaagctatcacacaccaacttacctcaccggcaacaacaacaacaaacatttgactataactaatggtgccgatttattggagattattaaccaattaattattaagcacactaattaatcaaactaagaatcttgttgttcatgtatgatactcccatcttagttaatcacacgaattgattaattacaccaaaacacaaatccaaacccacaataataatcatataaactaataatagtaaaacgtacacgagtagtagagagagatggcacgcgcgcgagctctcatggcgccggcgccggcggcggcggcttggccttggcggcgaagcaggcggcgacgcgcttgcaggagcggtagaggctgagcacggagagccactcggcgagggcgtcggcgagccgcggccggcggcgccggagccggagacggcgggcggccttcgccccggcggggtagtagtagcccggcggcggatgcggcggcattgcgccggaggcggcgtactcggcggggacgacggcggaggcgtaggggtcggaggccgccctggagaggagcgagggcgggagcgggagcggcggcgcggaggggtagtgcttcccgccgccgacgacgccgggcggcggctgcttggaggaggagcgggatgacctcgccggcgtcttggggatgccggggcggtgctcccacgagaatgggacggaggaggcgcggagcggggaggggaggaagcggtggaacggcgacggcgacgtgggcggcgggaggaaggagacgaatggcgacgacgacgacgaattggtggaggagaaggaggaggaggagcctccgccgcctgccgacgacgggaggagccgccggcggcggcgccggcgtggagttgcggtggtcgccggcggcggcggcgggggcggcgaggaggaggagggcatggtgggtgggggcaactcgctggggccgtcgcgtcgcggcgtcgccttttatgctgccgcgcgcgcaatgccgtcggccacgtggcacggtgacgtggccaacccggctgcttcagtccgcagcaacgccaacaaagcttttaccagagctgtggcaaaattaaggctgagatcgtttgttggctttggggttggggtgtgtgggagggaggggctaaacatcccctttcttaacttggggagtgtttaacttacgttaaaattagaagtttgattaaaattggaacgttgtgtgtgtaggaaaattttgatgcaatgtaaaagttaaaagtttgaagaaaaagttgggaactaaaccatgccttgttactctcttgcgttatttataggcacgcctaccaaactgttaaatagtgtatttttctcttaaaaaaattcttcatattaattcatttttttaaaaaaatatgactaatacttaattaattgtatgctaatgagctgctttattttgagtgtacgagggattagttactgtctccaaccaactaacgcggtaatcattagtgcataatgaattgattaattattataattttaaaaagatttgtttgatattttaaaataaacttatatatagttttttatgaaatgggtcatttagcagtttgaaaatgtgccaatgaaaattgagataaaatatgtattttagttactccctccgtccctaaatatttaacgccgttgatttttttaaacatgtttgatcatttatcttattaaaaacttttgtgaaatatgtaaaactatatgtatacataaaagtatatttaacaatgaatcaaatgataggaaaagaattaataattacttaaatttttttaataaggcgaacagttaaatatgtttaaaaaagtcaacggcgtcaaatatttagagacggagagagtaagaaaagaacgggatcgaatagctcaaattcttcacaaatatgttcttctttttctttttgcaacgatttggcagaagctgtcgtgtttcaaattagttcaagtctttaagatcaagttgttttaaatattctggtaagtggttttagaagtgtatttcacgacaggattatgagcagagcgagtttaaagtccacttgtgcactgatggcacatttgaaattcggagcgccggattaataccactttagccctaccgtctcttcgctcttttttcctcgtcctctctttgtaaaaagtagaatgtgactaatgtgcgatgtttccttcaacaaacaaagcacaaaagcgaggctggtaacacaagttaacagtactgcaatttgaaactttaattcattttctgtgacgaaattgtaatatatacactgcgatttggaggtttaggctgctggtgatacgtcgttgaatcacatttctctcaaaagctttgcatggacagtaggttctccgattatttttcagcaccacgtgtacacgaggatggtgatggttgcaattaaccgttttaactctaatcactgagataatgcgcacggctgttcacttcatcctgtctttttttgagttgattaaagaatgggttgcagaagatgcaagggactgtatatatactacctccctactctagttaattaacaaattcagatttagatcagttgcatatagatatagtttgatcgatgtgatgcagtactgatcttggcagaacgatccaatgagtatggctacctttttacagtgcatgtacttttctctgtcttcagatttcagttatcttcagtagtagtagctttggagtgaaacttcccatttggaacaacgcactctgaattcaggcagcttcccaggattcatgcatgcccagaaatgcaatcccaattttcttcttttttttttacagacttactcaagtggtaaattgcaaatcacgatacaagaaacctaaactttcacggtaaaaaaagaagaagaaaacgatggaatttttttttcctcatgccagctacttccccttttcatccatttaaattggaaactcggcatcgcaaataacccaatctgaaatctacacgcccatggatgcatatgcatcgaatgacacatgtagcccatttcgccatcggggttcatcactgacttgacgaggagaaaagcaaagcgaagcaaagcatcggagagcaaaacacccagaaaagcgaagcaaattagagtaaccagctgctatcagagacaaaagctagcaagataagcactaaacaagctaggaaagcgcctgattttgattgtcattaggctttgcttttctgcaatcctctacctgcgtctgtgtcgtctgcgtttgttcagacgatggagatagctagctagatagatggcttaaacaattaattgtcctggttaattagttcatcatttgtcatgcatgctttcatggtgttaattgctactatcatttagtatcatctgttcggataatgtccctccatttgaaaatacaagacatattttgtttcactaatgtgatagaaaagcataaccataattaagtattttttaacaccaatttaacaaatttagttgtcacaaaaattacatcataatagagtaattgttggttaaattcttatcctaatgaaataaaaattatcttttattttgaaacggagggagataatacgccataaatgattctcctgggataattagtcaccatttatcatgcaatattcatggcgttaattatcatttaagtatcagctagctaggacagcgttttcagcttgcaacagacaccaggaagatgacaaaggctaacctagctgacgggagttttctgaatatcgagtacaggataattaaatctgtgttttgtagtatctggcatcgtgttgcaaccgataattcgaggaaaattaatttggggtgattcttctttcactttcaccctaatcttggagccattgtcaaagggccatgtggtacatgctgacctaatatattattgggtgaagtccattatttggcttggctctgaactttactcttcagtttgaagtccagttttttcttttaaagagaacggtttgaaggccaaatagtttttgtttttaccgtcgaatccaacattttacttcgcgtgtcgggtcacgaagatttagttgagataactgtcagtaaaaaaagatagagttcttgacaaaatgtgcatataacagacaaaattactcagaaaagaaatgcctactctgatgcctaaactctgaactgacggttcttaatttacagcatactatattcagacacaatagtaatatgataaacgtacgcatcaggtgtacctaatcttgttgaaattaagtggcatgagcattgcagtttaaccattaagcacttctttatataaaaaagaacatttttcacatgacgcaaaacggcaaaatggggagcagaaatgaatggcattgattctccagttttatattttcagcctccaattttactaccttgcctgcaactgtttgagcctgaaaaacaggtcgccgtcagattagcagggcaaatgcagcatcattaagcaagcaagaaaagctgtggtccggctaattgtggggggcactagtgtgcatattgctccataaagtgtgtgcactccgaaagctacattcataatgaaatctttgtaatgccctgaacatgttgagcattcactgacagtatcttctgaaaaaaattcagactactgtttacagatagtattcataatattggcacatgttttcatctttaacgcgattatgtaataaacaagaatgcagcatacacaacatttttactatctttaaggtatcaccaggtactaggtaccaggtaccaagaggctacatgccatccttgattgcgtacttgctgtctgaagattgatatgaatcatctgttctctactagtttgcattggtcttggaagaatgataagaatgaattcagaagctgtcaattcattggttccttcgttaggtcaggtagatagcagaacaacatcaggcaatgatatgcaaaatacaatgagtacatgacaagaaatactgcatgtaattagagtgtctgcaggtagcaattctaaacaggatgcagagttcttcgctgtgagagtttaaggctcagcatatgatgatcaatcagtcatccatgcatgtaatcttttgtacggtttctctggaccagattgtgcattaagacacatgagttatcatcattcatcacgcaagcaggttggaacagataaatctgcataattatgggagtttggtatgtaatggagcagatgaaacagctgctacaggagttgttctacaagaaaagaagagaaaaatgataaaaaaacgatctatggaaattttaaaaaaatcccttttgcaaatggccataatgatttgtgatagaaaaaatctagtaatataaggaaataaaaattatgtatcatgccgtaaaatctgaatgaatagaactggttgatttggaggtagaaattcttcctttgtagcactaatggaaattaatagaacaaaagaacagtagtgtttttcatctgatcagtgatgtgtcttcccaacttaactcagattaatctcaacagctatcttggatgcgctgaaaccaacttccctactccctagtacttacaaacatatgcgaaagccgaagaggaacatgattaatagatacagttagttggtcttggtccactgcttacagatgaagctgcgccaaactaaatacaatttggtatagagtcatatgtattgtcagtgcatgaccaattgagcatgataagcaaaaagcatggacaaacaaatacaacatataacgtgttggttagggatatcttcatgatactattttctgaagtatgttcagtgccttgcgactgataacagaatccagttatggtacagtggttcagaagttcattcagtcagtaaaattcaggtactacagcagtttgtcgcaaacgcatggtgtggtgaattaattcatctacaggccttttgagctggagtttcctatatgagagcttgtgcagaggccagaaattacctctataagcttacaaaaacaagagcaatcacatcatttgctagttgcttctgttttagcttaatcactaattgctgtcaagtatgaacctcaatgggaaactgagaaactgtaacgtggatggatccttgtcatgctcataattttatggcttagtgactgataaactgataactaacttacgcaataaatgagacatggcaagaagaatgaggaggcaggagagatgttcttctgtaggctggaaatatcagttatgcagcttcagatggttcagagaagcagtcagtgacatagctttaccagtggtaagttgtactggtaacaaaagagagattgctcagagtacaattgcagaattgcagcaatacttatctgcaaaatgtgtaatctggattgtgaaaagaaaaacccaggcattcagaacctgtaattaaaaaaaaaacgaaacgaaccaatcgggcatgtagactgctgatgaatgaagaacatggagcttgcctatcccctggactaagaaacaggtgaataaaaagctaagctgcacttcgtgctacgactgaatcacccaatgcatcgcctgttcatgcatgagctgctaaatcgcaaagaaaagaaacgaaaaagatcccaatgcatcgcctgttcatgcttgagctgttaaatcgcaaagaaaagaaacgaaaaaagaaacaggtgaataaaaagctgcacttcgtgctaagattgaaccacccaatgcatcgcctgttcatgcatgagctgctaaatcacaaagaaaagaaacaaaagaaaaaaaaggtcccaccgggattcgaacccaggtcgccagattcaaagtctggagtgctaaccactacactatggaaccatttctgattttcaaaccgttagattcattatttattcgtagcatatatttttttacatcgatgtttcaaatcttctctcgcggctaaacttcctatgagggatgcaaacgatggtcttttgtttccatcttggtattaccaatacaacatcttcaaaatgaaacaggggtgaaagttaatgcttaatataagccatgttgtcatgcatcctaacctatgtccgtcgttttgttttggcctcaactaataatagataaatatctaagacatagttatatgctacacacaagacatacttgagtatacatttttaaaacacgacttgtgaactttttatattgtgagaagaaaggttattgctaccgagacaatgacatgcagtgtcctctaaagtcaatgacttgaatgacaaatcatcaaatgttccccaatttaaagagtaaagagtggaaaatcatcaaatccccttttacaaaatattaatcttaaattagttttttttaacccactatgcaatctctatattctactggtgttatcctaactctttctctgtgccactttgccttgtactaaattactagtttttttagaggatgttaggtcactaatttattatctagtatacttagggctcctttagaaaaccagatttcagaagggaatcggctcctctaacgtttaagaggcacgccaccacctaacgtagcttgtgcatatgtcgtccaaattaatcggacggcctagctctatagggatatcgtcttcctccgctaatccttgaattaatctttagtttgttcttctctatcaaaaaaggaacttgccacatacccacagaataggaatgcctctggctacacgcgctactcaccggtaacagcacgccaatgctttggtccacgacacgcaacggcgctctggacctttggtgtactgatcacctgactcacaataccatctcctaagtcctaagttctaaaaaaatacaacagcatcatatatatagcggcaatggaaaaccggcaaatcaaccatcctatatgatactcttccctataccacaactttcaaaccacattcccctgatttttcaatagaaagacatcggagatttgtgctctttgtgtgttagcaaggatttttttcgtcccttggtccttagctttttctttgccacactacgatctgctcgaaggtagagagagaagaagtaatctcatgtattagcgactaagctaagccctctctaaaacgattgcttacgagaaactgttttgcgaaagaatcaccaggtgcgtccgattaatttggacaacatatgtgtgagcaatgttacgcggtgacatgcgtcttgaacattagaggagccggttccttctaaaagacatagaaataagaaaaacaacgtataaatggaatctctgcttggggggtgttaagtagtacaaataatcacatatttatctaaaaaattattcatcagtgtattaggccccccatgaacaaaccatatgcatggatactaggttgcgatttgggttagtccttggccaactagccgtagtatgtgttggctgcttagctttgcatgcagcaatcctgcaatagtaaatagctaaccgctgaggttaaattcaattaatatacttgtgtaattttatgtgttccttttgaactgcaacgatgttcttatatattttggcaacgtataataaggctaaaattaattctcttgtgttgccaaaacatatgtacacattatccgtgtgaggcttttagaagacaaaaatattaattgtcatgctatttttccgtattaattatcatttagtaagctgccccctcatgttcaaatactggctctgccactgaatgggacgttgtgctctttggaatattgttagattttaaaaatagaaatatttgagctagtgcctgatggtcctcgggaaataaatcacatgaattttataggaatcactcttgggtgatagaggaagtagagagaaataaacagaggacttctcacaggaagacaaatcacgaactcttaaggcatctgtagtgtttagttcggccaatctaatcgaagagttgaacaaaatttcaggtcagtagctatagtattcaaatcgttttgttttgtaggacctgtaaaagagaatcacccaatcattggtgtaccttttatgcatgcatgcacaataaatagtattttactccttctgttcgactccaatgtgagttcgatttgttttgacacctacgacgttcaacaacgacactgtgcatgattcgattctcctaccgtaaaatcgatttttcgttcacactgtagaggctcttgcctcatgcttattttcctcttgaaaaaaagggctggaaaatcattctataggatgtatattaccaaactatcgaatccattgaatcatataagaataaaactttaagaatgcaatcttctgaaattcttatgaaactaactaggtgtccgtaccataacattataaagagaacacctttcttctgaaatactaaactttttgagaagttttacaattgagcaaacactcagattctataatttgccatttgcaaaagcaaaggaggccccaacttgtttataggatcttaagagggggatggagaagaggggatgagcagcacaaaaagcccatcagcgcttcctcacctcacctatgtgactatcttcaattcttcatcccctcttcgctctcatcaacaagcaaatcgagaaaaaaaaaagaaggggagaaaaaataatataataacagaaaaggagatgaaaaaggagttccccggccaagcgccgacgagtcggttacactccgagatggacgcggcggcggccggcgggggcggggcggcaaaacggaagcgcagcttctccgaggacgacgcctacctcatcctgcacaggtaaatccatctcccccatctctctctctttccgttctctcgccccgcggcggaggcggcgggtcgtttctagggtttcgtttcaccggggaggggctgcccccccccccccccccccgaacctcgcaggtaccagccggcgacgatcctgacgatgctgcaggagatggggaagcaggtgggcgcggggaaggggatcgactggagggcgctggtgcggaggacgagcaccgggatcacctccgcgcgcgagtaccagatgctgtggcgccacctcgcctacggccacgagttcgtcgagagcgtcgagcccgcctccctgccgctggttcgccactcgccgagatttctgttacttttttatatatattcgggaaattgttgagattttatacagtagtagaagtagatctcagcttgttttcagtgttggttgttcgtttctctgatggtgctgtgctgctgtgaccgataattcgtaggacgatgggagtgatctagaatgtgagattgagattgtccctgctccgggtaatgaagcattagctgaggccacatcgtttgccaaggtatcactttctggaaagaccattatcttgtacaaccgaagcctataatttcgtatagcgtggatgcttctttcgagtataagatgctaaaactggttgatttccccttattttcgcacctttttttttctgtgtgattatgtagttcttgtgtgtgtgcgtgtgtcattttgggttcatacgaggcagttgttgcacatattatttgattatggtcgtgatctcctattttatcaccgttcagtatctatctgataatgtgtagtgtttctattattgttggcttccgcaagcacagtttatgctttgacactaacataggttgttgaataacttagtagttatgctagtgtgtatagtttgagatagacagaatatgggcaaacatattcaaaggctattattgatgctcaatactggcagtgttcatagcttgattggtgcttcattatcaactggaagatagtgctccgtgtgtttttcactacaaatagggcaataaaaagttcctttgtggatgtgaaaatgcatgggaaaaatgttctcttttttcagtgtgtggccttccctgccatctaataatttacaagttaaaattgtgtgtagtggcacacttatagtgcttgcaggcagtcttgaattacatgtgtctagaaagacataaaagggcaatcaattttagtttatggaaaagattgtcgtatggaatgtgatgcacaaaaccacctaacctctagtttctttggcaattttgcatggtattcttttgaggcctgtggttctgtgtaatggcacctgatcctgtcatgcaatttcagactattatcaccggatcttcacgtgaacaaacctctggtcaacgtgtcaactcagaagctgctgcgctaaacactccaaatgaaaagatagtgcgtgttccatctgataaacagcttgtgcctggtcaccgtctaacaaacggtacaggtccggtttccagctcaaagcagccctcccacacaggctcatctcctgatcctttggaccctaatggacatcccaaaaagaaaaagaagcctaaaccatggtccagagaggaggacatggaactaggagcaggtgtacagaagcatggtgaaggaaattggatggaaattctgcataaatataaatttgatagttcaaggacgcatcttcaacttcaacaggtaagatcaccttgtcaattgcataccagcacccatcattgtgctttgttcattcttattcgcctatatgggattaccattcctgaagtcgcccaacttatggttacatgcattgcaacaattctataatgaaagagtcggcacctccttgcacacagtgcaagtatttaaaaaattaggtgtgctgctgttgcaatcgtttgatcgcttttcatctaagcctatattagagttttcacccatcctagttgagttcttttgtgtaatcgtgcatctggcagttgtgactgctgataactgataaccatggttgatattcccccattttcctcatgtagacagctgtagtctaataagataatgtatgtttttttttcagagatgggcgcttatttgcaagcgtcaggggtcaaccaagcctgctacccctaaaatacccaatgttatgtcggaggaactaaaggcagcacaaaaagcattttcattggccattgggacgaccagatcgtctacattaagaccaggtatcgcaactggcattttttttcccatgtgatcttcggggtggtctttgctgatactttttgtgcttatatgaactgttcatgcaggaggtgtgccacatcacaatccaatggttactactacgaatcctgaggtgaaatctgttacagcaccttcaccattgccggtaccggtgcatgttgttccggtgcctgttccagtgcaaccagtacaagtgcagttaccaccacctcagttgcatcaagcacctgcgcaatctgcacctccacctccaaaagtatcaaatgcttcaaataagtcacgaaataattctaagaaacaagttgcccaatcaattcctgtgaatggccctttgtcgatacaagaggcagctcttgctgctggtgggcgaattgccgaaccaagtgttgccaccaattttttaaaagctgcacagtccacaaaagctgtgcacataagatctcgaggaacaggatcttcaaaatcttctacgggatctaaaacacctactgtggctggtgaacctgggacacagcttggcagtgatcaacacctagaattacaaagtactggtggtccatctcaagttttgactgcacatgcaactgaacaagttcataatgtttcagaagtcgctggggttaatcctctgggacaatccgctggagtgcatttatcagaaactaagaaagcactgaacaccacaccagtgtctggatcttctgacaaaatggaaatagatgacaactctaattattttgcagtcacaatggaggacttgttccctgaggatgtgaagcaggaagatgttcaagatcccaagattgaggaggccatagaccccaaggatgcagacatgttagaatttgatcgctttgtggcccaaggatgcttaaataaggataatgtggataagagcaaggctgccaagattgctccagaagctcaaagcgttattggcagccagaaaaaacagctgaagacgctgcccacagttggcaaaagcaaccctgtatttgctggacctccagcaactgcgaaaaagaccaaagctccagttccacagggtgggatgtctagcggcatagttggcgtgctgaatagatcattaggagggaaggcacctgctcctgctaccacaggcacccaaagtactgtccagaagcagcaaagcatgagctcaaagggcaacttgttagtgcccaagaatgtggcgcctggcaccgtaacaccagccaacaaccgggccaacacagcggtgaacggggctagcaaggtgaatccaccagccagccagaagccagcctaacatggtaaattccttgctataataacgccctaggacttttgtgcgcttagtttacttttgaaatgtaaatagggccacgtagataccatctattctttgcccccctttgcatttgtagctcaattcctttctgaaccaaagcactggtgaaaacattaggttagactggatacaccgtttaatcgctttgccttctctgtgatgtcttagactgatatgttccatttgttaagctggcctgagattatcatgccgccttcctgtacagcctcgcctctttctccgttggatagtttggttgattggccaaatattcagaaactatgtcattgtggcctgatcaaactgtgaagatggcacgccatgcaagttgtctctatcggctttaatttatggctttgaaaaaaacaggggatgaattctggaatggccttgtttttggctcaagattttttccatgctgcacgcattgcgacgaagatttggagtgtgatagcatttcatacactctactgcatgtactgtaattgatgatgataaccgcgtggttgatgtgtcaactgctaccgcacacagtggatgttaagacctctgtttggtgtaactgtcacacacggtggggctgcagcctggtgaccacgtgtgccgtggcagttggcattttggtcactcgtgtcttgtcaggtcgcttgctttgatcattctttgccattgcggtgacatcgtggcaactggcaatggacggacgctggcaatgctgctggttgttcgaagctgattttaagttttgccagaaatttattttaaaattagtcattttgtcgtctctaaaattgtttttgattagtaggagtaatccacaaacaggcggggccgagataacctagtacagtagagaatcttttggtcccagaataaaaatggcactattccactacagagtgctcgtcgtatgaagcatttgcccagcagttcgttcaaatgggacaatatttggatataaagaatcctacacattctttgtgaatttgtacgttacataatgccgaaattccctttgtcgccgaagtattcccttcggcatataccaatggttggggccttagggtgtgtacaatggtaattaatgagactattgattatgaatctttactaaaatggaagagatagaaagaagaaaggaaaaacatcatttctacagttaacaacaacgattatttgctctctataaaatggaagcttggctttactagggtgcttggctttactagggtgcgaaaaaggaaataacagtaataaaatagtactacctctgtttttaatagatgaccgttgactttttgtcacacgtttgatcactcatcttattaaaaaaattacataattctaatttattttgttgtgagttgtttttatcatacatatatactttaagcatgatttatatcttatacatttgcgtaaaatcttttaataagacgaatggttcagaaatgtgtttaaaattcaacggcgtcatctattaaaaaacggaggaagtggtattttgtttagtttaatgattagaacctttgttatgtcaactattgtagaggtatatccgctaaataaatatgtattatctaactgtacatattaggctctatctttgtacataaccaccatttacgacagttcaaaaagatatttatgcgaatattgtagtagtatgaaagtttccatggaataccatagggaagtactccatgcgttccaaaatatgataatttttgcaatttaaattttataccataatataaagaattgcgcgctgtttctcatgattatcattatttcaatgattctaaagccaatcggatgcctcaaaggaaatccaagtaaataaaaattttaaaatcaataactgaaatgacttaaattttttttaccttaattaggaattgataaacaacgtagaaatcattatattcgagtactagtttatttcggctgaaatggaaaataattttcatgctccgaatgcgaacttggagtaccataagaacttactacttgtacaaactacacataagtagcaataactgtctctaacatatcctctcggctaaaagccattggacatgatattcatccaggttggcatctttcggttttaggtcaattctacattaaaaattaagaaacttataataattgcataactttagaaatattactaaaatattatagggtcaatcgatctacttcgatcgtttgggctccggttgataaactgtgaaaaaataaacaaatttataggctaatttttttgaacggcgaatttataggctaatttttcacatctacattattagaggtttcaaaactatgctaaaagtagattattacaaaataactgtcaaactcaacttttttttctcaaaaatatcaaccttttttttttaaaaaaaaaatagattttaactgcggccgataataatctgataaaaagaaattgagaacttaaccttaccacggatcaaatgtaacttaatcgtggctgtgtttagttcgtgtactaaaatttttttaagtatacagacacacatttgaagtattaaatatagactaataacaaaataaattacagattccgcctgtaaattgcgagacgaatctattaagcctaattaatccatcattagcaaatgtttactatagcaccactgtcgacgtttgatgtcgcgattccggtatttgcatagtatgaggatcgttggtactaggatatacgcgagactgaggtaaaagagacggagacggggatttttatacaggttcgggcccctgaattgtcaggtaataacactacatcctgttggccgaagccggtattgctcttattcaccataatcacaccagtacaatatttggggtagcctatctaactgttgtcgacatagcggtctgaaggtctgactcgtagtcgacaatagggtagtcttcctcctcgaatccgtgcccggcgagatcagagatagcgctttcgtctctcctgacagtacccggagacaccgtaggggactagccgtgcttatccctgaagtcgatatccggcgtcttgtcttggcgtatgttggcttgtatgttgatcttctgtctttatctattgttttgtgtatgttgattgtgggtctctctcctcctagggggccttgtatttatacccataggtatccctttggccaagtagaaataggaaaaccaatatggatacaatccgagtagtccatgtcgtttccatgtagaactctggttgtctttccttatccggaactccctccatacgtgaagtcagtttccgtataagacatggtatgtggtgggtcctaccgagagttagtcaactactattaggtatgtggtatccataaccctgacagtagcccccgacttcgatgcaaatgaacgaattcatattctcaaccgcgtgcaggccttggagtaactgttatcgagctcacgtgaccgttctcgatgagttcggagataacgttagacttcctttatcagcctcgtgcgggcacctaaagggtttgtctgagtcaatctccgacgtcgaccaagaaagtacagaacagacgactaagtctcccgtcttgctgtaatcgagaatttggattgaagtcaagaaattttatctcggcgggtacaccatctcttcattccgtattccttgtcgagatccaccaaccattctcgagtgattgagaaggcgcagaatctacgacggagccttgtcaacatttgtcgtactcgccttagtcgatcttggtgtagaaccatagagacatggagtcttcgtcaatgtcgaatagaattttcctgaaatcaacactcagaaaaaaaatatcagatagaaatagcccccgagcaaacgctcaaagggtgacatgttataatatatatggaaactaaaaatgaattaaatttacagaccaatgttttgtgtatgagcgtcttctcttttaccgacttcgatcagtcagtttgttgagtcatacactctccttagctcccagccttgtcatcggagaattattctcgggagataaggctcttggacctttgacctgcctcgattgaacaagcactgatcctagcccccagccgtgaagttggaaaacccaatttccgattacatggcttggttaatacgcactgcgagaactcttacacgaccagatcttacacagtcttttgtctctacaggattcgacaaggccttatcggctctgggcgtccccagccgaagttcccttaggttcctcagaggtcttgtcaagacggcgtaaagggacatgaggataggtttcaacgctaggtgtcatcgtggtaagggatctctaggtaaaacacttggcgatattgtatacctaatatcaactttgttggagtagaggtaatgggaggatcgttactccgctggtcaaggaccaggtagtagtctaaactcgaccacttagaagtggaaatagtgggagaatcgctacaccgctggtcgaggaccaggtagtagtcgtaactcgaccactagaagtaaggcgagagagattgaaccaggagtaggagtctctttatcacctataggggcgctaaagttggtttattatatgtgcatatcatgtggccagcataactcacatacccaacttatagcatatccggatgtccgttcgcaatcatatcgggtgatcaagccgacgacgttcgcgaggaattatccattaataaccttttctcgagtagtccagccatggccggtgctatgagataggtcgtcggtcttccttggcaggttgggctcgacgactctgcatttgtcgagatcattctcgataatgtggtgtactcgaccacaacctactcgggtgctcaattgttcctgaagaatattttctagaaggcaagacatatagcagagaatatcgagtatgtactcaaaagactgcatggatcttctagcattatcaggacataacgagcagatgtaaatatcaggcattatgtaaaccgtaaacaagcatgatttatacagaagaaaacagagcgagcccccagcattaaaccgtagtcaattaacatcggggacactcgcgcaacagatattgtataaaaaacatgctctaggtaaacataataaatcatagatctaacaatgttgtatgatctgaataggtacgataaattgcagatcaaatattgcgtacctttgtagatacatgccggatgtatctacgaacttagcaggtcgacttagaagaccaatgtaccaatcaccttagctgcgtactgagagagatatcactgcgatctgacatcttttggtgcgccgcggcgctcgaggcttggatgatctcaatggatcatgttcgtaatgacgaagatgggtccgatctggttaggttggatctccccctcagctgaagtcgtcgagtagctcgttgtcggagaatccatctcttaaacccatctcatcgaaaccttgaagcaccaaaagatcccctacctggcgcgcaactgtcgacatttgatgtcgcgattccggtatttgcatagtatgaggatcgttggtactaggatatacgcgagactgaggtaaaagagacagagacggggatttttatataggttcgggccccttaattgtcagtaataaccctacatcctgttggctgaagccgatattgctcttattcaccataatcacaccagtacaatatttgcggtagcctatctaactgttgtcgacatgacggtctgaaggtctgactcgtagtcgacaacagggtagtcttcctcctcgaatccgtgcccggcgagatcagagatagcgctttcgtctctcctgacagtacccggagacaccgtaggggactagccgtgcttatccctgaagtcgatatccggcgtcttgtcttggtatatgttggcttgtatgttgatcttctgtcttgatctattgttttgtgtatgttgattgtgggtctctctcctcctagggggccttgtatttatacccataggtgtccccttatccaagtagaactagaaaaaccaatatagatataatccgagtagttcatgtcgtttctatgtagaactctggttgtctttccttatccggaactccctccatacgtgaagtcagtttccgtataagacatggtatgtggtgggtcctgccgagatttagtcaactactattaggtatgtggtatccataaccctgacaaccatattgtcaaatcatggtgtaattaggctcaaaagattcgtctcgcgatttatatgcaaactgtacaattggttttttttcgtccacatttaatgcttcatgcatgtgtccgaatatttgatgtgacggaaaagttgaaagtttgaagaaaaaaatttgaaactaaacacagcccgtgttttcttgtcgtgtggagagaaggagaagagagattatgtaggtgtgccatcaccatcaaccccagcctcaaacaagtcaaacaagtgcttggtagctgacacatatatacatcgtacatgatcatcacacacgctcgtccggtcgcccccctcccacgtggccccctcatgccaccttaattaagactgaccttatgcaaattaatattattattgcctaaattaattaccgaggtaatcaaatggtacagaattaggtgtttctctcgttggtcgttacgccttcgttgatcagctatctcagagagacgtgccctatggtttatgcaatttggccatgaaaatcgtatctttgtggatctcatatcaatttggaaccgtcataatatcttatgcgttgtccgggaggaaaatctgtttgtcgatcacttacttgtgtttaacttattagaagaccggctctcattgacaacacaaaaatatgtatttttaggcatcaacgatatgattatgtatgtttaggattgccatgtaggaaatgtttgtgactgatgtttttttaggaaaattgcaaaacaccccataagtctcttaaaggttggcattcgacattataagttattttgttacaagtacccatccctactcagtcttgttaagaaaaaaaatccccattatacacatgcttaaccgaatcagtccgttatcaccaatgtgagccaccctaagctaagctagtcaagtcaatcttatccaaatacttattagacttattctcatgtttcactgaatttttgtgtgcatatagtgaaacttagtttgacaatgtttaagttcttatcaataattttatttatgaaatctccaagaaaattgttaagattataatcttagaagtatttaattttggtaaaaatcacattgataactcacaatttatgaaaacatgtgattcagttaagcacgtgcatattggggggtgtttttttttcaataaaactaaataggggtgggcatttacaacaaaattgcctatgggtttttcaaaaaaaaaacttatgagatggaatgttaaactttaagtgattctcttgattgtataactcatagtttttgaatggcatggttctcttgatcgaggggatgttcaaaatttcgaatatggttctattgctacgatgtgtcgatgtttacttccattgtactagtaacttaaattatttacgcgttaattgaaaccaatgcatagactttggtacctccccaacaagtcaaaagatatgcatactaaccaactagtcggatttcaccccccctcccccccgcctaccacgtcgctcgtaagtgacacgggtggcgatcaacagacaacgctgttggttatatttgtcctctcctccgccttgctgccacttgagctaattactagccacgcaatggcaaggatgatggtggcggggcttcctctttccaattttccctagtgcgatagtgaagactctagggataagagccagtggatctagggcttctacgtccggatttagccacacaacgacagatgacgatagtgagtttctttctttgcaagctttcttggctccatcactactcctccttggcctcctggctaggttgtggggagcttcgaggggctgggttgccggtggtacgatgttgctgtggtttcaactttggcttttgcggatgacaatgttactatttggcatgtaggctggttatgtgtgatgagggagttgtcgaatggtgaaagccttgctagattctagctagcttcgatgacggtgatgctttcgagcatcgtttttcttcttggaggcatcctcacttcttcccatccctccacattggccttcaggtaaaaccttttgctttggtcctggtagagtggtagcggcatctcacgtcgtgtcctcctctgaggcgtcgctttggaggaccttctttgtgcggcaatggtcattgttgggaacctacgtcagctcagtggctttaatggctatggcagtgtggtaagatttgggcgagctattgatttgcactaaagttattctccgacgatatcttccacatttgttcgatatcagttgtcggcggtgatgtgagtgaaattcgaccagtgcaatgattggccactgattttggagattatatttcctaatttgagaaagacaatgtcttcttacaacgtactactgaagatacaacggttatgcaattcctcaacaaccataggtagaagttattagtgttatctctgtcattagtttggtgttctaaatatttttttagtttttaattaaattgtgattttgtaattcaaactattgttaggtaattcactgtaataattggctatagcttcttttatttcaaataacggaatgaattatattatatatatatatatatatatatatatatatttcctaaggtgaagagagaagagatgggaaaaatgagtagacaactggttttttttccccgaaaggacgacttaaagcacaaatatcgaaccaattcatttcagattttacctcctctccttgagaaatacaaggtgtattagatactactccctccatcccaaaaaaattcaatttctgggtttccgtgtctaatgtttgaccgtccgtcttatttaaaaaaatatgaaaaagtttaaaaagataagtcaaacataaagtattattcttgttttatcatctaataataatgaaaatactaataataaaaaaattcatataagacggacggtcaaacgttagacatgaaaacccagaaattgagtctttttgggacggggggagtatataactattgatttatcctataatacatagtaaattgtaattttcaccaagttaattgtaacttgttttacattgtacaagtatcagatttagcatgtactttcactttacaccagagtacattaaaataagttttacttaacatcagagtacaccataaaacctatataaatttcatgaaatttgaacaacatttcataaaatgtggtctaaattgaaaaagtttgataatgttcgcttagattcacaagatttttccttcaattatatgacacaatttagtgtaaagtgaaacttattttaatctagcatgtagtaaagtgaaagtatgtagtaaggcctcctttgattcaaaagaaaatcataagaattttgggggatttcatttatatatgatttttaggtgaatcttatggaatcctatgctttttctaatcctatgtttttttatttctgcaattagaatgggctctaaacctgatgttaaatgaaacgagataccataatatgtaatatattatcaacaactacaaaattaatatatataaaaatatttttaaatataaattcagtgacactacatactacataacactaaatacatatatttgtaagtttggttactagttaaaacttttattcgttgactctgcaaaaaaggacgccatatatcttcgaacggtgcagtactgtacaagagaatttattttgaacttatctatcagtaatgtgatgttgtctatatctatggagacaaaggcggtttcaactgccgtaccattccaagtttccaacacttctacaaaattcgccaatacacgtcgactaatcaccgcatatgctaatcctaatcactcagatcaacgttaacaataatcactcggattgcatgtacaaagatttatattgacgtgctctcttcgttatggtgcatgtaagagcatcttcactagcttctttaaatcggattctatctaatttggctagtcaaactagatgctcactttaacagactctctattgatcctctctaaattaacaatggacccacaacaacagtatgtactcttcttcctccctctctctctctcccctttcttccttctcttttcttcttttcccctttccttccttcccatcgaccacgcagatgccaacggcgtggggaggcaggaggtggcgcagggagtccgcaagcgacagggacatcagcttgggaggggcggcgacgaagctcagggtggggatggcgacatcggcttggggggagctcgggatggggatggcgacggcgactggagcgtggatttgctcctcgccggcctcccttgctctccctcgccgccatgccttccatccctcgccatcgagccctccctcccttgccgtcgacggcgcccgggaggaggcggcggccggcaagggggaggcggctggaggggagttggcggccggatcgtaggcggctggagaaggaactcgacgtcgatgggggagaggcgaatgagattgcagctactagccattgatgctgtgtttggccagccaaactagcttgctagatttggccacctgagctggtcatttggccagcgagatggcttagccatccaaatggagaggctgttggacctcattttcttgctatgtttgctaatttttagcttggagagtgggatggctaacctattggagatgatctaactcttagtgacgtgaaaaagaaacaactttaatacagatcatttgtagtactaccatttaactttaagtgactaacatgtaagtctgaaaatccttattcacgggcgcccgatgaaagagaaaaatatcgggcacgctccctcgctcacgtcgcctcctctccccgtcgatgccgcctcctcttccacgagctccctcgcccacgctgcttcctcccgcctccccccgccaacctcacccgcgctgcctcctctctcccgtcaacctcgcccacgtcgccttctccgtcggatcctccgccgcttttcgtcttccttgacgttgacagcgtcttcgtccccgtggtggcggccgacgcggaggacgacgcacgagcagcgaagcggtggtggcggcagtggtggtggaggaggctcgtcggctccctctttctctcctgggagcactccctcctcatctccgccatcctcccccttctcctcctccagatccggtgatgggggccgtggagaagaccgacgcgggcaaccctgtgttcgtcggagaggaggaagatgcagtctagaccaggttctgtgtttttttttgtgtatttcagctagtgtactcgtgatgttctttgtgtttggatcaaatgttgcaatagatatttggacagtgttccatatttctatttttgacatacgggtttgttgatgtttcaatggttcaaaagcaatgtttcagctaatatactcgtgatgtttctttgtgggtggatcaaatgttacagtggattttaaatagtatttaatattttcatctcgatgtacacggggtttgtttagatgtacatggggtttaagtgcttcaatggcttaaatcgttttgttacatacgttgaaccaaattgtttcatttagcgatctcactatgtttcacatttttttaagaattgaatcattctttcgctaagtgctaaaacattatttttataaagggtgaaacaacgccagactttttgggaaaaatcgagcgcctgatttgtaggcaccttcatgtaagtcacacacgtgacagatccacgtatcagtgatcaagtcagaggacaatatttgtttttacacatagagacttatttgcttttacgcacgataacggctcagagtcgactcttagcatttattaaaaaaattattatatggagctaaaatggttatctcagcaattatatattgaataatttagtgatatgtaagtattaactaaagagttcatatcaaaccatttgtacatgttaaatcatgcttagaaaattccaaaaataaaagaacttctaatcacacccaaatggccaaatcccaccataaaatgagagaaatcaatttcacacaggagcaggaggagagagaaaccgctactaataaataggagtataaaacagaagcctcctcgttaagcttcgaatcctcttccattccctccttcctctcctctcctctccaagaccaagaaccagcaggagcaagcaaggaaggcgccgaattcgatcggagcaggcaggacgggtccgggatcccgcgccgccatggagaagtacgagctgctcaaggacatcgggtcgggcaacttcggtgtggcgcggctgatgcggaacagggagaccaaggagctcgtcgccatgaagtacataccgcgtggcctcaaggtgcgtgcgtgattcgaagcgagctagggtttcttcttcttaatttctcgttttcttggctggtttttagcggggtttgcgggtggttttttgcagattgacgagaatgtggcgagggagatcataaaccaccgctcgctgcggcacccaaacatcatccggttcaaggaggtgaggccggccgcggaattcgcgggatttctgagaaattcgcggttcttgctcggtatttttattttctttttgaaaatttagttcgtaattttgggggaattttgttttgtttaggtcgtgctcacgcctacccacctcgcgatcgtcatggagtacgccgccggcggcgagctgttcgaccggatctgcagcgccgggagattcagcgaggacgaggtgatcatctaatctcctcgaattagacgggtcccaagtcttttccctctttttttttgccccctcaaaaattcgtgaggtttgcgtgctaattttaattttgtgttttcaaattgggggacgtgtggattgctactgttctagtcgaggtatttcttccagcaactaatttgcggcgtcagctactgccacttcatggtgaggacatcaataatttgttatttttctgttaatataaaaaaagctttaagtataaatttttcaaaatgttaagctgatgaggattgcgtgttttgtttgatctcgcagcaaatttgccaccgggatttgaagctggagaacacgctgctggatggcagccctgcgccgcgcctcaagatctgcgactttggctactccaaggtaacaatttcttctctctctttttttttaaaaaaaaggaagatttttatgttctttcataccgtgcatgttttttggtagaaaggtatacggaaagaagccttccttgttgaacttggcatgttgggaggacaaaaattttgacacgaaactgggtcgctatcctcattatccttattaaactcgtgccgctattgagaatcaaactttgcgccctttttttttctcagtcttttttatcggatgatgttatcaagcaatcctttagtttcttcacgtacataaaagagggacatcactcgaactaactgatggcaaaaagaacacttagacttacgaaaatatcgtatttattgctctttaatttagctctatagtgggttacttacgcgtactaagaccgttctttttgcgaatgtttttgtggtcagtcatcactgctgcactcaaagccgaagtcgacggtcgggactcccgcgtacatcgctccggaggtgctctctcgccgggagtatgacggcaaggtcagtctcagtcatcttgctcctctagcttgcctgtctctccagttgtgtccagggcagctggagactttgtgcttaatccttttcttttctttccttttttggtgtgtgctcaatccttgtgttatcttaaggcacctgaattttacacgcaaaattttaatatcccaaggtaactaagaagtttcacactagaaaatgtattgtaattttttaaggatggtgaaattaaccttgtgtgggtcacctatgcttgtgctagcttgctgcagtccctccggccccaacccaaacgtagtctgaacttttcatgtgaatgccaggactggagttttagtatgtgaacccaaacgtagcagacatatatgccttgtagaccaggctcatggtatcatgggggcacctctctaatcagtggttttacattcttggaattttgttctgaggtcaagtagacagggaatggacctgaccccaattgccagtgtttttctttgtccttacctctgtggggtggggattccagttttccaagctccaacttccaagtgctcctccaattatttgtgttgacaattttgtcaaaggagcaaagaggggggaagagatatcctaccgaaatgttcccgatgttgtcgctgggacatttttctttttactacctccgtcctaaaataagtgtagtcgtggggatccgtgtccaacgtttgaccgttcgtcttatttgaaagatttatgaaaaaattaaaaaaacatagtcacccataaagtacaattcatgttttatcatctaataacaataaaaatactaatcaaaaaaatttcaaataagnngancggtcaacgtttggacatgaatagtgtaaaactgtacttattttggaacggatggagtagtaatcacagcatgcttgatggtgatctctgccccctccgggtgcgtgcctgctttaattgttcccttgatctggttcacagttggtatacatggtgaagtcttgtctcgcatggtgttgttgatgtgatgatccaaaaagaaagttagatttgatagataagagcaccagattctgttgatggagatcttgttatcatgcttaatgatctgcttgatagtgaggattaataaaaacaaaatcgctgtgtgctttgttgtgtggtgaatccttgaccagcaaacagataggattcatattgcctaaaaaaattgtggagttccaaaaacaataatgtagttatttcttcagaggtagtacatagaaaaaaaaaagcatgaacagatttgaaatggttgcgcgtgatgatctatgtatcgtggggaggccccgtggacatgttccatgaatcgaattgtgttcccattcatcatgctttatgtccttttctggaccgtatttccatcatgttgatgtgtacaataggggccctcagacctgatcttttcatgtagccatcttagactgaacatctggttggtaacctgtggtcctttgggactgtttttcttcatccttttttttgggcgtttcattttgccatctgtagtttgtctggttaatattgatgttatttgaccaattgctattgcactttatttcatacttttttgggataccatgccaaactaccaattgaatttctttctagcatgcaagattggttgcctttgctg

SEQ ID NO: 5743 - DNA, 4352 bp, Oryza sativa
gtgaacccaaaccaacgcgcatgcctacacaggcttggggggctctctatcccgatacggcaagttaaccgttccgttcaacaaccgcgaacggaacacggtggacggagagacgcgcacgtaccggtcgcgcgcgcgcaaagatacaaacgcgtccctttctctctcgcgcgcgcaccacggaaaattgagcggcgcgtttacgggagagaacggcgcgccgagactcggttcgcacttggcatgtacgtaccaccggccggtcagcgtcacccatctgctgctcggccgcgtggttgttagcccatgcgcgcgccgccacgcctacgcggttactcccgatcgccaattaaaccacaggtttctcttacgtgatggtcgagctaggtggaattagatggatatatatccggccggccgtacgcatgcgtgcatgcaccgttggatcactgtacgtacagtgtacacacactgtgccacgtttcgattctgtattcctgcgcgtacgtacgtacgctcccacgttggtgtggccattattgattcttcacgatcgaacagtggcaggaaaggtacgtactactttcttcgcggtcgctgtagtatgattgtctgcgcgcgaccgtggaaactgaaaggcgtacgttccgcgatcgcgaaacatagaagatcagggaaaagcggcggcggcgcgcactcgatcggttggttggctgtttaagcaaagtgaatccctcgatcgatcgatcgcttcttcttctgctcgtacagcccccaaatcgttttcatgacagcgagcgacgcccgaacctgcccaataccggccatctccagcaatttttttttctctcttttggccctttcgatctctctctctctccccctcgcgtctcgccgtgattgggtttggacatggacaactactaactcctcttgtccttttgtttgctccaaaggttccctcgccgtctcgcgcacgtacatgcgagatcaccaatgagccatccatgcaacagggccactaacgacgcggctgtatgagagagtgaatcttgttggaatgaaaaaaaaaaagcgagaaaggcgttgggggcagttaacgctccacaaactccagagctgagggtgacagccataatagagacgatccaggtgatggctttacacgtgttagcttattttcccgaaggaaagagcattgaacagctatctaaccagggcccccttttatttgaaaactcagcacctgtaccttgtagatgaattcacgagttttctttatgttaaaaaagaggggcccgtgtttagttaaccaatggcatgtcacggtagatgtgttcattttgtacttgtgtactagtaattaatccccctgttgtttgatcccacgtgagtactttggctgttatatatgtcacttagcaggagtagtagtacagcaactagcagtattctctgtcttccagcgaattgcatgcatggctaaaatgattacagcagacgttttgccatcacgagttcacgacatatgattactcccactcccactcccacaaccatctctctgcgccagcgctatcacgtagccaacgccgctgcatggcaaaagttgattgctccctgtgcctgacaatgagatgggcaaagaggtacgagccggcccattggttggtgttacgttccctcgtcattgatcccttaggcccatagaattgtggaacctagagtgatttccatgggaacatcgcctctgggtttcaagtttccgcactaacaataatttcccctcgcccaagaaattagaacacgcaagtcacctgaaagtctgatagtaatatggccctgtctattttgcacttggtattgacagcattttggaatatattcattttcaaataagttcaattaagattcatatatttcagatggagatagttagtttacagggactgttttatcttaggtgatgcattgtgcaaactgcgaataattagatagaagagtgcgaggacgaacttaatgggctatatggcgtttggaactgaaaacctttttccgctgggctgtcacggaaggaataatggaacttacaggctgtccctggatgatgacatctatgggctatagcttaggctttttgacgtcgtttgtgccgtgataagtctattttgcgtcctgcaactcttgctcctagctgaatcgcatccctcaactacaaaactggatataacgcatccttttatttaaaaatcggtgtaaattgcctccttaggtggtttggaaggtggttttatctgacgtggtagctttgacctagttgactggctaactcaactgtggaccccacctgtcaatgatatactccatcctatcctctcccctctgtctttcctcttcctcctctctcacctcacatcagaatgcagggaggagctcgtcggccatgctgtgcgggggccgtgggtgggggggggaggtgttgccacttttgccagctagttgttctcgtggggaggagctcaccagccgcgacatgcacaagggggagggggtccccagccagtcgagtgcgcggggggaggggtcgacaaccatggcgagtccaggggaggggttgccggttgcagcgcgtgcaagaggaggggtcaccggccgcgccgcgcacgtgggaaggagctcactggcctcatgaaaggtggaaagtcatacatgttttttccatgtttcactgacatgtagggcccactgtaatatggtttttcatatctcacagacatgtgggccctacatgcaaaaaccacttttcaaaccatagaaggagtttatttgcaccggttttagaagataggggatgcgttacaccgggttttgtggtcgagggatgtgcttcaatcaagagcaagagattagggagtagtaataaacttattcctttgtgccgtgtgttgcacacaccgcacaacagctgacctaaataaaaggctttatgggccagccattttagcgtcgaataggcccaaatatcggtcatgggcccaacaaaagcagacccccaagaaacttacagaaaaaccttctcctgttgcctttcaatcattccccaatcaaaaaaagggtaagtttaccatcctttataaagtagaaaatatggtacctctagtactaatactatgtatcttaaggtataaggtataaaaaattttagtataaaatttaggtacctcaagatactttctcaaggattgtaaaattcctcgtcgaaaaaacattatacatgcagcaggagtcatctcctttgtgttcagattttccattgaaaaaaaaatcacgaatattagggatggacctaatatcaaataattaggagtgaggtttcgaacccaggttgtctagcccatcaccttgtggagctagccggaaagcggaaaacccttagacgtttctcgtttaaattttccattgacgagcgattaaatttacgtttttttgcgggtaattaaatttacgttttgccatatgcaggtttcaggtaataccattgtataagctattttgtcttaaaatacggcatggcaatcaatttcctcatggtgattatctataaaatgttatcttttttttgggggggggggggggggcaatcttgttgtgggaatttgtcaatagtaatttccaaacaatattaacacgcatttgtttaagagcaatttcgtcataatgttcacataattgtcaagcaaaattttcaagagtacattgatactcatttttcttccgattatcaatgtataaatgtggacaatcaatactatttctgctacatcacatgaggaattgggctagtggagtagaatcggtagaaccatgatgacgatagaataaggggataaaatgacatgtacattagcatttactggaactttcacagtttcactcgtcgatggcatgcaaaatgcaaattagacaattgccaaggggaattttttgatgtaaaagaggcccttttgctctccaaggagtcattataatgtttacccggggcttggaacgctcaaactatcttgatctcttctgaaaatcctgcgtgacgaacttaaaattcttactggtagttacttgaatgtagcacatgttcctagatcgtcagttgctttggcacatggtacctggtcgatcgtgggccaaaactcaggaaaagaagcacggatggacgggatggtactggtaggagggggcctgtggagaccattggcagatcgggttcatccatccatacgcttttccggaaaaaaacctcgtgacacccccgaaccaagcatggccgcgacgccaaccccaacccccggtcactg

SEQ ID NO: 5744 - DNA, 1842 bp, Oryza sativa
cccactcctgcacgttgcaggagaaatagacccaatgttctgcaatccccaactgacgccgttccttgtaaagctccccactgcggacaagtgagtggaagttccgattgactgatgcaatggagccataatctgaacgagagcaacgggcgaggcaactgattgagttatctcgaccgatagaacttattagggtacttgaatccgaaaaaccctgatcattgctgccttgacaatccagctgctcacactcatggttcctggcagatttaggtcgtttggtcagtactgctactgcagcaacactatcaggttcaatcctcggagtacttgatatgcgcttactcctcgttatctcaaggaggtggtaggtcatgtatgctaatctggattcttgatcacaggagcttggcaaagaccttgagatcaagcaagattgaccctccaacattctgtgagaattttcagtgatgtctctcagaagagagaacctatacacaagaatccaggccttctgtattcattgtgaacctgcaagagatcataaattaatatcattctactgtgtggaaaaattgatgatcacatttgtatacataactcaatttgcaagatattgtgaagagcttcaccaaggtcagtcgaatgagatctatataattaaaatttacaatccaagaacaagacaaattaaatttcacaaaaactgattaataatgaaggcttggccaaacgattaatgaaacatcatttttgtgaataaatagaacatggcattcattaaatcaaacctaggtcttaacttaacgcatgaaactgataaaccacagaaaatgcccaaagctactccacggtaccacttcagcacagatctttcggaactaaaatgtgaaccactgcaaccaatcatttttaggagttgccattaatcattgaggatagcgattaaagatatagaaattgaagttgaacaaagtggtgctctcattgggtcctaaatggttcgtatacttcttgtacgggttactttatcatcaaaccaaatcaagttccagggcaaatcaacttatctgtgtaattagcttttttttctgtctcgcgatgtatcccttcctagatgaacaagggctggcggttctaactaagcaattataaaataaataaaattaacatgatgcctaacaggtcgcggagaacaaaaatcctatcgtgcagcaacagtatgcctgaggaaaattaatgttgctccatataattctccatggttgaaagttcgacggcaaatctgacgcctaagatgctttagtcccaaaactccacccctccaagtaagctacaattagtgccatcaaaccggtattaaccacggattgctcatccgactgatttgacctaaattctccaagtcgcccattatacaagaacaaaggatgaacaattcaaccgaaacaaaccatgtaaattaggtgagatgagaagcgaggacaaacgtagataagacaatacgccagctacctggcaatcaatctcgcctcaaaaccaaccgtgcccccgccccgcgcgcggcgacaaaatctcgcccaccggccgccgccgacacggcaggcgcccagcgacggcgacgagtgcacggcacccccccgggcggcggggatcgggagagaaacggacgcgcgcggcggagaagccgcttgcgggaggaaccgcgcggaggcggaggctgcggcggcgcggttacgggagcacgcggaggcggaggcggaggcggaggagcggagagggagggtggggagaggtggaagaggaggaggatgcgcggttacgggggcggagagggtgggg

SEQ ID NO: 5745 - DNA, 3093 bp, Oryza sativa
acgagaaggcccagctcatcgacgagatcgccaagtcgtcggagctccaggcgcacggcgtcgacttcctcaacgtcgtggtggacaacggccgcgcgggcctcatgacgcagatcgtgcgggagttcgagaacgccttcaactcgctcccggcaccgaggtggccaccgtcacctccgtcgtgcagctcgagtcgcaggacctcgcgcagatcgcgcagcaggtgcagaatctcaccggcgcgaagaacgtccgggtcaagacccgcatcgacccggagctcatcgccggcttcaccatccagtacggccgcgacgggtccagcctcatcgacatgagcgtccggaagcagatcgaggagatcacctccgagttcgagatgcccgcagtaaccctcgacgtctgatcggcatccaccaccctcccggcggcgctgccttggcccttaggtcctctcctcctgttgtctcttactcttgtgcaagtgcaacatacattgctctcatgtgattgttgaatgtttggtaagcattactgctgaaataatacatagctggattccaaaatttgcactgtttgattatcttggcctgcatattttttttagcagaatttgtagagtagcgtgtgttgcgttcactagctccatgtctcggcctcatgggggaagttttcaatagatttgctctgccaagttcagagtagaactgtagaagattgtcttgtgcgatggagcagagaaaacaatcattgaaagtagttcataagtgtgagggcattagggcaaagtggcgaaggaatttggcttttgtgatcacatgaggctgctcttataatctgcaaacctgtcaatctaatatgcaaatgcagtttaattagtgacagactgttcatccttttgcagctccattgtcacagggaatctcgaaggcttgtcaagaatgctggtcctcatccccttcagaactgaagatataatggaggaggctcaaatacatatgacgatcacgacaacattcttttctgcatttcttttcattttttggccggagccaatgtaattctcttttctttcgttgcccttgtaatttgcttcaaatactaaactatagcgaggctgctcctccattatgtacctgccgatagagtttgcagatatgtatagaaagtgccattgttttcatctgataaacgagatcaatatatcatgtggtgttccgttttatgcgtgccctgaacttttgcttcaatgtaagtcaggtaatatgccataaaacgttatactacctccgtactagtaaaggaagttgttttggacagcgacacggtctccaaaacacaactttgacttcttgtttctataaaaatatttatttaaaaattgatacatgtatacttttatgaaagtatttttcaagacaaatctattcatataatttttacattttcaaactcaataacttgagagttatttatgatttatattcctaaggtttgacataaacattgttctaaacgactttacgagtacggagggagcacaagcaaacaaaaaattaatttataagtaaaactttttttatctgtgttatttgtggtttaaaagcattgttgaaaactaaaatatgatgaaaaaaaccctctcaaaatcaactctaaaattaagctttaaattcaagttttgcagcgtcttataagtgtaccaggtttgctgctgagatttcttcgttttgctgcaaccttagccatgaccatggcatgtggcaagtgttactagggattagggttcatctttctgattgagcgctgaatcccgaccttcgacggtatgacagtttttgccaaatttcgatagattatgatcaaatttctaccaaatttactgttttaaattttaattttcgaaaaccattcaaaatttcacttggaatgtgcttccgtcccacgtcaaaagttcaggggcaggatctgctgaggtgcttgctcattaagttagtattttaattaatacctgtagttagcatttgtaatcaccaaggatccgtggcgcaatggtagcgcgtctgactccagatcagaaggttgcgtgttcgattcacgtcgggttcaaatccccgatccaaacggatctccttttttcttttcatttttgcctcatttttctggtaactgttcaatcctcaccgtccaactcacactaatcgtacgaagccgataatctgagccgtccaaaatcgcactaatccatccatctcctccccccctatcccctcggcctcctctccccccacccgcgccgcgcccctccctcccgacggcagttgccgccactcgccggcggccaaccctatccaatgcaaacctaaggggcctctccttttgacctaacccgatgctcgcctaccctaccacatcgagcccgtggccgccgcgccaccacggcgccgccgctgcccccgccgcgcggcggcacatggcggctgcggcagccaggggaaagaggcggggcgcgggtgccgcggcggcggaaggggcggacgaggccgccgaggcggcggacctggtgcggttcttcctccggaggacgagcggcggcaaggagcggctcgtggccgtgcttgaccgccacgtgaaggtggtccgcaccgagcactgcttcctcctcttcgaggagctcggccgccgcgacggctggctccagtgtctcgaggtgagcatggcgaagtgccccaatgcccgagtagtgaaaaaccctgtttctccttacgccctttaggtttctacagtaacaacgcctttctactgaaagtgagagacttttaccatggtttacatttcgtgtcacatataatctttgcctatgagcccaactcaaatcacaattgactagcagtatgcctgcttttgtgtactaatcccctgattgctatcataagtgccattttagggtgttgatgtggatcaacaagagatgaattttgaagttcctgtaagttggacatatctactggttccttactgctcttctattttgctaggttttcagatggatgcagaaacaaaggtggtatgttgctgataacggcatatatt

SEQ ID NO: 5746 - DNA, 3594 bp, Oryza sativa
gggtgcgtcccgggtctcgccgacgcctacgagtctgcctgtgccgggaagacgccggtgcaagctgagtagtgaccggacttgggggagaacaatggaggtgtgtatgtgtgtgtgtctcacttccattggataacttcattctactgatcaactatagcagggatggcagattcaattcatggtcattttagtgtaggtttcttgcagttgacaaggaggtggatgtgtataacaaccttgagaactgttcagttgtggttgaacaatgttcagtgggttttcatataaaatctgtgagcattacgtctcctatggtactcattttctttgttacaggcttacactctagctggcttctggcatgatcagcgatcacgatgtcctgatgtgcatcttccaattccaagttgaacgagagaaagtgaagaaccatctgagcaaagatataactagataaattgcgggactagggaagaacactctacataaggagatggaaaaggttgatctggttctcagcaaatcatcagaatgaggagtgttcctctacggcatagaacaagttgcggctgaagctttagaagaggttatttttcaagctgttcaactggataggcagaggctttcctatcgtatactagcatgtttcttggattgcatgcctactgttgcaaagcaaaaacttaggcaacccaagattagaaaaagcactactccatatacttcattcacccgtttctaaatatttgacaccgttgatttttttttaaacatgtttaaccatttatcttgttaaaaaaattaaataattattaattcttttcctatcatttgattcattgttaaatatacttttatgtagacatataatttcacatatttcacacaaattttcaaataagacaaacggttaaacatgtgctaaaaagtcaacggtgccaaatatttagaaacggagggagtaataaagagagtgaaaaaggatgccgtggagttgagtaggcccaacaaatccgggatttcatgggttacagtactttgggctaaaattgtgttccgtaggcccaagatggaactcgatcacgggccttatttcttcttcccgtgaagactgaagcccaaatctccctcaccacagggcacgataccgccgtccgttcgcggcgcgacccttcgccgccgcgccgccgcgccggcgctatgcagcgcctccaaaagcagctccttcccgccctgcgcgccgccttccctctccctgcctcccacttcagcagccgccttctctccgcctccaccgccaccttatcccccacccgcttcgtcgacgaggacgccctcgtcgccgcctgcggcctcaccggagccgaagccctcaaggcctcgaagcgtctacagaaggtaccctcaaatctagacgccgccctcaccttcctcgcctttctcgccgacttccgcctctccaaagacgacatcgccgccgcaagctcacggtacccgcggttcctccatctcaaggtggacgaaaccctaacctcccaagtagcccggctccgggatatcggcctatccactcccgagattggccgcctcattaccatcgccccctgcatcctctccaatcctcgcacgatctcccgccttgaattctacctctcctttttgggctcctaccccagggtgcactccgcccttcggaacaattcctcccttctacggcgaaacaacatcgagagtgaggtcaagcccaacattgcattcctggagcagtgcggcctaactacttgtgatattgccaagatcctcatgtctggctctaggatactcattatgcagccagagcatgtcaaggaaattgtggcgtgtgcagacaagttcggtatgccccgtgagtcagctggtttcaggtatgccctgatggctgttaccggcatcagcccagtgagggtcagcgcaaaacttgatttcttgaggatggttattggatgctcagatgcccagctacacattgcggtgtctaggtttccactaatcctgacatactcagaagttaagctgagccgctcactggaattcctgaaagcggaggttgggttggagcctcagtacattgtgctccggccagcattgctcggctatagcattcagaaacggctgatgccgcgttatcatgtcatgaaggttctgaatgaaaagggcctgctgaagaaagacactgatttttactctatggttaaaatagttgaagagagcttttttaagaagttccttctcccataccacaggtctgttccaggacttgaaaaagcttatctggctgcccgtgaagggaaaatgtttcctgaaatctaaaacagagatgctggaggtttattctgcctaggaacttgataatgttctgcattttacatcttgctcagttcttagatgatttctagcgatctgtatttgtgatttcatctgtgctttttgagacaaacatctaattttagtgcactcttgttctcattttaatgcctcgcacaccacaaggatttttgcatgcttacttaaggaatgttttagcctggagttgcgctgcaatgctgcaatttgtttgtcagccgatgcttctgtatgatttgaacagatctatagccagctcatgaatattactgtttagtgcattgacgacttcagtaattgcgccggtttgttaatctggttgtaccagagtttattggttatacccatccgtagaattatctatataggaaaccaaataagaagttgctttttcaaggtaagcagttttacagcacagaaaattttctcctgttttgggggagaaaaaagagagaaatgctggtgatatttagttgatggtcctgctttgaagaattgaagttgtggtgtcatgtactccctccgtttcataatgtaagtcattgtagcatttcacatatatatctatctagattcattatcatcaatataaatatgagaaatactagaatgacttatattgtgaaacggaggaagtacaaaatttggtagagaaatggagagttccagtatggtgttaacacaagtctacaggctacagctaaaacccagcaaggaggaggaaattgatagaatgcaatgcatagagttggctttgatagggtgtatccatgttttgaaatgctacgggatttcatagagcacgacattcaatgtttacagtttttctgatgggtcgttccgtcctactgtatatgggtgctagaatctaccacggggctgttcagattgttgctaaaataaaccctgtattgccaaaaattttaataagttggtaatattatcaatttttttttgagaataatattatcaaaattttggtagaatttctcatgtgtttatcaaagtttagcaagaaaataaatgtatgcacacctttgtcaactttaccaaaaattggcatcaatctgaatagcccattcaattttgggttaattggatccatgccactgcaaatgtggcaaatcagaaaaatgccactactattcacgttatcgggtagatgcccctgtaaatcttctaaaattagaaccatgccactccatgatt

SEQ ID NO: 5747 - DNA, 4892 bp, Oryza sativa
attccggccatactagcagtggcgggcatatgcgacggcgacggcaggagagggcaccggcaggtgtgggcgacggcgcgcggtggcctactccttgctcccccgcgcacggcggccccctccggcggtcgagacgcgggatctagcaggcgacggccaacccccacaccgatccggcggccgaccaccctccctcgcgcgggatctggcgcgcggcggcctccctcccgacggcggggtacgcagcccctctccttcctctccctccggcgtggtcctcgtcccaccagcacggtcttcaccttcatcgacaacaacgaccgagcacctagccgctcgccatgggaagttgttgatggggagagaggagagaatatgcggctaagaatgaggataagactgcatcgatacgttgactagagaggagaaaaggacgagggagaaaaggctcggtgggacccacctaagatgaagagtccaatatttccttccgcatcgcatggtcgattggaagcattttcgaatttacacggtccaaatttttaattggtaaaattgatgtttcagttctaggttattttttattctatgtctaaaaatctaataagcatgaaggggatgcattattatagatgatcagttagccatgatttttattcatgaaccttctctctcttttttttcttcagattctacctttcatcggattttttgcggtaacaatattcttcttcaactcaacaataccgattatattgaaggtactaaccatgatcctcttgtgcacaaattcataaaattcctgaatgttgtatgtaacttcagatatgtgggctgaatgcttcagatatgtggggcaacaatgctgaagctcaacctctcgcttttgacctcggacatgtgggctgttctaatccttatcttcgcttaccatgaggtctctgaacatcaattcctccctccataacctcatgccaatacttcaatcttaaaattgaaattgatattaatcaaattttgagcatttgcaggttgattggatttgcttcgttgcttttgctggcatggcagctggccttgtcatctactcatacaagccttccttcttcatctgccattgcttctgaacatgcacataagatacatacttcattcataccaaaataaatcaatttctgaccacaaacctacacataaggaattgatttattttgtgacggagggagtagcaaccagctgtgacgatgtcactactcaccactgagaactcttgcaagcaggggctccaaggaggcggagagtcggagacgatgatgaaccagcctccaataaggaggtctcgtcgttggttgctactacctcaaggtagtagtaggtaggattctgtctgctgcatctgcacacaattgtgctgtaactgaaaatgttttactatgtacagtgtgatagctggttcataggggcaaggtttggtgtgaactgtgatgatgtgtgatatttttactgtcagataagcaagatagggttaagaactagcataggtttactgcataatttaaaagtatacgtgtatcatgtctgattttactattgttttgtaatattggtcaaggcttcgtgcctgcctgacaagttgtaatgcaaaagattcagagaaatttctatggacgatctgatgtacagagtatttcaggcagtcggtttcagcactgtgccagggacaaggtaatattacactgcacaattgatacataaccactagagggaaatccagaaatgaggagacaaacaccctgaacagtaatgcacttgtcaacagaccattcctacttcacaatcatatttcattttccataaaaaatatttcctaaaagaaaaaggtcttaaattcagtatgtaacaaggactcaccatgaaaaattgtgttagcaaaatgatcattacgaagtgacatatacctagctataaagcccccaaaacaactcatataagggagcacaaagttgtccccaaactagcctcaagtcatctatcatcgatcttgacattattcagagccaacatcaacacctttctttgataggaattcctttgcctccaagatatcctgcaaattaagtaaatacaactgagaatagactaataatttctttgaagcagaatggaagtgtgaattatctcaatatcagttgggttgtttcctttgaatcatgcaacggcaattgcgaagattttcatgttaccatagtgcaaactgcatactttaaaaatattcatttacatcacataataataccttgaacacccatttctcatatcaacagagaataaaggggggagatagagtaggaagtcgaaaattttcactggtatatactaactaacatcttcaagtcatagaagtcctagtttcaaactaattaagatcatcataggcccatgcacagaaattttaggctcatggatctagaacaactaacctgctgtagtagtacagcttcttgcgggcaagttgggaagaacataagcccaaatccaaccataaaaaggccatagcatccaagtgccactaccaagtagatgggaagctacaataacaaaaagtcataaataaagcccttatccttaatcatcttgcactacaatcatcaaggaaattgagatgaaaattgatagcactgaccaaccaagtataacttcgaggaacagtcgcggtttcaagaagggcaatccaaatagctgagactgccaccagcatagcaattatcttgaatatgtgcttcatttgggaaaccaagtgttttctgccaagataaaccaaatgagaacggcaaataaaatgtgcccgaatgttacagtctcaaaagatgaattgcaagcataattgcactagcaattcagtatgctagcactaaggcagacccatggcgagtaggaagtccagcagacttagcacaagcatgaaggggcggatccaacttgggacacggggattcagttgaacccctaaactttttggggaacaaacaaactgttacttgtattaaggttaaggctctgaaattaagagaagatattcttccagatctagaagagaagctagggttaacggacgcaagcaaattccagacaaaagtactcccggtgggagagagagataaatcggaaagaggatgtggatgctcaccaggatcccctcccctcccgcgccctgctctgctcgccaatggagatcggcgcccctcccctgttcagccgcgagatggcgcaaggagcggaggcggcgacgacgagacgggagattttgttttacgccaagggaagggggagataacggagtgctccaccttttatctcaaaattttcactttaaaattctttacgataactggtaaaccacttgccagcagtactcacgacgataaacttcttggatccctggcaactaactgtcgctctatacaccagcaccacaccatcgttactccactctgccttcgtatgcgcagccatacactttaaatctcgacatgtattttctcttccctcattgttatacatgttattgtcatggtcgtcgttaaggatgggattgttgggcttacagggctcggggaggcaggagccaacccaacagaaagcgaagatgctagatttggactcctccttactatatccgacgattccccaattgtcgaaggaaaaaagaaaaatgagagagagagttagtgtgcagagtgattgcagagtcactgatttggaggtggagcgatggtggagtcaccggacttggagtttgatggatagaatgaggtggtccaaattgtaacaaaaatgtaaagttcgtttttgtgtagataaaaagaatgtttaaaggatgatatcacatcaaaacttttaaggatacatgtacaaattgtaatttatttatttttctctagcacaattaaatatgagttatctattagcaatagtctcgtgctatggcaagcccactataatttgtctccacggtatgattggagatatattgaaatattatgtgaattatgtgggatgatgattaaacatgcttgtattaaaattaataaattataaaattatagataatatagcatgcttacatgatgtttaagatgtaataattgttagtggatgatgatgttatgcttttgttagtaaccctctgttaagtgctataaatagactattttaccgatatgaattgttgaaagatgaataaaaatttttactcttttaatcaacgtaaataatttagcgtaaagagcaaactacaaattagtgtaaactaatggaaagagtaaaagttttagtgaacttttaataatttgtaggggtaaaatgattttattacaacactttacataggaatgctaacgaaaactcaataatgatggcatttctaaggcaaaaacgcttgtacttagaaagttaagtttatcgatgacatttattagattttctctaaaataattagattgtgcttctcaagcgcatgaaatgcttagcagacgcaatggatttggaggtggttccggttggaaaccggatcctctgagggacgtccgaccatgctgattcgttcgatcggcatcggacgggagcgatggaacacaggaacgaacaagctaagctgtcgcggcccacgtaagaaaaatcggcccacgaagaggcttgactgccgtccgcccgtctccactctcgacacagccggagcgccgctggaaggggaagagaaggcaagcgctgccagtcgagctccggtgtgaggaggtcgcaggagtcccgggttgaagtggccttggctttgtccggatcttccctgcgctccccggcacagctcgcgcgcacggccgcatgtggtgaccaag

SEQ ID NO: 5748 - DNA, 20155 bp, Oryza sativa
tccccacgtggtagtggcgtgtgccgccccctcgtcgccttgccttttgggtgggcccccagatggacggcgcagatgctgatgaggcgtgccgagcgcccgcagcctgtgccagctgttgagtgacgtggtccctcctatgatttctgagtataaacttttttaaaatttagaacaattaaggaccatttggaatgaatttgctggttccacaatcagaccaagtttagttctaaactttatgttcaaacttttaactttttcatcatattaaaatttttctacacataaactttagtttttccgtcacatcgttaccatttcaaccaaactttcatttttgacatgaactaaacacaccctcactgtggaaatgaaggctgctctgtatttcgatttcgacgaattttttttatttgagttagtccatttaagtttgattaataccactccgtgtgattgattctttagcaaagtataaacgaatcgttttttttaaaaaaaacgtacggaatagtacgagatgtacgcatgcctgagtattcctggctttctacgttgtctctagagtccacagttccactctccactgtatttgtactcccaaacaacgtgtcaatttcattgcacgacatgttccgtactagtatcactgtgtatccaaatccaatcatcatatggcaaaaagagctaaccgattagacaattcccgtgtttcttaggcctcctttaatggttgagctagtgtactagctcatatgcttgtccacctcatataaaagatagcaacaagtctaactctctaataaattgtctcatagcacattgtttaaaatgttttggtttcacaattcctctcgcattttctttaggagcttagctcttgaagaagagttagtgcattctctctccttatcttctctctcttccacatcatacaaaagctgatgtggaaatttatgagctagctgactcatccttgttggaggaggccttatgctacctgtcaaacatatttttgccaatatatcgttccctggatataaaaaatcagctcccggcgcagaagaacggagcgctggcttctgcttgattacggttgtgtttagttccgtacaaagtttagattttggttgaaattagagatgatgtgactgaaaagttatgtgtgtatgacatgttgatgtgatgaaaaagcactgaagtttggattcaaactttagatctaaacacagcctaccgagagggaatggaaggaaaaaaagaccaagccaggaaagacttccgctgctctccaagactcggcacgctagctagctcttcgttccccctcgtttgctctgtacgaggcagcagctgaggtgagcgtcacatgccgctgaactcttctttttctcggtcatatggactcatgatgcggaagaccaacacgcgccgcacaaaaacagaagcgacgacgcatcacgcatactcctatagcctaggaaaacatggtccctttgttgttaggcctaacatgggtgctagtagtaagattttacgggagacggcgtgttttagcatgggtgcagcaactgtgcaagtcctaatcaccagtttgtgcttgtgcactcgactttttttgctgatgaccacgtctacgagagtccgggctatagctgtaatcagggagcgaaacggggaaagtgaaaggaaaaggggggcgaaaagagattcgccccacgcgcaggcaggcagcagctgcattgttgctgttggttgggaaaggtacaccggtcggcgccggatggctctgcttgcaaggacacgtgttgctgctacagggagagagacctttgatcatcctcggctcatcgccctttcctctccagggtttcaaaaaccgccgggggcccggttaccgccacccggcggtacggcggttaccggcggtaaccgcggtaaccgcgcaaaaccgcgacaaatttacaaatcgaaatttgaattcaaaaattcgggcaaaccgcgcggtttggcgcggttaccgcgcggtttgacgcggtaaccacgcggtttggcgcggttaccgcgcgatgtgtaatgggttgcacagtaacgggccggcccatttttttttctttttccaattttcaaatttattctccgttttgctctcaaatttgaataaatattactcttttttgagaaatttcttcaccataaaacactataaatcaagcactaccttcactattttttttgatttttttctttttttttaaatttttaaatttggacgaattttattaaaccgtaccgcgcggtacgggtaaccgtacccccgcggtacgggcggtaaccgcgcggttaccggcggtttttcacaccctgttcctctctcgcctttgttaggccgaatgggcttctttctctctgggatttggacggtgcagaaaacggcagcccttttgggaaagctagtcctctctctttttcatcaggatgaaagtagtcgtactagtgtttagggggtgtttaagaactagagactaaactttagtccatatatccctaggagagggacttatgcttttgtgagatgggctaaagtttagcccctctctcccaaacacccccctactgtttaaccttctcaagtaaaatttctttattggagcacatatgctaacgggagtgatgctctgtttaattctgtaagagcaggtacaatagcaagctataagccaactgcaaacatattttaaggagataaatcaggagagagaagagcagcgggctacagatttgtagtcagctgtagcacggaccccaagacgcagtgtgtctatgataggtgggactatgtattaatagtatagtatgtaactattgtatgaatgagctattagattggctatagatgaattggagctagtagttggctatactattgaacttgctataagagcaggatcaataataccgcccgttgctggctataaaattcaccatgtcatttaataggctatatagtatatagatgtagcttgcgttttcttccttgggcaggccaaaagctgcatgcacaaaccgattgctgttcaatcaccatttatcctgaacagctagtacccaatcactatgcgtaagcaagggtatggccaattacagtaaattcacctagtcttggaggctacgtgcagccggcgttaatatagtcgcccgcttaagttctctgtccttgattccctccgccaactcagctttttgccatgatggatatattatagcctgcttaattctcctattgtacttgctctatgagcttaagttcctgtgccgagagatcaccagattagagcaaggctaatggtatagcccgctgctggctaatagcctactcctaaagccaactataagtacaataacttgttcattggatgactacatcttataatcaagtaattaattataacatgcacatgtcaatgtgtaggatcaagagtgaattatatctctgtagccatttgtgttgtgacatgaattttattcatcaaacactaccactaccatataaaccaagttctatgtagtatggaaactacaagcactaatagataactcaaataccatagcaactaactagattaacccataatattattatcccaggcagggaccggaccgtcgctgcctttggagcttctctcgcttcgtctacgtcagggacgcggggtgccatgctgctgcacctagctctagcgctccaggcagggccgcccggcatgcgtgcacctgctgtttgacaaggacgacgtctccgtgcccaccgcttcccggcctgggagcacgccgctgcacctggccgcccacgtcggtagcctgacagcatccagagatggcgcgctggagggaagcggagatcgagcgagcgccgaggagacagagatcgcgcgccgcatatgcgtcgatggggaagcagagggagcgttgcgggatcggctgtggtgtgcgccccacaaaccgcgttttttatcgccagggccggctgcaatcgagcggtagcgcgtcgagaaaagtgtatcgcccgacgacaaattagtcatccgcttccttctctctcatctattctctcttccctccacataggaataagatgatgtggcatatttttgcagcccgcatagccagcttattgcacctgctcttagcagggctgttatgattagaaggttttcttatattctgagaacttttaattgactctgctgctccgtgaatccctttggagaagcaggtggccattgattcgccagcacagcttgaaagttgacaagaatcatggctcgagtccttccctgtgacgtatttaaaaccttcgctttcccgggtagctggctggggaagacggccacctggctattttctggttgccacagccatttgcacccgtgaaaataaaagctaaattcaacgcatttaatctttcttggtcaatggtcagatatcatttttatttctttttttttcatttttggatagagatctttgcatttcagacatgaaaatttttatgcgtgcaaaagtcccaaacactatacaccatataaagacctatgaagttacaccatacaaggacctaggaagattttctagaagataaagaagatatcgataataaagagtcttattgcaggggataaaaaggataagatatttatttatttatattttatccgggaagtgttcgtgcacgtttcttcatgtcaaatactcaaatacaatacttgatcaatgcatgtacgcttcttgatgcatcatgtatatgcgtgccaggtagctagatgaaagctgaaaattgttttattatattaattattatcatgttaatttgtgcacgtacgtctagctctgcaccttatataattcaaatcgattttgctatatatttgtcgacaaatttttcccccaaaatttgacagatgtaattacagtacaatcgtagtgtaattacactgtaacttgcatgtaattacactgtaactatagtgtaacttgtatgtaactttcaaaaatctctccgttacatgttatttcggtaaaatggaggtcgtgggaacaaattctttcacatatgtgtgtgctatgatttgttttctttctcaccaaaacaaatcttgtaatagatccaacgattcaaaattatgtgaaacttacatataagttacactgtagttacatgcaagttacagtgtaattacatataagttacagtgtaattacactacgattgtactataattacatctatcaaatttttggagaaaaatttgtcgacaaatgtataggtagtcccatcatgggactaatcaacctgcatttatacacatggaccaaacaaatctttgttggctgtgtgtaaatctttatggtttgtatagctaatggcagatatttggtgtactatgtacatttacaacgtgtcgtgccctacgcgtacaaatttaactacaaaaattatcctacttgtttatatctcagtgcaccattcttagcctaacgatctgatgcagtgaggtgctcccgatcgagtggtacttgaccacgtcctcgaagcatccaatggatggcggcgatggcggaggtggcgccgtcgccggcgccttctgcatgtggccaggatcgcattctcctacggttgccgccgctgtcgacgtgtcgctgaccgcttgcgtgacattgacaatgtcgtcgtcgtcgtcgtcctcttccaccggcgacggacacgggtagaagtccttgctctcgacgagctgcattgtcacgcgcccgccccggcggcgcgcgcggatgtactcgtgacgccgcctggcgccggcgggcgcttcggtgaccacgagcctcccgtctttggtgcacgtccgcctcatcgcgccccggagcgacgggagcggcggcggcagccggcgcatcatcccccggcgcccgtacgccacccagcacccgtcctcgccgtcgtggacgtcctcctcctcatcatcatcactgcagccgttgcactgatcccccttgcagctcgtcgtcgtctcctggtgaaccgcgacgatcgtccgcgtcacgacgcggccgcggccgtagcccgcggcatcggcgacgaggagggatcggaggccgaggctgtcacggtcacgggcacggcaaggcaatctctgcgcgggcatcgatcggatcggtgtatctggctcggccgatcgatctcggcgcgagccccgggttgacgcggaatttatacgtgggggcggaggaggaggaggacgcgtttactttactctccgagatggcaggaagaggacagtcgcggcgcccgtgatgccgacctaattaataggccaccggcccgatcgaccgagcagtcgtcatcgatccaccgcttcctgatctggttttatttgattacgctgcgttggagcttatcttatccgtccattcggttgttagatattgctgcggaacggatagaggcggatcggacggctgtgaagcctgtgcttgcacgtactccctccgtccaaaaaatctcaacctagaactgtgatgggacataatctagcatgtctagataagttgtactagattatatccctttatatctagatacgttgtactaggttatgttccatcacagttctaggttgagattttttgggatgaagggagtagttggcaagattggtatacggcgcatggtgagaaaggtaaggctgatctttagtatttagctatggcctatatacttatgcttttaattataggccttgctaacttccgctatatatgcattggattgcttcagcccatagctaacttccggctcagaatagtatatgggcctgagctagagtgaggcattttttttggcaaaatttgctacagtacactcaaaaaacgtgtaattggctgggagacactgcaaaaacgagacacggcaaatggacactacaaaaattatgtaattggctataggacaccagagaatattttataatatccgaatcaaaaaaggcgggaaatttttcaaaatggcaagattgcccctggctccatcttcctccacctgaaatcacacacaaaaaaatagcagggagcagccgcggcgcgaggttgtcgacggcgagggagcgggtagcggcgaccgcgcgccaggagcggccgacggcacggaggcggacgcggtcagggagggagcgcgaggccggcggcgtggagtgcgagcaggaggcggccactgtcgtcaccgtggtttgagcggccatcgccgcagcccaaagcgccgatgcctcgccctgccgttcctcctctgccgcccaaccataccacagccaccacgtgtgagcgtcgccgccgtcgaccaatccatggacagagctccacttttctccacacaaaaccgatcctctctctctctctcatgccgtgtcaagccagccgccagtcgatctccttcctcggagcctcaccagccataacctctcaccattagcctcgcctcgccgagtagaaccatttcatccatttcccctttccctttgccaccactttgaaccatccacccaacctctctctcttcccgattcacggccttgcactcgtcgttccggccatttccctcactccctcgacctactaccaccctcccttgttgtgccgcactcgggaacatactccgccgccagcgtcgtcgtctcccggccaccggagcaccagcgcccttctctacctcctctcggttccctggaaagaggcagagaagaagatgacgggaggaagaagaagagaaagaaaaataaaaaggagtagagaaggattgagaaaaacaaaaagaaaaaaaattgaagggtagaaccatacttacacggttctttctctctccaattttttcggatataataaaataatcccgtaggtgtccagcagctaattaccagtttttcgtggtgtcttatagcaaatacacgtttttgtggtgcctcacagctaattacacattttttgaatgttagcaaattttgctttttttttttaagataggttggatttggatcggtctctgtcaatctcaactctacagaaagcagttgctgcgaagtgtgacaagcgtctaggtattcagttcagttcagtcaatcacagctaccatttcagaattcagacacaaacatttcatcgcaagagaatggacgggtactctataaaaatgtggaaacacgagttggtagaccgacgtttcaccctgctactgagaaggcaacgatcatcaaaaagacccgagcttgtgccacaactcgacagttgtccgaaaccaccgacctaatcatggcactgtcaaattcagagacgatcaaatcaaatcaaggcgtcagaaacacaaagcatcttccattaacctccctcttcttcatccacaacgaaacttgctcgccacagcacacaacgttagcttgtcgttggcggtggatcaccaaatatctcgagtcttagtctctctcacagccctggtatcctctgtgaactgatgctcaaaccagtacatgaacaaaggtactctatttctttgcactttttctatcatagttatttaccacttgtctgaaaagttacactttcatcttgttttcttcttgtagagtatgcatctaccattctaatctactcatacaccggcatgaatgcaaattgattacatatgtagtggagctttcaactctcacttagtaggcccatgactccactactgctagtagcagagaaaaaagctgtttcagagaggattgtgcataacagcataaacaataattggccatttggcatatatctcaggcacactaagcaagcatgtttgccactaacagacctgcagatttgcaagatagagacaaacatcacgcagcattgcagcatcaatatttactgccaaatcattggggaatgtaaagaaaaagaattataccagggaaaaaggggagaaatggttagtggagtagagcacctaagatgcacacccaatcatcagttaatgaggcagaattcagtgtaatgcaaactgcaaaactcttttctgaaggctcagaggtaacggatcagattccaacttgcataatagacaacaggggtgatgattttcagttgaaaacgaatgagatgttgatctcctgggtagataaagacaagttgtggtgtcttgatgcagactattataattatagtaggagtaccaattagcagtattcagaataccagctaattaggtaggttggtgtcatcccccgtatcaattcgagcatagaaattatccattacttctggtaaccttctttatgtgattacttttatctcagctgcgtgagtgcatgtagcatatattaacattttaattgtcacatccattgataagaatataccatcaccgaatttgttttcaatgctgattaacatactagtcaggaaccggagataagattgagcttgagggggtttggaaactgacccctacaccctccattaaaaaaacaaaattctgattacgaatctaaatatatatcgtgtctaaattcgtagctaaaaattattattatttatgatgatgtgagtatatatgtaagttagtatttgccacgagaattctacaaactttgcttgcactgcatccttctatcattgcttgcggtggcgaaagcaagtagtacggaatctagagccccactatatgacacttcggtggtctttgccactaaaaaacagctcctttctacctgaaaccgtggaaatctttgcagtggctcgttctaattcaaagttgagcgtgacaatttgttccatagtaccaattattttttcaggtattcgtgcactattgctttgatttctttttttctttatatattataaaaataagagcaatgcaggtacatgcttttattcttgttgcttatgaaactaatagtagtacttggcatttagccaaaagaaaagggaatagtacttggctgagacaacatcagtatagaaattaattggagagcgacatgtataagattcagttccattatttcgggaagaccttgtaaatcatttgtgatatatacaaaaattgccggagtctttgctgtcctccaatcataattataccattttttgattgcatcatacgatagaacaaagaaacccaaccactgcatatgtatgccgttttgtccgtgtgttcagctgtgcggttaccacgtcgtgtcttccctttttgcttgaaatttcaggtttgtcatagttggtgtagcctggacttttttcagatttcactcctgtaaatgtatgcatatgcacataagcaaaatcgtgtttcctagttcagccgaggaccaaatcaccaaaagatacagtagtaagcctgacaaatgcagccttaacaaagattcagctgtcagatgctttgcctgccaggaaatgtttagcagctgacctcgaataattgggtgcttccttcgtttggttatccctgtctgtggattgttacctgagattctgagaatatacaaaccatatgcaagtctcatgcaactatcagatgctgtatggatgggaattctactattttctaattgtgttagttgatccgtaagtcaaaggagaattctaatttctaatcgtattggttagcaagtcagagtattagccaaccttctcagactagctaatcacaaactcatgacctctaatggggtgcaggtgccagtttatcaccggaaagtgcaaacagtaattaccctgcttgagaaccagagacatttagatgaagagacgtgtcaagatttttcagaaaaaaagagttgcgtctggtgctccacattttcacaacaactgtcatgtgacaacgaccatcgtttaaagaaaaagctccgtgcttccgtctccgaccatttcaacctccaaggataatcttttactatctgtattaaatccatttactatctgtattaaatccattcatgtgctaccctttcaaaactcaggaagaggagtcattttgacgtcaacagaagaagaaagaattaagattaactttttttttcctgactggagatgtaaataacgtgcaaaactcatccaagctgctaaaaatatgcatcatgcgtgtgtgtttgttcagaatcaaaccaatcttttgtaccagtacaaccacttccagcgaagccagcagctagagtagcaatgtatgcgcatgagctcagccgcagcagcagtggcgcaggagaaaaacaggggagaagacgccaacgatgaggcaggttcacgcggtcaaaccagccgtcgccgacgtgcagttccgacgattgattccatcgtctcgggcatagaattccccgcctgcttctcactttcacaggtcgcaaccatggatggctccgtctccgtctccgtgctagtggaaaaaataattgaggcttctcgttgggtgtatctgttaaattaccgaggaaggaagccccagtgtgcctgtgccccctcctcgtctttcgtctcttctctccttccttcctccccttctcttcctctcctcccaccgagtcgccgccctctcgctttcaacccccacacggaagcaagaattgttcatcaaaacccgatctttggcgtggccccgtggatttcttgcgatctgtttggtgctatggatttctgatccggggtttcttggatcttggggagtaggaggtggggggcggcgatctggccgggagatggccggcgggaaggagccgatcgaggtcaagttccggctttttgatggtacggacatcggcccgagcaagtacgacccctccaccaccgtctccgcgctcaaggagttcatcctcgctcggtggccgcaaggtgagaggcagaagattcctgcatcaattcgataagagtacacggattttttttttcttttttgccctgatctgctgcatctttgattcggtgaaagcacacgatggcttgtgataattcttgatcccatgtagtttcttggatcatgtatattgctttgtgttgcgccgtcttatttttgcgtggtgtttatgtggggcgtttttttttctccttttcctaccctctctttcctatggttttgctcgtgtcagatgcgtagacgactgttaattggtaatctgttcttctctgaatggatacggtgaccaactgagtagcgcgtaactagttcttttcccccttagctttctagaactggatatgccagataaatacatcgtcaatcgacaattccccttctcagtgtatgtttatcatccatgaaaaatcccgaccacacgaattcggatattgccagaataatatttctgctagtttgtggcagaaaaccccccaaaaaacacatttcaggcaatgatttggatcacaaataagtgcgatgaagggccaaacaagaaagagggtagtcttcctatgtcctataaagagtaaagacacaaagaagacggcacaatgccatgttaataacagtattatgccttttgtatacctatttgctttcctacattatctgaaggtagttctgctagcactatagaacttagcacatctttggtcctttgcgtcaatatgattgctgggccattcacaagtaaacggtaaggatgaactctggacaccgactgtggtgctaatgtatcatttttttgggtggtgaaaccatcaggacggatgtgacgatttcaaccacagctgtatttctattaacactatggaacacataaatgatttggttgtttgtacacttaagcataatgatcagcaagggccacatttgtcatgtggcacattgaagttactgacaaccaccagaatcttttgcatagtgcaaccttttgtctggctgatgttttgccaaaaaagatgctgctgtataaatggatgtccgtttacattaattgggaccaccggagaaagatttggtgtgtagaatggaaaatctaataactgaggaaatggataggccaacaattgtaaaaaaaaaaaaccatctgactatcacactcagacaggagttcttttcttgatgtgcaatgcttgggtgaggtgctccttcctgagtaaactagagcatgtaaaattgaatcctttgatcctttcccagttgaatcagtgtctgcaagcaagatattcctcctgcagtacttttaccttcattgaacacacactgcattacaaactcgaaggctggaaatggtgcaatttcttttttgagatactattgattacaaatgagaattaacgttttctggatgtcctcagattgacctgcattctgaagttctctttgtaattttgtaaagattcaatttcttcataatccatacttgttatccttatattccaaatttattttattaaagggattgttctttatctttttatggcagataaggaaataactccaaaaactgtcaatgacctgaagctcattaatgccggacggatattggagaataaccggacacttgctgagtcccgtgttccagtaggagaggttccaggaggtgtaattacaatgcatgtggtagtacgccctccacaacccgacaaaaacagtggtattgccgccaattttgtttcttttttttcacattgtttttctggctgcactgatggcctatttcgcttctccgttgacacaaaactctattaaattcaacgaatgaaattatgctacagctgggtatcattctaagactgtagtgtcctgtcctccaaagatgaacatgtatagggatagtatctgtaatctgaatacagtgtcccacaagaagagcccagccctttttccaatagcggtttgttccttgttttattttgtgtagggtttaattgatcaaggtatattgtttggtcaattacttgcatggaaattgtagagcagctgagctggtgtttcctaagttgatagaggcatgaaatgaatatttcgagttcttttcgcaaattaacacgcttttatgatggataggtctatggtagtcttgtggcataagaaactgtattaacttttttgatagcttcagtttagatttgttacatgttagaagatttaaataggacagtttggcgccgttacttctatagattgaaatgggtgttgggttggttctcaaccatgtttacactttgcacataaaactacagcctacagattcacaaaacctttttgtttatagacatctggctagaaaataactacttattctaatgaactaaagtattttaaaactacgattctgcaactatttttggttttgactctcatggaactataattctgttgtttatatggtagtatttggctaattaaatgcttaaagctttcatctagaccaatttgacacctctatatacacatctataatgtgttgttggtttctcctttccagagaagcagcttgcgaattcccccaagcagaacagatgtgggtgtaccatactgtgatacgccgcctgcctgatgatgatgtacaatgtctcgctctaggattttgtatctgctttcctgtgttcgcagctcttgtgaattcattttgacatccaattttagagccattcaaatcctagaaatatacatactttaacacccgtcaaatatgcttgggagctggaactgaaggtttctggaggatgcgtcatggtgatcttaatgttgtaacgagtgtgcagaagacagggattggatgctttctgttgtataaattgtaatgtgaaaacgaaaaaaattctctcctttttcttttttctcttgccacattgacattttatcgattctttttagcactggtgtttgtcatgtaaaaccagaatattgtactcatatatgtaagctgaaaaaaggggtgttttattctgttacgtggacggaaaaaggaaagaaaaaaaatagaatctgtcctatagttatcccatctggaaacacttttgggccaaatttctcattatgccaaagaatcactttgctactattttcaacccaattattttttggcaaagttaaaaaaaaagtagctacatttagtttgctattaaatttagttagtaagtacatataaaatcttgctaaaatttagcaaccatactaaaacttggtaagattaaaaatggtaataaagtgaacaagcctggagataccaaaaatctgagttgcaagataggaatttaacttaactttatagtgtcactgacatgtggggcctggctgcgatgtgtcgatgtgacagcaacagctttacggcccggcccaatatatctagcggcccatttaccaaatacaatagcatctctcccgcttgttacaggccgtccgattctggccgctcgcccatctctaccgttggtttccgccgcaaggctcgcgcggctcccgggctccgcctccgcgccgcttctccgcttgcgcgaacccaaccccggcgaccccgccgccgcaaaacccttccaccctctgctctctctctctccggctcggcgtcgcgcgcgccgtggaagaggccaccagtcgcgggggcgcggcctcccgtcggtgatccgacggcgctgtataagcgtgatcgcttggagcgtccggacccgtcgctggctcgtgtgcgtgtcaggggtttctccggctgtccgtgcgggtgcccgtccggtacgggatcctcggccctcctccgctgtctccgccgagggaggaggcagaccggccggtcgctgactcgctgcatcgatttttggtttggtggagttcagccttaaagacggcttacgccagatttgatctcttccaaggttagcttccgctttccccactctggactcgtaatttctgataggtttgcttgtgaacggttgaataattgagtctagtcttatccagagctttagggctcactatctgttgtgcagcgaatttattgttaattgttgcatgctgctaattaaccgttgcccttttctttgttgtaaaaggttctgcagtcgaatagtacttgcgatttcattttattgaacgagttaggcttaccagcatgccagtgtggctaatcttcagtttttcacacgtaggatttgtatgctacaaatattttcgaggatagcaacacgaatccctcaacgagtcatctgtgcatcgaattcatatagttcaaattatcgaagtactagcacaagcagtcccatgaattcaaatgaaatgctgggagctcaggaaacggtatctactgaggggaacaacagctgttctagtgttcagtccactcctgacatagagaagaagtatgtgcatcgtgtatatgatgccatagccccacatttcagctcaacacgctttgcaaaatggcctaaggttgcaggattcttgaattcgttgaggccagggtcagttatactggatgctggctgtggtaatggcaaatatctgggcttcaatcctgactgtttattcataggatgtgatataagcccaccactgattgatatatgtgctgggagagggcatgaagtgttggttgctgatgctgtcaaccttccatacagggataattttggtgatgcggcaatttcaatagcagtactgcatcatttaagtactgatgccaggcggaggaaggccattgaagagttgatccgtgttgttcggaaaggtggtctggtgctcatcactgtctgggctgtggagcaggaggacaagtcacttctcaacaagtggactcccctctgtgagaagtataatgaagagtgggttgatccgagcagccctccagtgcgtaatcaatccaatactgtgcttgaaagcatatcagagactgatgaagacacaggtgcagtgaagcaaaggaatgatgatctgaaaataagtaatgatggtttggatgataacgccgatgtaacttgcagcaattccaacattgatgagtatcacaaaacccagcaggagtactttgttccttggcatcttccatttcaccgagctgaaattggtggtgcatctgctgctgctcttgaaaatggatttgcaaaaagagatgacaagaagggtactgtggtctacaaccgctattaccatgtttttgttgaaggagaacttcaaaggtgaagcattcttactctgagctttagtataaaatgctcctctattctttctttttttcattttccccaattttttctatgaaaatgcgtgagttaagatatatcacattatatataagttcaccagaatatctccatttcatgttgttgactgatgatttgaaatttctattgtttggctttgagatattttcatacagtttagtagtttactagtatcagtttttgtgtttagctatgcaacaatggtatgatacacaatacttgcgattctaaagttttgcttttactccctccgattcatactataagtcgttttgacttttttcttaatcaaactttttttaggtttgaccaagtttatacaaaaatttagcatcatctacaacaccaaattagtttcattagatataacattgaatatattttgataatatgtttgttttgcgttaaaaatgttgctatatttttctataaacttggtcgaacttaaaaaagtttgactaagaaaaaaatcaaataacttataatatgaaattgagggagtatgtttgatctctggtcttttggttggaaatatctcctatctctggcacattgtctcattaatttcatttcaggttagttgctggtataaacaatgcagttgttgttgaccaattctatgacaaatcaaactggtgcatcgttcttgagaagctttgaacatgcagctaaaagtgccggggagaaactcatctggagcctgtgcccttgtatctttgtaaggactgccagttgtaggcgagcacggttttgcgctccaaatgtacgaggcctgacacaaaaaaactgcattattgaatttagcatgtcataattctctattcacttgttggtgaagatcacttttgcccgttgtcatcgcgggaatcttcaggttgatcttttcaggattgcccaattagggtcatccggatttgcagaagtttgtacttatgttctcatcgaactggtgaattttgcaggtttgcttgtctctctcttatgagagtatgatgtactgttgtctgatgtatacgctaattggacatttccgccagctttcacgcttttcctgtgtacgcaatacgcccgtaagcgtgttacagacatgttatttccgagtggcaaaattgcatcgtcaggatgcatcacctgcgcaataacgtcttaccaggttgataaactgatccatgaacgtcttaccaagttgataaactgatccatgtacaaagaaaggtaagctatcagaacatgcgcacgagatgcgaacaacaatgagaagcgatacttcagaaacctcaaggttactgacagacagaattgcaggcttgcagctatacgaaagaggagctgaacaaaaaagaaggaaaaaaaagaaacccctatgctgattttacaacacaactatgaaatctacaagactacaagcagcattagccgacgcacaaaagatctcagcattcacataaagaaaactgcgttatgagccaatcaatcgctcgtatctccaaagatactgctatagacagttttagagataaattaattgcattctccgtgctgtcaggcaacgcagagtatgagcttgtaagaactaactgaccgccccatcacgcagcaacttgccaaacgcttaaatttggcttgcttgaagtgtcagttccagaattgtttgcggactccacatctggcttgcttgcagagtttttgctgggtaccgtccggggtttcttgtcagtgttgccaaatgcctccaaagcatccaagaagaactttttatttggaacaataccctgtgagttcatccgtttgagcaacttctgaataagcttcttgtcgtttgctttggtgtaggccttgtaaagcaatttgtatgtggaagcactgggcacagcacctttcttaattacagaatctaacagctgatctgcttccatgggcaagccgttcatgcagtacgcatcaagcattgcgttcactgatgacaggtgtacattattttgtgagctcacaagctcatcgaatatctgtctggcccttgagacacaatcacaatatgcatacatcatgattagacattcttgtgtcacatagttcggtttgaatcccatttcagtcatcttatcaagcacacactctgctttctccctgagtctcgctttcccgtagttggttatcatggaattgaaagttgggtgtgtaggcttctcctttgatcgtagtaagctcttgaacacctgctccatcttatcgaatgcctgctttcgcccgtaagaatctatgagtatgttgaatgtgattacatctggacgacattgattgcttttcatccgtactagcacagattccatctctgtgatcatgccattcttcccgtaagcgtccatgactccattgtaggtatagatatcaggagagacagggctttcatccagatccttaaacaagatgtctagctgttttgtgtcaccagcctgagcaaaagctcttaggagaatgttatatgtcacaatatttggttggcacctatcaatagtcttcatcttttcaaaatagccgagagctttcgccaaagccttgctcttgtctcgcgaatgcaaatgtgtgccgataagagaattatacactgaagtgtccggcctacacccactgttccgcatctgagagaacagccacattgccatccgtatctggcctttccttcccatcacagatatcagcttcgaatatatgccgttatcagcaacataccacctttgtttctgcatccatctgaaaacctagcaaaatagaagagcagtaaggaaccagtagatatgtccaacttacaggaacttcaaaattcatctcttgttgatccacatcaacaccctaaaatggcacttatgatagcaatcaggggattagtacacaaaagcaggcatactgctagtcaattgtgatttgagttgggctcataggcaaagattatatgtgacacgaa

SEQ ID NO: 5749 - DNA, 9612 bp, Oryza sativa
ccggtcttgctcgatcagacccctctccttgagaagtttcaccacgagatggcggggcaccagcctcctctcgaggctgtacatgagcagcaccgaccgccgcgcgacgtactgcggctgcagcccgacctcgtcgatcaagaactccgcgttgcggcgcagcctctcctcggacgcgaccaggatccgcggcgccttgctcacggccaggttcacctcctcctgcgaccacccgaggctctccttcaggacggcgaccttggcgtcgatcttgtcctggccgatgcagccggcggtggagagcgcgtgccggaacatctgggagcccggggccacgccgagctggatggcacgccgcacggcgtccttgacgtaatccgggtgcatggtgacaagccgcggcgcggccacgagcagcttggaaatatcacgagcacttagcccgcattccttgaggaaggagacgttgggctcgaccaccttctcgaggtcggaggtgaggagccagtagttccagtcgctggcctggagaagcctctccgatgagccgaagagggggagccagaaccgcaccttggagacgaagctgcggcagaggaagtagcggccggtgatctgggcgaggcgggcgatctgggagggggagaggccgacggcgcggagctccgagcagatgggtgcaagggagcggtcgatgcgggcgcacaggatgcgcgggttggaggcaacaatggccgcgacctccttgggggagaggccgaagtcggcgaggaaggcgaggacggcgtcggggttggagcgggacttgaggtgggcgatgctcttggacgccttgtgggcctgtggctgggtgagattgcagttggagatgaggtattcctcgacagagaagtggttgtcgggcgcggtggtggtggtggtggtggcggaggcggcttcgggcgcggcgcgggagaggagctgcaggcggaggcggcagcgggtggggaggtggacggcggcgaggggagtggaggcgaggaggaggagaggcatgggagcgaggagcatggccgctcccatggccggggaggggagacgtggcggggagagagtgggtgatttttttgaccgaggttgtgtaatccgcagcttgggaggcgcagctccgcaggcgctcgcggtcgcggaggggatgagacgatgagcctagtactccctccacgcccacaaaacaagtcgttctgggctcttagtccgttttcacaaaacaagtcgtcgttcctcagtggggtatagtttggacgcgtatgcccctgatgcgagagccgagtgacgagcggcgaggcaagaaacgaggcgacgtgattaatgccgccttaagctgaatggacgtgattaatggcacacgcacgtcgctcgcacacgctcgccgctcgcacacgcgcgtctctcttccttgccgcccggctgccgagcgccatgatggagtacgtcgagtcgctagagtacgtcaaggcgccggactccgtcgacgcgctggacactgttgacgagggcccaaacgagcaccatgcaaaatcagcaaaaaaaacaagcccaccaggaatcgaacctaggcactaagccttcaaacctcactgcactagctatttgagttctgtttgtttctcaaatgaatgcacccgcaccctcatttaataagggaaaacatgaaagaatagccctgattaatcactccttggtaaccacaattttgttttaaacgacttgttttgtcggtatggagggagtacgctgtacgcccaaacctgtcctgttctttgggccgtaggctccgccctttgcttgtagcggtcgcccatcaacggcctaattggagtccagccaatttgtccggctgttacgctggcttgcggcccgtgcggtcacgatcatttttgcaaaattcagctgtagaatttggtttgcatttggatgttagaaacgtagcagcagtgataattatgttggtttccgcatgtttgattcagcatagaattattgtaatttaaattattagaagtaaactgaaataaacaagtaaattattactccctccgtctcaaaatatatcaacttttacttggataagatgtaccttatatcttatatccagattcatagtactagaatacgtctcatccaaccaaaaattgctatattttaagacggagggaatatgatagattattataatccataagtcagattagtataaacttattatattatagattattggagacatataggacattttttagccacccaacaaaaaatcactacccctatatatctctaataataaaacaaacaaacaactcacaacttattttatatcaacttattataatctagcttacagtaatatgatttaatattctagattataataacattaatctgaaacaaacgtcatcattgtgcactctctggattaacttttcacattctggaagattagtgttgccattgccagcgttaagtgacagtcacagtcgcacagtagcaatggcagcgttgagctttgaattataagttctatgaccacaaatgcatatttcctcgacttcgcttttttttttctcacacacatttgcattttttttaggtccctagcacgaatctcaataaaaatacaattgtcaaaaaattgcaatatctctaacaaaaaatcttgcgatagatgtataacaatttcagtgtttatttgtaggaaaaatactataattgcgttgacatatttttagtggattacagttgattttcatggcgtttgatttgtttaccgtgcaagatacgattcttcagtgcaaactatggaatatatagtgtaaatgcatattgaaaattataattatttttaagaaaagattatatcaacataaatatagtcggtccaaaaaaaatctggcgtttatattgttgtgtatcttcacttttgcactagatcaatttgaaaacttccttccaataacttataaatagatatgagaaagatatttaagtcatgcttgacatagcttcagattttattatacataagaaacacaacggggtgtcagacggtccaagaacatatgcgatattccgtgcagatacgaggagctttttttaaaaagaaaatcccaacaggcgtaaaactctccgaggagccgaaaaaaatcaaaaaaggaggaaatccgtaacattacaactgttaatggctagttatatccacggtaaatctaaagtttgtatgttaaattatagtggtttaaaattttaaaaaacacctaaaataaaaacgaaataacttatccaaatattatatatcgacgtgattatagctttatcgatgatttatcaagtatttgtgatgttaagaatactcaatttaaaaaatcttggatcgggagatgcgtcaaaagagagcctcaatgtttgatatcaatttcaaaatcttcctggcggcccttctttccttatttattttttttagaaaaaaagaaaacaagcttcctggccgccgaacgcatgcagacgtgccctttgaggctggcgtgttcggaaccccttctcccaaccctctcgctagttctctgcgcttatgtttttcaaactgctaaacggtatgtttttttgcaaaaagtttatatgaaaattgtttaaaaaaattaaattaatctattttttttaaaaaaatagctaatacttaattaatcacgcgctaatagactgctccgttttttgtgcggagagaacgagttcccatcctggagatgcaaacacaacctgagacttaatcgagtgcgtgcttatttacttcgctaggctacgacgaaatcacgaaaacccacctactcaatgtatgataatcgaattaacaatcttcatggccaccgaacacatgcaaacgtgcccaatgagacttttgatcaagtgcttacgtgccccaccagggtacaacgaaatacggatgtgtgtctgctcaaggtcaatttccgcgttgattagtcagttcgttaacaacatcgactactctataattaagttaatgattgggtaaagacgcaggaaacggatgcgcatgtctgggaaggactagttcaagatgtcgtcgtcagtcagtcaatttcaaaatcttcctggctatacatttttttagtggctggtccaaaggctggacaacgtcgccacagcagcatgcatacatacatacaactacagcacaaacaaaacacgcagcgagaggcccgacaatcaactcacgccatttttaacatttttcacgccgcggctgctggagaacgattcgctagttccgtgggacaataggtgggctgcagggcggtatatagaatagtcatcagtcgtcagattcatgcatgggtgcgttgcgtttcctataaatacatttggccagatggccatctgcaaatcagcagcttacggcactagttagctactgtgcaagaaccaaacagttaatcgcatacagaatctcaattagctctgtgtttcttacccttggattggcgattgaattgtgtgcgttcggcgatgggaacagccaagttacctgcattgctttggttactagcaggcgtggtgttagcacttgcagttaaccccgctcatggcgccaagactcgccactacgatttcttcgtaagtgatctacttgaattctagcgtgttcactgatggatgccgatgtacaggcatgaatgcacgaaatgagttttgagttttaaccatgcgtgatgccccccctgcagattacggagaccaactacacgaggctctgccacgagaagagcatcctcaccgtgaacgggcagttccccggcccgaccatctacgcgcgcaagggcgacctcgtcatcgtcaacgtccacaacaacgggaacaaaaacatcaccatccactggtaaaccacatccgttttgccacctgctgcagagaagaagagcattatccttggctcgaaacttacggtgttctcgatgattttactgtggcgcaggcacggcgtggaccagccacggaacccgtggtcggacgggccggagttcatcacgcagtgcccgatccggccgggcggcaacttcacctaccaggtgatcctgtccgaggaggagggcacactgtggtggcacgcgcacagtgacttcgaccgcgccaccgtccacggcgccatcgtcatccaccccaagcgcggcaccaccttccccttcaagaagccagacaaggagatacccgtcatccttggtatacacaagccacaacaaactaatcttgttaatttgataatgttccattgcgcaatgcaatgcttcgtacgtgttttgatcttaaccatctctatgatgttctgcaggtgagtggtggaatgacgacatagagcacgtgctcgacaaggcgcagctcctcggcggagacgtggatccgtccaacgccaacaccatcaacgcccagcctggggacatgttcccctgctccagggacgacacgttcaaagtggccgtgcagcagggcaacacgtacctgcttaggatcatcaacgctggactcaccaacgacatgttcttcgccatcgcggggcaccgcctcaccgtggtcgggatcgacgcccgctacaccaagccgctcacagtcgactacatcatgatcgcgcctggccagaccatggacgtgctcctcgaggccaaacgcaccttgggatccaacagccggtattacatggccgcgagaacgtttatcacgttaccgctcgacactatccctttcaacaatagcactgccacggctatcgtggagtacacggacagcgtcaccgcgaggccggtcgggccaccggaattccccgtccagctgccggccatcaaggatgagaacgcggcgatggcgttcgtcacgcagctcagatcattaggcaaccaggaacacccggtgcacgtaccgacacatgtcgatgagcacatgctcatcgacattgacatcaacgttcttccctgcgaccccaccaacatggcagagaagtgcaaagaaggaccccaaggcaaccggttcgcggcgagcctcaacaatgttagcttccagagcccggctatcgacgtcctcgacgcctactactatagctctggccacggcgtgtacgaggaggacttccccaacaagccgacagccttcgtcgacccgcccgtcaacaacggcagtgggcccttgatgacgaagcgtggcaccaaggtgaaggtgctggagtacggcactgtggtagaggtggtgtttcatgacttgtccagcgagaaccaccctatgcatctgcatggcttcgccttctacgtcgtgggacgagggaacggcaccttcgacgagagcagggacccggcgacctacaacctcgttgacccgccgttccagaacacggtctctgtgcccaggtccggctgggccgcaatccgcttccgagcagacaatccaggtgagagttattcagatttcggattatggtctttgatattggtctttatgtacagtttttaatatttttttcgtgtttattttgattgttcaggtgtgtggttcatgcattgccattttgatcgccacgtggtgtgggggatggacactgtgttcatcgtgaaggacggcaagacaccgcaggctcagatgctgcctcgtcctccaaacatgcctcagtgctaatgaccgtggttcaaggaaaataacaagagcatgcatcacaagcaagcggaaatttgtttattttgttgattgatttagtggtttatattttttccttgtttcgatgaaaaggaagaacgcattctgtcttgacttgtaattgttagtcatttcgttctgtcatgtaagtttgggattttatgaatataactaaataatgtttatgtagtggatcgttattatgacgtctttctttataaacacacacatccttgctatcttatctatgacattgtgttacagtactgttttagtttttcgcaaggtggtgtccttcccttcgcttagggtaggatgaaaagctcgtagctcattagctcgctcggctcggatcgttgtatttttgtaatgagtcgagccaacgttttagctcgttagttataagaaaaaaggacaagaaaaaggcccatcttctgtaccctttttttagaactttttctatcgtagttggagttgtctccagtacgttccccaatcccctcgatctattgctgctctctctcctctagttgtctctagccggtcacacactccacccgttgctccaccatgcctgtgcctcaccttcaccggtggccatcgtcttcataggccagctggccgcccgtagaagcaggagctcgtcgagcactcaacactatccacagcacacacctaaccacatttctcctgctccaactttgttgtgatttgtgaccttgccggtgtgccatatgccgccaccttggcaaggcaaatagataactccccatctcctttcgttgcattgccggcatcacctcccatccgcgtgtgttcattcgtcgcccgaggagtacgtcgctccgacgaggtccagccagcaccgccgcgccatagccatgtggccctcctcctgctcgatttgttggtcgtcgtggagtccactgctccgacgaggtctggccggcgctgctatgtggtgctccttcttgactcgtcggccatggagtccgtcgttcgctcgcccttccagatccagctcagctctgggcatgcgtcgtccaaatctagctcgcgagctaaacgagctggctcaagcttacaattgacccgagccgagacagacttttagctcgttaggatagcgagccgagccgagccagctcgttatcttaacgagctagagcgagccgagccgagccagctcgatatccacccctaccttcgcttagtctcacaaggttttttgtttttaactagtcactacctcttgtactataattgctaaaccaagtgagaagaaaataatgacacaattgaacaatcttactatcaaatagctactccatcatttttaatatatcacaccgttgactttttaagacacgtttgaccatttattttattagaaaaaatgtataattatcatttattttgtttgtgcttgatttatcacaggtcctgtaagtattatgtacaaaattatatattcgaagaaaaaaaatacgacgaacgaccaaacgtttgtcaaaagtcaatggcatcatgtattaaaaaacatagatggtacattataagtacatttctatttttaagacaacttcttaatattttgtttgtcttgaaataaaaaaaagcctatgcttctaccactttattgtgagctacatagctccgaaagcatatcctagaactagcgaacgcttagttatgttaaagattcggtcaaaaattaaaaattttgcatatcaatgtgagttatttctcaaatgcttagtttagaaaacaaaataaattatacatgtggattttcctaaaaagtattatcataacatatcacacatctattagattttacacttttattctaatgtgaaattgattgtcgaaattttttaaaaaactgaacagccttttcccttaaaccttaaatatctacccactccgttccaaaacataaacatttttaggattcaaattttgtatataggagggtaatccaaacaattgaaaattcaaaatttgactactgagataactatttcccttatctttaatatttactaaacaaccttaaaataccgatacacatgatgaatctcttggccaatccagtctcaaatcttccttttaaaatacatcatacgatactttatcttttgcattgctattttgttcgaaaaaaagttaaacacaatgtaattatttaattcaaaaaaaataaatataatgtataacagataaaaacatcaaccaattgtatttgcaatttgattttggtattttggaacattcatgcttattttggacatttggattgaatatttctttccactatgcccacttatgaggttgctacaaaagctagaatgccataagcaaatattatctgtccaaagtctcttggcgaaattttcgaaaaactgaaaaacctaacataaaatctttatgacaccttgaaaattgtagccaatttatttcttacgtagtaaaggactttgtaattatttttaagataagttaaaacggctcattactgtaatgggatggtttcattgagtctaattgaaattattgtgtttatgtataaagacaaatactgttgatgggtacatgacgtgatttcataggaagaattcttgttgtccacctccttcgacatgaaaatttgatgacatcaattattaaaatttgtattcatcaaatattatgtcacgtggattgctgtaccagtgctttaaaatgggttgaatatgagagggaaagaaacaccatgctcctgtttattttatttggactatattatacagccctccctatatcctaaaatatatccgcactaatattttagggtgaactattatattttagaatgaaggaattacttttactcaaaaaaag

SEQ ID NO: 5750 - DNA, 12979 bp, Oryza sativa
ttacaacactttacataggaatgctaacgaaaactcaataatgatggcatttctaaggcaaaaacgcttgtacttagaaagttaagtttatcgatgacatttattagattttctctaaaataattagattgtgcttctcaagcgcatgaaatgcttagcagacgcaatggatttggaggtggttccggttggaaaccggatcctctgagggacgtccgaccatgctgattcgttcgatcggcatcggacgggagcgatggaacacaggaacgaacaagctaagctgtcgcggcccacgtaagaaaaatcggcccacgaagaggcttgactgccgtccgcccgtctccactctcgacacagccggagcgccgctggaaggggaagagaaggcaagcgctgccagtcgagctccggtgtgaggaggtcgcaggagtcccgggttgaagtggccttggctttgtccggatcttccctgcgctccccggcagagctcgcgcgcacggccgcatgtggtgaccaaggcgaaggttccgaaagcttgtgttctcgacgctgctggccctcggattatattggggcgctggagatgcaggtgtgctccatggcaaagctcacgaaggcgctccctccgtggcactcccgccgccggcgccgtcggcggcggcaatgttgtcatctccagttccaagcaaggaaaggactcgtatatgtatctgtgcatctcttttttagggtattactgtgttaatgagcaaatcgatggtgaaaagcatccataaccagttaacaatgctagtgttcctttttaattagtttagtcatgaatgatttttgtttaacggcaagctcgtggcttctgcagcaaaagcaagaacgagagtattcacacgcttcttttagacgtatgttcccgaatgaaatcgaccgggctgatttttgccggcggtaggcgccgctctagcatgtccgttaaccgatcctttcgcgcaatctggtctggcatgtggcgtaccaactaccaagtcagtagccagtagacaggtcacgaagtactgaagtactccctccatcccacgaaaaaccaacctacgtcccacgaaaaaccaacctagtactataatgtaacacattctaatactacgaattagacatatatctgtttagatttattgtactagatatgtcacttttttttcggactgagggagtagaaagaaaggcacacataaatagcccgccagcttgcgcttagttatagtgctcgctccaaccactttatggaatagataaaaatagaatttcaaaaagattagatctatacacttaaatcatctgttactaccaacgagaatatacaccctaagctcttcccgtgcaaaaaatcacacaagggcatggtgacaataccataagcttaacaaatgaacaaaagaattatcacatgaacatgaaacaattctcttagggcgtgaattcactctactcgaaagtcgcagcatcatttactgtccaagcttgctccatatgcctttccgtgctgttaggcacttcaatttgccaaacacaaaaccagacttttgagggttcccgtctacaagagagttctcgtatatttccttgcactcttgtacaacctaagaacgaggaatgaacagtgaacacgtaattatcaattaaaaaattctgactaacagtttttctaatcactttcaaaaggcataatttgaccactggaataggtctaatttgcactgtttcgcacaaaattgaaccgcacatgcatatgatgtgaaaaatgttatgttcttacctctttggcttccttccttggaatgccttccctcattcccacaagcttctcaacaacctcaggctacataacgtagatatcaagttcagcacatcaacagaaatgaatgcactactaaaccactaatttctggcaaaatcgagtagcttgttgaaaaaattaccgggcaatctggttgatgttccagaatatttgtataaatgagagtaaaactatccagactctcagctgaagcaagctcccttagatcagccagaatccgcactctggtttcaactttctggagcacaaaatcatagagtggttaaagttacagaaccaacaaataagcatttgtgaagaaaagtctaggattacagatgttcgatgctaaaattgtaaaatccagtttaattatacaatagcacaaaatacatggtatcgtgggtagcttggactttgaatgaaagccacatgaatggaagttgcaagtatacttactgtcacattaatgtgttctctgaaaaaatccataagcacttcttcatcaagcctcatcctttcgattgtttcttcttttatatggcctttctggaggtgcaaagggaatacatattatcaatttgaaataaattaccagccagcagctgcataagataagtagacatgtagtgtgaaatgatgggtgtaattggtaaaaagattgtctgacccagcaacagctcagtacagaatgatttatgaaacattttccaattcatatttttgttaacagtcatttttgtacagagaaccacaactggccaagtatacaactattcagtactaagggcagttctgcaaacctgagtaaggagatgatcaacgtataccacaattgtttgctccaggcaagcctccacaaatcttcgaaatgatctttcttcaatatatctagaaaaaatagacccggaagtcttcaaatcaagtatagaaagaaacatgactaactattatcaggaataagtgaccgtttacatgccacaaggaacacaaatgatctacaaaaggttaagaatagaacttatataacaaagaaaaaaaagtaaaaagtgtacgtaaaaattgcattggagctacctatgtttatatactttttgagaattctcacttgcatttggaaaattatcaatttacacattttcactatttggcaaacaatgtatgaaaatggttcatgcttgagatttggggttgagatttttcacgtcgtggcacacaatttgataggatgagattttctcaaaatgtgtagagtatcatatattcataatgaagacataggcaaataaaataaacataagtcagcatttcttagggaatgtatccttccgttccataccacttatattcaattatatgagaacttactgtttgacatccccaaaataatcagcaaatgttgcgacaagatattctgtaaccattccttccatccaatctgaataaataaaaagaatcaatgttagaaaagagagagagagagagactcacgaaaaaaaacacttgtgcacactacccattaaggttaaacactcaggaacacactgtaaacaagaaaagactagtacataaaatatataaacagtgttgtatatgatccttggtacatcaaaatctaatatatcagtttcaccaaatcacacatcggtgatggctatacttggtcctaagcacaaatttaattgtgtaagcatacatgttagaaaattctgggtgcctttctgggcttgtcgataagactctcacaagggaacaggagtcgctggtgctttcaattccaaatctaatcaagaacatgacacaaacaacagaagaaatgacagtttggaactaatattgcaaaagaattacctttttggtaaactttcactagtagatcctgtacacctgggtcttcaaaaataacgctgacagtttgaaggactgcctcctgttgaaataaccaaaattctagttaacaattaccttttatagtctaaagatgtagctaaatcaaataaaattgctcgaaagaaagccaaacttggctagttctcaggacattcctggaaagttgagttcattggtgcccaataccagttgtcagataatactggataaaattggctagaaattagcatcaactaccttgaactaaccagctccgtgctcacttaactattcaagtattgagctggcttttctacagtcttggaaaatattatgctggattcactaggtggtgctgaaagagtgtttctgacaagtgtcaacctccctgcttttgtcagtgtttcagtttctgtataatccaagcatctctaaccaggaattttggcctcaagatcatgaagtgcacagtcagatgtgtaacatgcacagagttagccaatactttctagaagcaaagtaaatcacaacttgcccataagagaaactacaaactttattgaacactagctatgcccgagctttgctaccgataaaaatatattataatattacctaaaataaaatgtcttacctatcattttgctatagggaatattcaccttattttgactttatatgtgactatccatttagattaaattgatttttaatactaagaaattcaaggggtaatttgcaaaactacaatgggagtaggtggggtggcagattcactgccagtctaaccatcaccactaccttcttttaaagtactatagagtatagatataaattacttaaaagatgccttatctataggtaatgacaatatatgcaattaaggcatccttgtatagtaaaccctgggcacctcaagaaacacttacgcagtggtcagcacatgaggtttcatttcttaaacctaagcaaatgaatcatacacatgtactacatccgtcccaaaataattgtaattctaggttgtttagcataaattaaggtttgagaaaaaaggctattataccctcactaaatggtgtataggtaagaattggagggtagttgagagtagaatagggagaaatttaaatgagaagcaattgatgagataattagtactctattgtgacaattattttgggacaaatttgtatcctagaaatataattattatgggacggaggtagtaacagttatgtcttatgcttgtaagatgtagaacaaaccttggcaacctcaagaaatcctttgcaggtatcttcaaaattaacctgtaaaacagaaattttgctttgccgtgaagagctttaaaatgcttaagtgtgtaactgcaaaggacaaactgcagaaaaacacatctttaacctatgtcaatgccaaagtctctatgtattctacatttctacaacctgtaatatgcttggctctcagcagatatttatccacccagtttgctcaatcaattcaaactatggactcatcaacagcaaaactgattccaggcgaagtcacaataggcaaaaagggaatgtgtgtatttcggacgcatctgcatttatgtaggttgtaggataccacaatagaggcatgattttacaagttttggtcaacgaagtaggaaatattttacctccagttttagttcattttatatccatgcacaaagaccaaggaactttagtttttttttacgtagattgcctctattcattacccatctctctaaaagtactgacaaaaggctatcaataggactgtttggtcaaaatgtagcctagaaaacacagaacttcaattgcaaaccaatgcttcctaaaatgtcctttagactggagatccatccctccctttctctctgctgagaagttagaagtagctgacagaatggaatctaaggagcaatattagtgactcattcgcacctgctcagcatagttttgtggaagcgcttccaatgtactgctacttagctctgatgaaagttcgtagcaacgcaggttgttgttaatctgctcaacaaattttatgtcaaatgatatgaaattaaagtagcagggaactcacatgcagtccttaatcgagaaaaatttacataccaatgcacatagagattccaagccaacatcagaagctggttcctcaagtctttgcctctcagctgcttgaaaatcaagcatgacctatattataaaggaaacaaagaagatgaatttggcatctttcagtaattcatgtcaacagcaaagcgtaacaaaaccatgtaaagaacatcatcatgaagggttaactgtgtaaatacctgtataactgcaagagcaatacgatacagcatgacatctgtgctattttctgtaacaatctgcacttgctcagtcaatattctgaacaaatccacagctgcaggtgtatatagtttcccatcctctgtactttttggtggttgtgttttgtcagcctccaaaatgttactgtaccatttctacaggagcaaacgagtgaagttacacaaataataatgattaagttcaaaatgaattcaacagatcaaaaggagtaccttagttgttgcttgcatacgttcgacatacatattcatgaggggatccaatgcaccactttctgaacaaacttgggcaagagactcgtccacaccaagaccgataagattttcttggtatttcacaacccaacctgttacctacagtgaccattcatttaatgattttgcaatatacgagaaagcaaaccaaacaagtgatattcatgaatcaaggaaaacaaaatgctgacaatgcttgcggttttcacatttcatcttgtggaaagtaaatttagcagaataaaacgatggcatttgaattcatataccttaagaatatttatatttggaatatcatttgctctatcactgagaagtcttagcatctggatgaacctttcagtatacaggtttaccatgagctggaaaatttcatatctgtatagaaacaaaaaaaaacatgagactgaaagaagttagtgggatatgaagaaacagctaggtatctttctgcaaatcaccatttctaaggagtaagtatagcccccatgtcccaaaagaaatagcaattgatgatatatcaaaatgaaatgagaaaaagcaaagtatcatattcttcatccgataagtttcattaagcaatacataatttgtgtatgagctgatgtatttaaagttagaacatgacaaattatgtcacgttcccatctattggattaggatggcatatagtgtggcccatcataggagataatctgtatctttgtattgctacagtaaacagatcctcagttcttgtgtacacagaataaatggttgtgaagatcttctaaggataagtatttcatataataattatcaacatacctaggaggaaaacatggtgcaacatagtcatagatatcaccaagctcatctccaatctgaattgcattaggaatagaagaatgacccatatcagttagataattcagttaatcaagataagtgtgtcctacagaaatagcagctattctttgccaggttgcaaattgaagaacaagaagggttaagatgtactaatggaatactaattgctactaataactaaaagaaagaaaagaaacaatgtcaatcgatacttcaccgagtcataaacaacagtactgtgggttccatcgcgtatcaaccacatcagccattttcttttcaatttgttagacaatatcaagttgagaacaatggatagaacaagcattggccacgaagctagagcaccaagacaatctaaggagtctagaattcttcatatgcgtttgtattatagcaagtgcaaaaacaacagagtacttactgccttagcttcctccaaagcttccatcaaatcttctgagaaaacaagctgtgcaataaaaaaaatcagctacttgctgctaactgcatggactgtgatgaccacacaataaaatcttaagtccaggatatatttaagcactacctcggtgagcagtttgtcgaagcgagcctcaacagccttcctgatatactcatagcatttgtccttgtagccctttccctggacctttgatttatcttgagtgcttcttggggtagatgttgctcctccacctttcctgctacagttgggcaaggatgagtcagaactatgagcagtcagtataataaataaaatggtttaataattactatttgagtggttctcacattggttgttggttgataatagatatctagagataatttgaataaaacaacagttatacaagtcatcatgacaatagtaaagcaattcatgcagaccatagcagacaaccaagttagttacacccatagtcccgtacaatagcttgaatttgttgatctggtagccagtctctggtattaaagatattatatatgaaaagcatgatgtaaaaactttaatgccacctttacaggtgcgcagatgcacagatgctgatatggacaagaagtgcgttagtactcatatcttcagtacagttatatcagcatgaaagtaaagggacatgacaaattttgtatcctaggatacattatttctttgatcctctgaaacatgaaagatataatatcaatatatcatactacctagcacctactggaagtacagaaacatgtgtgaagcaaagaaaggaagaagcatactttgcagttctacgctggtttgctattgtcgccatagcacctgcaccctcagcctcagctgcttcttctgcaacttgttgatctaggatctcttgcatttcaacaaccctaacataagaatgaatttaaggattatgtgcaagatatataagtgcccattacctagaaactaaataagaaaaaagaatcaagccaattttctaaatctcaaatgatcagcttgtatttatgtattatttccctaataaatcaataaatagtctttcattcaacaagtgaactgaaagggaggaagccagggggaataattgctccacagaagaaattgatgggcaacaagtatcaaactatgagctggtccaaacattcagctttcacaattgactgtacaaaatgatcaaagtagatattaaatagttcatgcataccttattgctcgaactaacgtctgagggctgcacaaagaaaaaagatagtgagtttaatacaggagcatttgtagcagatatgcgttaaatagaaaggcagtgcaattcatataaaaacaataagacaattcattcatttaccatgttaaatagcaaagacaaagtgaatcgtaataaaaggcagtacctatcttttgaaagtctgaaaaagttagtgacatggccccacaatgctttctcaaatgtttcccatgaacgatcaacatcttcaaagtactctctgtggagaagacaataatcaagcaaattatagatatatacttcattgcactacaaactagaagaaagattaaaatcccttgttaaccctaacagtatttgctatcatactgtaatatgtagagaagatcatttctgcatttcttccttaagagtcattgagccattatataccttgttctattttggatcttctacagtcgtttcataatatagtagaatcaacataggatcataagtctgattttcttcagataattttctgattgcagtagtattacttctgctcagaatgctttacattattctaacgagaaagacaatggggacgttaaagggtgggggcgtgggggggggggaggaggcaggtatgcattgaataatcattaatattagctagtttcaggggagaaacaccacctcaatcgaccaacttcttccttgtgagatgcagcagcagctaaagcaaaacgtctctttccatcaagagctgttaatctctaatttcaacaaataagatcaaacagcaaagtcaggcaagtaggatataactatgatcaattcctgatttaaaaaaagagctataatatcaatcatggtattgatcagtgatccaaagagggaaaaatagaacctcataagtgcgaattaactctttatcatcacttagcgagtcgcgtgctgcagctgcttcaacagaaatagacatcatacctcccacatcctaataggcattgacaatcaacatgtcagatgaaattttcgtgctcgataacttggttagcttaatgtattgataagaacgttagtaaaaaacaagcaagtacaaccttaatacagttgttattgctaaagtaaggtcagcacacctttaaagttgtgttcaggttatttcttgcgttgctaagaagcttaatcttgtcgtggttctcaattaatgtttgacactcctggcacaacctgccagacatttatgataaacaggactgagaaatgaggagaaacatataacctcaaggaagtgatctagcatatcaatcatgcaagagcataagaaaatgtagagataaaaatattttagcttacttgtctatatctatgaagttctcgcgtagtttgtttattgtttcctgagatagtgcaagagcattgatgccagcatgggcttgctcaacctataagtgataaaatatgcacatacagaaaaactataatccaacagacaaacattgaggggggaatgcaaatgatagtagcagaaaccgtaactcgagcaaagcattaacaatagcattaaaactaataagtttggcagttcatagtagatgtcaaggaatacctgctctgctaccattgtactgagctgtgcatcatttgtctgagaatttatagaagacagttagaaatccagaggtatataatatgcatatgccaatatatgctttacaaaatggtaaacatgctcataatatctcactgaagataatatgcatatgccaatatatgcattacaaaatgggtgtgagcacatacgcacatacacttagccatgttttataatttacttgcatgtctacatttaagcttgccgaacatcccagccatatctgagaactgagacaactctgcccaaacctttttaagaaatgcccaatcaagtctaacacaaacctttgcttaattagtatgttttgaaaccctttggtaagagataacaaccatcaagaatgtgaggaacaatagcattgagataaaccgtcgacataggaccaaaaaggctaaaaacaaatcctggagtacactgtacaaagctacacgcaagtgtggagtaatcaataaggagaaactaagccttgttgtgatcagcaggatgtttgaggatagatgcacgcattagatggtcaaatgtcatttagctttggaagaagtccagcaatcaattttattgtaaacgcaaggattgaaatctcttcccttgaatattcattctgatttgctataattatggtgacaaattttttcacaaaacacagttgaattttcagctttaggatggtatagagatttgtgtttgctgagcattcacgcatgcgttttacttcttttcttggcttcctttctcgaaacttgctcgtgcctcctgagccttctaacatttctgccagtctaccaaacatgcatgttgatatgaccgattgatcagtattcattattcatcattatcatgatgagaaacgaagaggatcaccagtagccactatatctattacaccgtaattacatactacttacatatcaattacatcttagttacactataattaattcctacttacatttgtatttttttgttgtatgtgactgtaaaaacaatttgactgttttttgatgaaaaatatggcaccacaattataggtatgccttaggataaaagtagcaagtgggcccactgaaaaacgtaagtaaaaggaaataatagaaaaggtctaaaccatgccatctccttgtttttttttccctggttcttctctctactatccttatctgtatactaaagtttaattttcaaaccatatgaatagtaacgaatttgcttgcacagtaactgctgatatgaacattagaccaggaatagctaatctgcatagatgctgcatataatccatcagggttcaccgagcaacacaattttttagcactttgcatctgcaacttagccaccacaaaattctgagggtagcaaagtattttcagaaaccatggaaaattttattagaattcgacggaagtctcagggacaactatatcacgggtaccggatcaggatttccgcacacctcaccacttcacaggcacagtactacaatttgtgattgcactgatcagcaacgaatttgaaccagcctaattttcaagcatttcaccgtaacaaacaaataactacctgatgctggttaatctaagtgctagaagctgagagataggatcctgccgcgacccacaccactaaattgcagccacatcacaagcgacgcatcagagctcagagcgaaaaacaaatcagttcaatgcgacaggtcactcagaaggagaatggagatgactatcagagttcgccgaatctatcaaccaaacacttcagaaattccgctacgtttggcgcgaatcgggtttcgagggagggatcacatcacctgctgccgcgcgaggtagtcggatttgatggaggcaatggaggagaggagctccgggagcgggagcagcttcgccacctcgcgcacgggcgcctccttcgcctcgatgcccagatcctccatgacagcacggccgcggccgacgccaaccgctgccccgcgcccccggcctgccgctgcagaggcgcacgaaaccgaggcggcgggtgagtgctcggcggggtgggaggaggaggaggaggagggcgcggcgcggcgaggcggggatgggagacggagatcgtgaagatggcgtggtgttttgtttcgtcggaccccggtggttgatgactagcggagcggggagaagagaagcgaacgggtgcgagtcgtgtgcgtgaccgtgtgagatctgacgggttctttcgagagaaacgttacgcgctgcagaataatattcactcatccgaaagaaatactatctactattagaagtcctttttaagagaaaatcactcaactttttttgagtaaaagtaattccttcattctaaaatataataattcaccctaaaatattagtgtggatataaattaggaatagggagggctgtgtaatatagttcaaataaaataacaggagcatggtgtt

SEQ ID NO: 5751 - DNA, 19321 bp, Oryza sativa
  unsure (1)..(19321): unsure at all n locations
tccacacccctgcatcgctcaatcaaatcacgcagatgattgagatttaaatgcacctgtcacgaaaacacgagaatgagaaaattaaataaactcgccgtacttgtcatggagcattttaggttcctctatgatttttttttttaaaaaaaacgggggttggggttggagtccccgtcaagggaggacgcggttaaccagcagagcacaagaaatgccagtttactgccgctttcgtccgcttctgcgagctcctccgctaccacgtctgcatcagattgacttcacggtttttaaaaatgcccaatcgtcctaacgatcattgggcgtgcgaaccggttttgttagttagttagctccgcctaatgaaatcactaaccaaaccgccctctcttttgtttagttagctcgcatcgatgtggtggtgccaagtagacatgggctaagcactatgccgttttgcaaattgctgctggtgctgctgagatggtggctagagaacggcactgtggttaagatcaaagcatttcactagatgtagtgggcgtctccctttactttccacccatctcctctccttttctttctctggggcttcgggtgctcgttgattgcacagtccccgggttattttagaggcgaacaaggtcacgttctagagttcgttttctgcacgcacactatgagctgtactttttggacggacatgcatggagtacatgctcctcttctctctctctacctcgcttccctgcctgctttattcttgcttcgttttggttcttttttcccttattagactccagcactttcgttttttcgaaaagaaaaagttgacggcagcagttgggtcaatatcgtttcgatggtggatattatggttatccgtcagttcgacgggcgggcaacggtcgtactcgtacactgtcaagcaatagctcaaagatcaatcgtaccctgctgcgcccttttggaaatgaacacggccgtctttgcacgtgctactgcgatgttttactcaggagatcacaaagacaactctaaactcagtttttttaaggtctaaaaattactgtataattaaagatttaagagatctttatattacctgtcatatggtgggggttcttttagccatacatgcacatcatatttatgcgcatcatgaaaccatgaatgtaccccttattctaagcaccagggtcgtaaacaatggtgcacatcaccatttcagagagaatgctacataatgtttttttctcatgattatgtgaagtataaagaaagaggagagaaatagatatcatacttattaatatatagaaatatactccctccgtttcatattataagacgttttgactttgataaaagtcaaattgtttcgagtttgattaagtttatagacaaatagtaatatttatactaacaaattagtttcatcaaatcactaattgaatatattttcataataaatttttcttggtttgaaaatattactatttttctataaacttggtcaaacttaaagcagtttgactttgactaaagtcaaaacgtattataacctgaaacgggagtagatagtagtcatttaaacaattttttgtgtcctgcaataaatagcttaaccaagcattaaaataaaacggtgcaaaagaagattccaatggtttttaaaggaattgtttgttaggtaagaactaggatgtggatctttagtttggcatataccgactatataaagaagcaattgctgtaaaagaagtgattgcacggtttggtagccaaatagggctgattgtgttgagtgagcatcaaagaggttttagcgtatgaaacaatacacatagagcagcagaggcatgtggcttttacaaagaaatcaaaacagagcagcactgtttatatatgccaagttcatctgtaagtcgcctccctgatgaatgttcacatgccaattactagaggtgggcgttcggtctacccgaaaatttcgatctcggtcttcggtttttcggtcaattcggtttttgaaaagtcaggaccgaatttcatccaaaaaaatcaagaccgataaatccggtctcggttttttcggtctcggtctcgatcagaccgaattcggaggagccgagccagagggcggagacgacgctggcgacgtcgaggcggagggcggagacgacaccggcgatgtggaggaggagggcgaaggtggcggtgcggcccgatggatccggcagtcggcggtccacgcgaccggcgaggcggcgtggaggcggagggcagagacgtcgccggcgatgtggaggcggagggcggaggtggcagcgtggcgcgatggatctggcggccagcggcccgcgcgatcggcgaggcagcgtgaaggcgaacacggcgccgacgatgtggagggcggagggcggaggtggtggcgcggcgtgatgaatccggtggcccggcgcgaccgacgaggcggcgtggaggcggagggcggagtcggcgccgacgatgtggaggcggcggcgcggcgcgacgcgatggaggcagaggaggtgtgctcacacgggatggaagggagggcggcgcgatggggatggggatggaagggagggcggcgcgatggctggatggatggggatgcagcctgtgggttgtctctagggtttagtggtgtactgggcctcctggacctattgggccacaatttgattttctcggttaattcgattaaccgagcccaataaccgaattacccgaacaaatttcggtctttgacatgttgagaccgaattactacccgaatttctcggtctcggtcttttcggttcggttctttggttcggtcttattttgcccacccctaccaattaccataatccattttttcaataggtaataatcgatggttcaattgatatcgcccaatataatttgttaccactgtcccttttttaaattgttccaggagtatgacatttggttattatttgttagattgttccagaagaaaacatcatcttctcttgaaggaattaataaccgtccaatacaaccaactaagacaaaaattaacacatttctgttttgctttatgaggcctagtggtaatgggacccactgcttactccaaaggggaaaattaaataagctaccgtgatcgcgatcgatggaaatgcattgtaatttttgcaaacccgaacgacgaagtaagcgcccatggatccatccgtctcctgattgggacataattaagaagaaaacttggttatgatacaaaacttacaaaaagggaccacttgaaaaaaaaaataacatactgatatctgatccaattctttaggctgtgctttgtacggggtttggaggagatcaaaatttgaatatcaagcacatagattttacttcatatatataaacactgctaatctcaggaacaaattagtaaacacagggaaacatgttgattcaatgataaagtcatgggtacatggctcgacttgatagagttcaatcttgatgactataaatattacatacatatgtgtgtgttttgaatagaaatttaatgagcctagagttttttggaattttcttggaatattatgcataaacgtgtacctttgggtttttaacgggcctaaagaaatttcaaaatatacgcattgtaaatattttcatccgtttctttaagaattagggagggctgatctccgtctatttaaactgtttgttccagaagctgtgagtgtggtatgtaaaagtataattaaagagcgaaaggtgatatttgtatcattgttctcctttgtttgttgtgttgtgttgcatttcttatctttggcttggcaaaatggcaaggtgcgtgccgtggtatccaccttgtttgacgtctcattgtttagtgtctcgttagatgttgaggtggtgatttgtcagcatagacgtgcagctaacagattttacttgttcgatagaataaacctagaagattacagttggtgcgattaaattagaggactcttatctcctttcacgcaaattaaatatagctactagccaacgctcacgccggccggacaagttgaccgtgtcattgaaggaaaacgtaccatatatacaaaagagaggcgaatttgatgtggatttgttttttatttgaccgtgtgatcttcaatgtatgattggaggagaattcgttaggtctacctcacttttttaagttgcgtttgccaattgtcaattttgacttttagatattgattcatagaaaaatacagcataagaaaggtaaacagcgtggattaattgggctgagttttgggtcaaagggaagaaaaattacctcagggtcaaagggtagagtttggcttgtagagactgataggtcaaaaggtatgattctactggcaaatttttgaagttttcttcagattgcaagttgggtgtacctgcttttgaaaagattatggatcttatagcagagcattgatggtttacatgttagtcctccatccatgtagtcgcaaaaaatatatatttgtgaatactccctccgtactttacgaaagtcgttaggacagcgacacggtctccaaagcacaactttgacttcttatttctataaaaatatttattgaaaagtgatatatgtatacttttatgaaagtatttttcaagacaaatctatttatataatttttatattttcaaactcgacaacttgagagttattcatgatttatatttctaagttttgacttaaacattgccctaaacgactttttttataagtacggagggagtactaaattacagaaacttaatggtaagaattaaatttcagaaactaccatgttttatgtccccacggtctcaccaatatcagaactgcttccctcattagaaagagtaatgacttgctgtcatttagtttttttctattgatatatacaaagtcataaacgttgtaccaattacaagatattcatatctttatgttgatactttattttagtcaaagagtaaacaattcgatcacgactcaaagtattcacgaccagatcgaactggacgcagtagctcattacagtagcggattaaaaaagaagtcgttaggctcactagtcaaatatatagtatgtcaaatttgttacaggacactaaaagtatgtggactttaatacgagaccacctaaagaacgtgtattttttcgtggacattgtaaaatatggtaattagctattagacacccctggattattttattatatccggtcaatatggagagaaagagcgttgaaagtaccattttgcccctaggttgttttggcttgtaaagacgactaccactggttccaactagacccagttcactccccacgcacttgatcctctttgctcgaaccctaggttttggggcaacgatgacggtgcgaaggcgacacggggtcttgacgctggcgtgggcttcatggtcggcgccgtcggcggcacgttcaccacttgtttaggggccttctgtgactccccgtgcggctgccactttgccggcgccatccatgacggcgttcccgtgtcgccacctgctgggcccgccttggcgtctatagcgccgccttttctacccactcgtgggcgaccgataggaaggacgacccactcgtctccatcgctgccacgggggccatcgtccgcttgtgccacgagccgctcgccgtgggacatatgccacactgtcgtcgacacacctaaacctagggtttggaggagaggggattgtgaaactgaacgggcaattggcctgcttcgaacgtgtctcggacgggttaaacaacattggcccaagggcaaacttgccttttatttaagtttctctctccatcttgactggatataataaaattatgcgaagggtgttcatcagctaattactacatgtttgcggtgtctcacaacaaatgccataaactcttagtgtcctatagcaaattttgtctatatagtaatcccttcatccaaaaaatagcttcagttttaacctcttagttatctctactattattataaaaattgaagatgttttcgtcaatactttggtacgtcgtctttatttgtgtttgtttttaagttcgttcgtttttggaaatacataaagagtcatataagaaatccttttaaaaacctcgcatgctaacttcggacgaaaggcggactcctaattgctatataattctcgctagaccataaaagcaacgtatagaatacgatcatcatcccaataaggatcatatcataataaggattccgaattagatatcaatactatcaaaataaaaatcccatatatactttttagaaaaaaaattaacaataatacaattaaaatagccttcacccgttgcaacgcacatgcattttttctagttctaaaataagtttttttatatgctcttatctgtcattatcgttagtccgtaaattaataaattttatttttcaataccccttagagcaagtttaatacaataatatatccaactattagcttaaaaattgaaacatcatctgtagccaacctaactcatacaatagttagttgtagatatgtactacattatttatacataatttacacatctcgcttgcatagtttattggaacccgtgctatagttagttataaatttgtaggccgagttttttctctctcctccacataaatataaacgtgatgtgacaacttgtacaacccgcttattgtactcgctcttacccacctcttatataccactcattaatattgttttttttattaatgaggatcacattggtatttctccgtcaccttatttaattttgcaccacgtagttaaagttattttgtgatggatggagtagtgtcagagtgtgttataagaacattttccaatttctaatgtgcattagtagttttttttttgcatgggtattagcactccctctgtttcatattacgagtcatctagagcaggtacaatagcaggctataagccagctataaacatattttaaagagataaaagaagagagagaagagcatcgggctacagatctgtagccagctgcatcacggactccaagacgtaatgtgtgtatgataggtgggaccaggtattaatagtatagtaagcaactattgtatgaattggctattatattggctatagatgatttggagctagtagtgggctatactattaaactttctcttataatgatgcacatctaatcaatatttttaaaaacatactatcaaaatatattttgaatttagtaaaattaatttggtgttatggatattgttaattttatttataaactaagttaaatttaaagttttactttaaaagaaattaaagtgcgttgtaatatgaaacggatgaagcggtggattagctatagcctataagtcattatgacccccgatacttacgtgcgagctaacacgcacaaaagtcaaaagtcaacacagggagtttgcacgtctcagccgttcgatcccttccgcgtgatagaataatcctatcgagcaggaagagattattagctgggcgcatctcaagtaggacaaacagtctcatcaccaccagcgacgtggcagttttggcaccaatgtcgtcgaccgatttttccccgtcctcctcccccgcgcgcgcgcgactccgacgcgtacccacgtccccgcacgtttctaatttgggcacgaacggcggccgtcgcccacatggtgatggatggatggatggcaacgtacgtcgtttccggtcgtcgacgacgtacgtacgcgtgctagctagctcgccccgatcgacaactggtgaatcgctgtactgtacatttgccagtttgccggccgctccggctgtataaatgacgaccggttcagccgcgacgacgacgacgacgggtgtcgccagcgcgacgatcgcggaagatgacaaggacgagccgtctgcgtacgcgcgcctaagtcggccaagcgcgaacggcgcggctcgctctcgcatgagacgtgccatgacggccgacgtaagtgctaacgtgtgtgggtgaccagtctccacaagccccggtaaacgtaccacgcgcgtactactacgtatcatcatatcgtgaaaccaaaccaacgcgcatggccacacaggcttggggggctctctatcccgatacggcaagttaaccgttccgttcaacaaccacgaacggaacagggtggacggagagatgggtacgtacgggtcgcgcgcgcgcaaagatacaaacgcgtccctttctctctcgcgcgcgcaccacggaaaattgagcggcgcgtttacgggagagaacggcgcgccgagactcggttcgcacttggcatgtacgtaccaccggccggtcagcgtcacccatctgctgctcggccgcgtggttgttagcccatgcgcgcgccgccacgcctacgcggttactcccgatcgccaattaaaccacaggtttctcttacgtgatggtcgagctaggtggaattagatggatatatatccggccggccgtacgcatgcgtgcatgcaccgttggatcactgtacgtacagtgtacacacactgtgccacgttcgattctgtattcctgcgcgtacgtacgtacgctcccacgttggtgtggccattattgattcttcacgatcgaacagtggcaggaaaggtacgtactactttcttcgcggtcgctgtagtatgattgtctgcgcgcgaccgtggaaactgaaaggcgtacgttccgcgatcgcgaaacatagaagatcagggaaaagcggcggcggcgcgcactcgatcggttggttggctgtttaagcaaagtgaatccctcgatcgatcgatcgcttcttcttctgctcgtacagcccccaaatcgttttcatgacagcgagcgacgcccgaacctgcccaataccggccatctccagcaatttttttttctctcttttggccctttcgatctctctctctctccccctcgcgtctcgccgtgattgggtttggacatggacaactactaactcctcttgtccttttgtttgctccaaaggttccctcgccgtctcgcgcacgtacatgcgagatcaccaatgagccatccatgcaacagggccactaacgacgcggctgtatgagagagtgaatcttgttggaatgaaaaaaaaaaagcgagaaaggcgttgggggcagttaacgctccacaaactccagagctgagggtgacagccataatagagacgatccaggtgatggctttacacgtgttagcttattttcccgaaggaaagagcattgaacagctatctaaccagggcccccttttatttgaaaactcagcacctgtaccttgtagatgaattcacgagttttctttatgttaaaaaagaggggcccgtgtttagttaaccaatggcatgtcacggtagatgtgttcattttgtacttgtgtactagtaattaatccccctgttgtttgatcccacgtgagtactttggctgttatatatgtcacttagcaggagtagtagtacagcaactagcagtattctctgtcttccagcgaattgcatgcatggctaaaatgattacagcagacgttttgccatcacgagttcacgacatatgattactcccactcccactcccacaaccatctctctgcgccagcgctatcacgtagccaacgccgctgcatggcaaaagttgattgctccctgtgcctgacaatgagatgggcaaagaggtacgagccggcccattggttggtgttacgttccctcgtcattgatcccttaggcccatagaattgtggaacctagagtgatttccatgggaacatcgcctctgggtttcaagtttccgcactaacaataatttcccctcgcccaagaaattagaacacgcaagtcacctgaaagtctgatagtaatatggccctgtctattttgcacttggtattgacagcattttggaatatattcattttcaaataagttcaattaagattcatatatttcagatggagatagttagtttacagggactgttttatcttaggtgatgcattgtgcaaactgcgaataattagatagaagagtgcgaggacgaacttaatgggctatatggcgtttggaactgaaaacctttttccgctgggctgtcacggaaggaataatggacttacaggctgtccctggatgatgacatctatgggctatagcttaagctttttgacgtcgtttgtgccgtgataagtctattttgcgtcctgcaactcttgctcctagctgaatcgcatccctcaactacaaaactggatataacgcatccttttatttaaaaatcggtgtaaattgcctccttaggtggtttggaaggtggttttatctgacgtggtagctttgacctagttgactggctaactcaactgtggaccccacctgtcaatgatctactccatcctatcctctcccctctgtctttacttcttcctcctctctcacctcacatcagaaatgcagggggaggctcgtcgggccattgctgtgcgggggaccgtggggtgggggggggnagggtgtttgccactttnttgccaggctaggttggttgctcggtgagggagggagtctctctcagcctgcgactatgcacagagggggaggggggtctcccagccagttcgagttgcgcgggggggagggggtcgacagaccatgggcgagttccagggggaggggttgccgggtgtgcagcgcggtgcaagaggaaggggttcaccgggccgcgccggcgcacgtgggaaggagctcactggcctcatgaaaggtggaaagtcatacatgttttttccatgtttcactgacatgtagggcccactgtaatatggtttttcatatctcacagacatgtgggccctacatgcaaaaaccacttttcaaaccatagaaggagtttatttgcaccggttttagaagataggggatgcgttacaccgggttttgtggtcgagggatgtgcttcaatcaagagcaagagattagggagtagtaataaacttattcctttgtgccgtgtgttgcacacaccgcacaacagctgacctaaataaaaggctttatgggccagccattttagcgtcgaataggcccaaatatcggtcatgggcccaacaaaagcagacccccaagaaacttacagaaaaaccttctcctgttgcctttcaatcattccccaatcaaaaaaagggtaagtttaccatcctttataaagtagaaaatatggtacctctagtactaatactatgtatcttaaggtataaggtataaaaaattttagtataaaatttaggtacctcaagatactttctcaaggattgtaaaattcctcgtcgaaaaaacattatacatgcagcaggagtcatctcctttgtgttcagattttccattgaaaaaaaaatcacgaatattagggatggacctaatatcaaataattaggagtgaggtttcgaacccaggttgtctagcccatcaccttgtggagctagccggaaagcggaaaacccttagacgtttctcgtttaaattttccattgacgagcgattaaatttacgtttttttgcgggtaattaaatttacgttttgccatatgcaggtttcaggtaataccattgtataagctattttgtcttaaaatacggcatggcaatcaatttcctcatggtgattatctataaaatgttatcttttttttgggggggggggggggggcaatcttgttgtgggaatttgtcaatagtaatttccaaacaatattaacacgcatttgtttaagagcaatttcgtcataatgttcacataattgtcaagcaaaattttcaagagtacattgatactcatttttcttccgattatcaatgtataaatgtggacaatcaatactatttctgctacatcacatgaggaattgggctagtggagtagaatcggtagaaccatgatgacgatagaataaggggataaaatgacatgtacattagcatttactggaactttcacagtttcactcgtcgatggcatgcaaaatgcaaattagacaattgccaaggggaattttttgatgtaaaagaggcccttttgctctccaaggagtcattataatgtttacccggggcttggaacgctcaaactatcttgatctcttctgaaaatcctgcgtgacgaacttaaaattcttactggtagttacttgaatgtagcacatgttcctagatcgtcagttgctttggcacatggtacctggtcgatcgtgggccaaaactcaggaaaagaagcacggatggacgggatggtactggtaggagggggcctgtggagaccattggcagatcgggttcatccatccatacgcttttccgggaaaaaacctcgtgacaccaccgaaccaagcatggccgcgacgccaacgccaacccccggtcactgtcgagtcccccgcctagctactcctcccggcacacgctcgcagctcgctcatggaaacgtcgatgtcgacgccgctccatatccggtaaaactctcgagcagatgctcttccgattcagtagcaagccgagttggcgtgcctctgcgtgtgatgatttgatcggtgggtcgcctgctttgcacgctgcaagtcctcctcgtcgggttcacgcatttccctagttcagatggcacatcacagtctcaacagaaccttaattgtctgattgattcctcagggcatggtggaaacagaggacatgcctcatgtacgggtcaagatgcactatgtactatgtgcagtacatgtacgggtacatattgactctcgagcagtacaattcactacacttaatccaataatatctccgtcccaaaataagtgcagccgtggaaatccgtgtccaacgtttgaccatccgtcttatttaaaaaatttatgaatttttttttaaaatagtcacacataaagtactattcatattttatcatctaataacaataaaaatagtaatcataaaatttttttcataaaagacgaacggtcaaatgttgaagatgaatagtgtaaaactgcacttattttgggacggagagagtagcatagattcagagtactactgtaccagggttgctgccatccggactcatactcatggttcagttcggcgcagagcaagtaatggacgaagtcatgcaatacgctgcagaaaaatgcagaattgaaaacgttagaggctgagacgatgttgagaacaaagagtgataaccattcttgttcttcagaacgaagtcgtttcttcaattcttctacacacccagcaccgtagaagaaagcataaataagatcattacagcaaccaatattgttacttcatcagtcctagtatgaaacagtcgtgtaattcccctgtacacgttctacgctaacacaacaccctcaagcatctcacaaaatcacactacagatcccgcaaaaaagctcgagattttcagcaaagcgggcagcgcacgagcccattctcgttgcagtcggggcagcgccggaaggtgtccagctcctcgaggaacaccttgcagctgccggagcactcctcgcacggcacgaaccggacgccgccgcagccggagcacgcgtccagcgcaatgcccttgcccgcggcggccggcggcgccatctcgcagtcgcccagcgccttggacagctccccggactcgtgcatgcggcggacctcctcggcgccacccaggtgcctgccgtccgcgaacacctgcgggaggctgcccggcgcgcccagcgcggcgtggagctcctccttgaacccggcgtgcatcgacaggtcgcgctcgtcgacgagcacgccgtagccttgtaggatggacttcgtcgcccagcagtcctcgtacgtcttgcggatgccgcggaggctggtgaggtacagcaccactttccggtcgctatcaggcggcggcggtggaagctgcggctctggctccggaggcggtgacggtgacggtggcggaggcgccatcttggcgagcttcgcgtcgatcctcttctggaacgcgctgacccgctcgcgcacgatgcccggaaacctctgtatctcgcgcttcttgacgcacacctcgtcgccagggcattcgccggcagcgggaacctcgtcgagcgccttccggaaagcggcgatgatgtctggatcgaactccggtgacccgggcgtcgactgcccccgtcgctcctcgccgcggacgtcgccctcctcatccttgtcgtccaggccttccatgagctcccacacatttatcacctccggctcgcgggccggcgtcttggccggcgccgtggtggccagcaccaattgcctctgccgcctcgccatctgctgtggcggcggcgtggtcttcgccgcgccgccgtcgtcgcgccatttcatcatctcctcgtcccggtcccgctcgaggctgagcgaacccagtgtggaggacttgagcgagacggtgtggtgcacggcggccggaccggagcggctccgcgcgtacgccgtcttgccgccccggacgccaccccggaacgcgtgcctggaccccgtgcagcccatccccgatccctccaccaaacaaccaaccaaaaatctcccgcactgccaccaatacaacccgaacgcaccactcaccggcagaggaacgactccttggatcactggaccatcacgccccgacgcggagaggagaggtcgatgtccctgcaaggccggagcaaatgcacgcgcgggaggtgggccaccgcgatgggagctcgacggcgaggtacaaagacagttgggggaggcggcggtgggcgagatctgatggcgaggccggcgaggtagctaggtgcgtgcgtgcgagcagggaaagggaaacgctttaagccgcgggggggagaaagcgagcgaggagcgtttcgggtcacgggcacgcaccggttctcgcgcgtaaatgtgcgtattaactcgcgcgtttctggtcgggggcgtggcctccgtggagcgtggagttcccggacgaacgcctcaaggtggatggaatgattgcccgctcacaattccacgtcatttaggccatgttgatttcagtttaagattattgtaatctagattattaaattaaattactctaaactgaattataataagctgtaagttgtttgtttctctggattattagagatatctaatagtagtgggtctttagccactcaataatccataaaaagctcctctagagaagattactagattatactaatctggcttatagattataataatctagcataataatctatttgtttgtttcaacttactcctaataatccagattataataattctaagctgaatcaaacatggcgttagccaggctggtgacgggattatccatttatccacgtcggttatcgagcgatcaggcctttggattagcgggtgcgcacccctgcgtagaggtttgggtcgtttttatttggagcagagtgtttggagctattccagtgttcgttcattgtcactcgtcagcaggcagcagcgcgctgagctcgtcaattcagtgtgatcagtttggtgcactgtcatgtcagcgcggtgccggaatggtgccggaatggcgtgatttctcaagggccgtcgatgatttaatactcgtgggttgacgtgaatcggcgatgatgttgcacccgaattcaggaaattttcttgggtgttctgccgtactagtatcacgtatagtactactctgtgacgttgagaacttgagatcgcgtagcattaaaacctgctacaaacatgcggcggtcgcgtttcaaccttgaactgcagatcgccgcgttcctgaacttgaattcggcacagcgggagagtgcagcgacgagcgatgcgttgcggcgggggatcacccgtcgccgttgctcctcctgtaccgcagagtaatacacatgtgtctcacttttgtactcttcttcgataagaaaacaccgcgcttgcgccggaaaactgttttaaacactcgggtggatgtccacccgttttttgcatgtcatctaaatagttatgaaaaattttcaaaaaaattaacatgataggttaatatgtaatatatcacttcacaaacatgcaagttcaaattcaacttctataaattataacaaagataacaaatttgactgtgaatatacgtacaacttgtagaagacgaatttgaacttgcatgtttgtgaagtgatatattacatattaacatatcttgtaatttttttttaaattttttttataattatttagttggtatgcaagaaacgggtggacgtccacccgagagaatagaatccatcctccgcttgcgcctgcgcgtcgtttgacgtttggaacgagagcgagccggcgtcagaaagtttgagccggacccggccaaagcttttacacagtctaacaccggcacgtcgttctcgtctactactcgtaacacgctcctcgcttcccacaacatttgaatctttgaacggctctgcacgatcggagccagtctgggttagaccagcgcaagagggatttgaatatttccaagccttttccgggcaaaggagtatttgagtagtatgtttttttagtagtatgatgcgtcggttggtggtgatcggtgactactctgccgacaggcgaggtcaggtggtggacgtgagcgagcaccggtttcctccgttcccttccagatgagaactgagaagaggagagtggtagtcttgcttggcgcgtggttggcatgtcgctcgagcactcacctgcccaggcgtccatccatccatctaccagctcggcttcttcctgctttcctagtagtcggtggtttgtccgattcctgctagccttttgtttttgcgtagtgcactgcacttcccagctacaaaaaggagtattgctgtgcgtgagcgtgactgcgtgttgccaagtcctcctgatgagaccgaggtcgaattttttactccctggtccgaaacagggtggatccggaacggacgcatgacagatatgcctaatctaccgaattggagctgatcgggacaggggatcgggattgttgctagcacagttggaccaccgaaacgggacgggggtaaacactgaagattggggtcctatcccggcaagaaaattgacatttagccactttcaaggatgggctgcgctgtaatgccattccgccaagttactttgctaaaatgccattcccacgctcgcgcaacacgctgcttcgccgttttttcaatttcattggattaacacacaaaatcacgagtgttgtgaccaatgtgcccttggtcattctttaggtcagtgagacaaaggggattgagagtgagagaaaggggatcgagatgcgtcagctcttgctcattgtggcgccctagatcgatctcgtcggcatcgccattccacccgccgccgcaatcacctctcgccctcacccagctgtagctcacggcggcgctgccatcgccattccacccatcgccgccgcctttgccgcagtcccccctctcgctgacgccgaggacagtctccggatgccgtcgtccctgacatgagataggaacaaggtggagtcgatggattgtactgcacggcgacggcggcagagtagagtggcggcggtggagcaaagcggcacaacacggcggcggagtagatcggcagatcggcgacggagtagagcgacagcgtggcggcgctggagagagcgctggattaggacggcgcttgctgcttcatttggcgcaaaacgaccccaggggcaatttggtcagcagacaactcacttacgggcttaaccggtgaaattggaaaaacgacgaagcagcgtgttgcgcgagcgtggggatggcattttagcgaagcaacttggcggaatggcattacagcgaaacccatccttaaaagtggctaaatgtcaattttctctatcccggcagatgctgaactcacactgctgtttagtgcagtggaagtagcatctacaccagtagtacgaagctgtttgtcactgacagttgattaaattacggtttttcctttttgttggttgattgatttccagtattatattaggtagattttgcaaggtctatcgcagctccaactctccaaggaatgaatgaacaatggagctatgtactccctccgttaaaaaaaaagtcaaaccctgaatttccgtgtcaacgtttgactatccgtcttatatgaattttttttataattagtattttcattgttgttagatgataaaacataattaatactttatgcgttacttatctttttaatttttttcatatttttttaaataagacgaacggtcaaatgttgaacacggaaacagggtttatttttttttgggacggagggagtactgctttgcagcagatcattaaacgagcacatgttatcaatgctggaagcctgaatccggcaactcggcccggctagtcgcggggatgtctctcatccatcatggatcaaagctgtcatgttcgcccttagctaatccggacgaattgaatgacacacaccgcctttcagttagctgcttgcctgctgaatcaggaaaagggaaaaggctgatgatgatgaggatgcaaaggtcgacgcctaaagtgaaccgagatcgagtgcaaccggaccgaagctcgtgggcgaccacttgccgctacagctcatcgcttccgttctttccagccatcccggttaatctaaggctcatcagtccatggctgctgctgcactcatggtatcgattccgaggccgtctttgccggctcgtcggatcggtatcaccatctaagctggtgatgcgttcaattatctgaaaaagctagtgatgtgtaatgtgttatactgtacatgtccggagaagctagtgtgccttcctatcactttctgggcctccccgggcacagttcggcgtcgatgtcgccatgtcggtggtgggtcacgtacggtgtcgccgacgacgtggtctgttcgtgccgagaatctcacgcaggaggatgatggtgttgccgtgttggccatggaccaatggacgacgaaacgagacgagacggtgcctgcctgggatggacatagactggagtactggacccatgaaaaccctgtttgctatttattgggcttgttattgcattagtagatgggctgcagga

SEQ ID NO: 5752 - DNA, 23676 bp, Oryza sativa
aattgttgttgtcatatgtaagggaaaacaacgtactcctatcctattctacgcgaaaataagtatgagtatattatcatttatcctcgtgcataatatagtggaaatacttaagttgtttgtctgaacaagacataacgatcatatactcttctcatatttttgttgtgcctcttctttcttggtctattgcatatttgtcctccattttctcaccatggtgtatgggtgctcgcttattacagctctatcagtaaggtttaaacgatctacgattctattatgttgttatatttatttaaattaaatattattatattccaatggtaaatatatatatgtttcaacagttaatattcgataattagtatacaagagctaattgttttagcgaacattttgtagtatttcacatatcttttaaatgttttaaatgatttttttactttatgatgatcaactgcaacattttatcacctttttttcatcatatcaggtgttttacacctagtcgttctcatgatatggcgtcttcattgggtgtagaagtagacttacataaaaaaacacaaatcccccaaaaatagatccaatagctttttgttatgtttttaaaaccataatccactcttacattattgtccaaaggttaagtttaaatagctactacctccatcacaaatataaaagtctggatgtgatacatcctactactatatacatgtccactattcatatttgtagtactggaatgtgcctcatccagaactaagttcttatattttgggattggtttgtgtgaattagagttagaactccacccttacagctgatagttaaaaacctctttgttataaaccacaaaaccaaaaaaaactcataaaagcctaaactaaaaaaagagtctataataaaatctttcggcctaagacttaggcaccattctaatctccaacttcaaactataacttttttgtttttttgttagcacacttcccatttatacgagttaacagcgtgtttttcgttaacaatacggtgcattttctaaaaaaagacattttataaaaaaacttctttataaatacaaataaattcattttcaagttttatagtaataaattaatcgtgcgctaatttctcgttttgttttccacgaccatgatgcttaaaaaaatcatttgatctccttgaacgaacgcagccttcataatacctgctggctgctgcgatcaaactacttgcaagttgcgatgatgtcaagttcatgtctgaagaaaatatcgagattctttctatgcttggtacttcgtgtgattatcaatatttgcggatttgtgaggatcaaatattttctatggtttatccagttgatcgggggcattttggtcacgggggcatttgggatctagtagcagcagttgtggattcagtacggagatgactcacctaccgaggactgccacgtcggagtgacgacggggtttggtggtccgggggagcatcttttgagggatcgtgcggtcggcggatgcggaatcgtgtcgccgacgagtcgacgggagacggtccagcttttgcacctgtcctgcaaggctgccctgcaatgtagcaatgtgtttgtagattttgctagaactcaatgtgttctggtgaagtgtatttttggacgcaaatatgcttacaccacagaggcatcaacgtgtgtgtgcatcagatcgtgtgtgcctctcaagtagtacaacgctatcttcgggagctcacgaacggctcacacatagcatgagctcagagcattcacttcacacaccattgcaaaatgcaaacgcacgttcatgtgtactttcataattagcggacatcagccccaaaactataagggcattcccaaaccaatgactaaaatggtgtccatagcattaaataagttgccacctagaacaaaaaatgacgtggcaaatgaataaatgaggaaagagaagaaaaccatgtcttgcatgagacatggtttctacacaacatccaagacatcatgtgagataagtaatattaaattgaagtatggaatagtggtgtttgcattggaagagtagtgtctggtactaatttcttgatgatgtggagtttatgaaaatcatgtctagtgttatgggttgggactgtcctaacaacactagccatttgttaccattttggacgcaaaaccaataaaaaaaacacaaaatattgaggttttgacgctggataaaagcagacttacgagtgaatttttgaattattctccagaaatcaaatttgaaaaggtaaattttatcacaatttgattgaaatttgacgaaaattcgtataatactaggggtctggatccagtgctcaatcaaaaaaggtgaaccctgctggtgagtactatagttgacatttatgttgctacctcctaaactttttccaaaaaaaactaaacgctcgttcaaaagtgtagtttaaaacgagtaattagccacacgtaaaacaataaaggtgattagcatatgattaattgaatattaattattaaaaccttgaaaataaagttatttgattttgtaaagcaacttctatatagaaagtttacacacgaaacacaccattgaacagtttaaaaaatatgctagtggaaaatgaaaaaggtagccaagccaaaacatagtttacaacgtgccctaagagtgtgttcataaaccaaacttataccaagtcaggagaaatcttttaccatactaggtaaaatgtccatgggttgcaacggaatttaaaataggaaaccccatcgtacactctaaggccccaaaatttataataaaacatttccattgtaaacaataattggcatcgtttttgtacatgtatgtcaagctacatagttgctttcaagggtccatttggtagaactccaacttctaaatttaactttagaagcggaatttggagtggagctgtggagctataatgatatgagaaatgaacaatatttgtacatctgtttataagaggagtccacctaagcatttaggtctcacatgccatcagtgataggtgatgttagattcaccaattagcattgaaatcttttaaagaattatagattaacacagttacttcatactatgtgtgaactagttataagaaaatctgaaaagttatagacataattaggaattaacacaaatataatactcagtgagcacacaaagttaaattcgatccacgctatgaatagggtgcatgcgctatttacaactaaaatttgttttcccctctctagatcaagtttgaactactcttttgtgagatcgattgatccctattgtattattatcagtcctattttttctatagtttttcatgactgtttagttggtatcttaaaaagtgaccagcatgagagagcgcatctaattgtaatggaaaaggcggtgctagaaaaaaaatgtacctcaatcttatgggaacagaatttgcaaccttcgatttcgatgaaaattcggtggcaccaaaatttcatgaattttggtacttttttattgaaattatttgaaattttaactaaatttgaataaactttgctcaaattcaacaatttttttttgagaaaatccaaaaatttcaggcgagataatgacttgccggagggtctgaaatttccgaaattttaaactaaaattgcaatcactgtatgaggctcgtaaggaaatcagaactaaggccaatgtttgccgatatattttattgtgctactccgttaagttttatatggcttatttccatacgttgtacaacatgtgtactaagtagttagaattatattgcagaacagatggattgttgtttccttgctagaaaatgggaaaatttagggaagctttaaaagtttatagcggtgaagttgtacaacctgaaacgactatgctttcaatatatatttaataaagttgtgggtttgtttatgtacatgtgtacgtatataatggtgtaagtgtgtgcaccttccatgtaatcgaaaggaaaaagaaaccttggaattctctcttctatgtgatactgtaatatgagactagtccaaagtattcaggcacgaaattaagccaccaaccacaagacgcatgctcattgagaggtggtgtggtagatgagtcagatgatggaccaactcttttcaaagttgttctcaaaaaaaaaaactcttttcaaagttgcaatgccaccaaccacaaacttcaagtgctaatactacgaatcgtggcccggtccagtccaaaaattaacatataacgatgagagagagacataacagctaattcggtctcaaaagaaaaaaaaagagggagatgcatggagaaattgacatattttaacgggtcaaatacgttagaatgttagctcaattaaagcagaacttttttttgaatatatatatatatatatatatatataatatttactactacaattttcttcttcaattctcaattcttttatatatataagaattgagaattgaagaagaaaattgtagtagtaaatattttacgccctctacctacccccttgtctctcttcaactgaagtgaaatctgaatatataactttcagcggatggatgttgaacgatatgaacattcctgactaaagcgtgcgttcgaaccggtcaatgcattcaggtagagggtgttcagagaagttgccccaaagacacaacatcaatctggacaaattgtaacatcttagtgttactgtatcgactatcgacaaaagtgttttcagttagatttgtaagtacacggcagcgcaagtctttcaaaaggatctggggagtaacttttggtgaaaccgccctcttgtatttctttgttattcgctgcccttccatcatttgatagaatcaattggttatattagcaagcagtgatgtgactagtcacatttcacaccagtctttcttcgaactatttgttgatagataaaattcattccgactatactatgcgtgtatatacaatgtaaatacgaggagtatgacttatataaacaaagttgtaatgagagatagttgatagggccttttttaggtttagaccctgtgatgaataatgaccctaccgatcatgtcatgtttggccaaagactgatattttttcctttactagaaaaaatacccgtgcgttgcaacgggtgaagtctattttaatcttattattgttatatggttcagttaagatgaaattcactgtgggagttcgcttatctctactattataaaaattaaagatattttaatcggtattttggtacgtcatcatgagtcggtttttaagtttgttcattttttgaaatacagatccatgtttgagtcagtttttaagtttgttcgcttttagaaatatagaaggaatcgcataagaaatctttttaaaaaaacttgcctgctaacttgagacgattggactcctaattgcagctcatgattttaaaaaatatatatatccaaacgagttcccacaatagatttcacgttaactaaaatatataacaataataagattaaaatagcttttaatacacggatatttttcgtgtgtgtgtataatcatgagttgcagttagaagtctgatcatttcaagttagtatatgagtttttttaaaacagaattcttatatgattccttctgtattaccaaaaatgaacgatcgtaaaaaccgaatcaaatacggatatgtatttccaaaagccaacgaacttaaaaactgattcatacacggatgatgtaccaaaataccagtaaaaatatcttcaacttttataatagtagattaatattacaagtataaagtatgaggatggtaaccttaatatatgtagtagtctataactatgtcgacgtaataccctgataattaaggtggttagcagtatgttggcgtaaagtcctaatgaagtggtcggcgactagcttctggatctcccctaatgaagtgtgattggatgtggctgatatcggcttgtggtgcattgattttggttgagttgtcatttttttctccccctcgtgactctaggaagctttgtgggggtgtcaatattgcctctcaggagcgtggggtgtcctatatttgatagttttatgttctaatcgttctactataagactgataaattatcataatacttttttcgttgtctacttactttaattacacttgtgaggataatatgtgggaccatctaagtgaataaaaatagaccatgatatcaaataatcaaagcccattttaaaagtgttaatttatcaaatctccattctactttttttaagtcggggaatccttcaaagtgtggttagtatgaattgaatcaggctttgagcgccactatatacggcaacatcagtgccgttagtgctaatcaaggcaatcaataaaagatcaggaaatgggcggtcttttggtgagtttctcctggttctagttttcctttttttttggggggggggggggggggggtagcagtagtactggctggttgagatccatcctactctgtactctctattcggcagatggagcccaatataacttgtgctacaatgtatgtacacgtgtgcaacagctatttttcctttttgaagtgattggccatggacgcgaagaaaagaaagagaaaactggtcctgaagatgactggaacatgactgtggatctgcataaagagcattaatttgattggctgcctgattaattgattaattctccagctgcatcacattgatcacgtcgtgctcaatcttgcgaattgcgatgcctaccatgcgatgcgacgcaaggatgaatgctttgctagagtggtcccgagtcctgactcctgagaccttactcatgagagcatgagcaatggtatcctcaacccgtgtcttcgcaaacgccgtccattttccgtcgccggacccctgaagggaggcgcgacccccattaaaggaacgggcgcctccactccctttttctaagcatggctcgtggtcccgtctcccctgcctcctccctttcagattccccttcttgcccctctcgcctcggcccgctgacgaggcctccatccgccggagcagagcaagacgagcccacgcgcagctacagccgtcgtcacgacctcctctgtcgatgccgcgcccgccaccgccgtatccatcccgatctggccgcggggagggggggtgggcagaaccgcccacgatggcaccagatctgccgcccccggctggcgacggcgtgaggtggaggaggacggcgacgacggagacagagcggcgaagctcgcccgccgtcggccaccccacccctcgcgccgctcgctgtcaactagcgtatcccgcgtgcggctctccgttggccaccgcgcggagacgggcggcggtggtgctggcgagagggagaggcgagcggctggcgatagagagagggagggaggcggccctccgggcgagcggtggcagcgatagggagaggaagaggcaagcagcggcggcgagagggagagggagaggagaggtgaggaaaagagaagaggagggggcggcggcggcgaaaaaagagaagaaagagactaggggtagtgaagtaaaaatatacatggagctttgtgggctgggacactcgttgtgggctggagtatctccaccaagttgcttgaaattttaaggagctcatttaggatatcctccattaagagagaagtgtctcaaagagtactctcagttagtggggatactctaggtgtgattttaggtgtgattttggttatagatgctctgagtggatctttggttttaaatgccctgagtagatctttggttgtagatgccctgagtggatcagtagagatgcgagcctgcggtgtcaacgttcacttgttcgaactacttccacagttccgcactcgctttcccggacttaatttcatcttttgccttaaaaatgggagtgggactccaatcaatagtgatcacgatctctgcaataagcagaatcaaacgataatttatcacttaccccacgagctatcacgttcaccaaagcagcctctcatgtgtgggaaccggttcccgggtttcagcagacgaacattcaacttcgaagtttttaatattggccagtcactgagtaacaggaaaaaaaaaacaaattaaattttaaattttagttcgtagccttgcaaccggtaacaacctaagcggtctctggctccactctagtaactagccagttcccatcgtctttttagggagctgcctttcatctccagaactacggtccccgagattcaatttacatcaattacacgagtatttacatccatctgcttctaatatcagagaagcatacattggaaaatatatttgattgagttccaccatagtgtacatcaatcaaactataattcctggagcatttacatcttgatcaggctgaagcaaagacggagctacttatggctccttttgaccttttcagtccatctaacctgatttctgatcttctcataattgtacaatgataacaccagccggtatggaaggtaaaaaagaagccatttcattagatatttttctatggtacaaaatgattgcaacgttataaatagctctaaataaaaaagggagacctcctcctgtgactaggcagcctattggtgttacaaatacaacagggttgaagaatcactagtacagatgtgtatacagtatgtcagttgccgaacccaaaaggtgatctcgtcctgctgccaccttcaccatactgttcgttccattttcttaattcgttcatgctcgtcgcatcatacgaaacagacgggcttacctaaatgggggaaataataatcaatgtgaacaaaatactacttgcagagaactgcgctaaaagaaaaaaaatcttaagtttgcagtttgcaataccttggcttttgcttgaatgaaatcatcaagtctaaggggtcttagacccgtattttggctacacggacctccctacagaagatgttaaagttagtgaaaatgagagaccacataatttccataattatagaattgtttaccttcttttcttcttctaaaagttcatgaactggcctatatgctgaagctatacataggttctgcagaaaaggaaattcagattgcctgctcacatggcagaaaagaaggaccagaacaattccaatttccacaggaaaaaagatattatgatcgttggtgtatgtgataccttcaaatcacttcctgaataaccttcagtggaattggcaagttcatcaaatctgaaatcagattccaagttttctttagcaagtaaaatcttgagaattttcattcggttctgtgcatctggaaggtccacgtatatcctgtagatcatgaaagtcaataaccaatgaaaatcttgctagatcaccatattactatcctggaagcaatagtgtgaatgtaaatttaccgtctaggtaaacgccgtattacagcatcatctagatcaaatggacgatttgtcgcaccaagaataaggattcgctggctctctttggaccttagaccatcccaagctgccataaattcgttccgcatccttcttgttgcttcatgctcaaatgcaccacctcttgcacctaataagctgtcaacctgttatgtcaaaactaaattatatcataccaggagaaagcacataggaggggaatataagcacttgtttgtttcatttaagtaaacatacctcatccacaaatatgataacgggagctaatcggctagcaaaggagaaaagggcctttgtcaacttctcagcatctccaaaccactgttcaaagaaaacagagcggtgaagtggtgctcagttgggaaataaacctttatctatgtgggacagtgcaggaggatgaatcttctaaagaatctcaaaatttacttatttggttccgtgaatataagatgcagagtgaaacgcaaacatcacaaatagcattttaggagagcattctaaaaaattgcatccacctactctgcctgcatttatgcataccatacattcaatcaaaacaagcttgtccactatcatcccatgccccaaccacccactaacaaaaatgactaaagagtgaggatcctttggtataatctagggacatacagagacctcatgcatatgataggattcacatcagtagcttcatttgttcatgcaaagcagcaggagacatttaacataagagaaaaggcctcaacctgtcaactacattcgtataatcaatgttttaagaaaaagcaggacccactcagttcacatgtgaactcagaagtctcaatttggcgtgtgatgttacaaaacgaagcaaatcttttgaaagcttaaattcgccatcttaaataggttgacaagttggtcccgtagatagactgcccttttatctagaattgtatatgcagactgtttcacttatcctttgatttttgatatgtctattctacatgtgtgtaaaactttaaaaagaaactgttttgcttcaccttttatcccttttggtcatgggaaacataaatctgcacagaaaagtttcagatccaaatcaaacatgtaaagtttattctatgggccaaaaatggctgaggggtcagtttcttgttttggccatcttcctgttcttttggcaaaagtcaaaaaaaatgttgacttagctggcgactagtaaaaagttgtcccacactaaagtcgtgttcaaaattgtctaaaagctaataggtaagtatggaaatttaactagttgaatgatgtttgtaatttactgggtcacaccaagtacgccatccttaagagctttactgcaacagcaacaagtcaaatcaaattacctttgatgtgagtgtagaaccagttatgctgatgaaatttgctccagcttctgttgcaagtgcctttgccaggagtgtttttcctgttccaggaggcccaaagagcaaaacacctttgcagggctgaaaaggggtccatgtcacattaaaaattcagctaactcaattcaagtatgtttaaatcccgaataagatgaatacaacaaattactagggcatccaatagtcagattaagatagctgaattctaagcaacaatttgtcaagaaccaaaggaaaatagtaagaaactagatgacaccctgtgcgttgctgcaggatattagtgcgtacagtgctgttgcaaatttgttagatatggaactgagaaaatgattaatttaacagccaaaaaaggactcatcaggttagaaagactatgggctaatctgaaccgttaaaggatgtcaaagaaaagtgatgatgtggcttcttgcagtgacttctttgtagcaataactgcactaagtgagttgcaaatgtataggaagaaaggatgatgctttcaattgcagaatatcccagtttagttttatctatttgccttgaaaggcagcatgtatttcttacgatgtttatagacattgctatacttgcatcatcaactccaccttgcatggcaaataccataagcactagcgctgaacagtcaggatataagtatgtcatttatagtatgattttaacatatttaacctaagagatcagaaataggtccaacattcaaaagagaatcaactagttgaagtccatgaaatactgataatgattccgtaaagagtctttaacaaatattttagggtcaattcaaataccaggcatttttttacaatctcattttcccctgatatagcaactggccatcggaggaccacttgagtaagagtaacatctccattctaaaaccatgtgattactacacattatggtactcaatgttgactcaaatacaaaggaacttttggaaagattatgcaaatgtaacaccattttaaagtattagtctaaaactgatgcaaggaggaaaacaatatattattccctgcaatccatcacacctcgctttctgagctcataccaaaataaagtaatttctttctagaagacaatgatgacctaaatggatgttcaagatcacatggtatatacagcagagctagtgaacagtcataataataagtttagcagaaaacgaaggcgtacccttaacaaattcccatgggagaaaagttcaggtctcctcattggaagagtaacaagctcatccagcgtcctcttaacatcctcaagtgccccaatatcatcaaatttcactccaatttcatcaggagggacaacagcagaaatgaaattgcgttcatactcgtctttagccaaattctgaagttagggaacttatgagttcggataggagtaggactatcagataaaaactatgaaggtggcagataatagagatgtggaaaaggtcaacttgcggaatatagaagctaaatacctttatattttgagagggtctcttagttttaatgccctgttccttcagcctttcaatggccacatccagacttcacaaaatgcaacaattagagtaaatacctggcaaaaggaaattggcctagtgccctagtacaataactatcatcttgaaatgaagtacctctcacgggggatgattaatctgtcacccttaatgttaggaagaactgctgatgaaagataatgacttctagcccatccaacaaccttttccgcttctgcagacaacaatacactagctggtaagggaggaacaaaataaattttaatttagcatccatagcagattagaagtggctgtaagctgttgtattttgtccttccaacttatttgcaacatacccattaatttcaaaggataattaagatatctccctatgcagccacctgactagaactctagaagtctataaccagtaacctagaataagttttcaaactttcactgattcaaaatccatattccactggttttacatgtaggagcaccaccacatgtatagactcagtaatgaaacctatgacttaattgggaattgcatagaaaaaatcacccaaaacatgaaagcagcatctaatcaaaacagttggcaggaagcccaaagaactttttaaagaaaagatctttccttctatctatttctataatgcaccagcacataacaaaagccaacaactgatatcatatgaaaattcagcacatgtctgagcagaaaatattgagtagacatactttgtcttgttaaaacaacaccatcagatttcacatgcagaagctcaacacatgatagttcatgctcttgaagtacctgtgttcatcaatcatgatttactgttagttacatgagaggaagcagtaatgctacatgacataggcagcagataactggaagcagaagcattgcatccaaaccttgtgcaattcaacaaggttatgccttgaaataataatttttctatcctcttcgatctggttattgaaaattcgtcgttgctcatcttcctgtaagtaaacagagacaaagtcacaggcggtaggccctccaagctaaagctcactagtacggatgcactaggcattgcaagtcagtgattcaattataaacgccatcatgacatcaacacatatgttacttaatcgttcattccgaataacataactttgtaaactagattagcaaatggtacaaacctcaggaagaggaacgataagactatttgtgaacagcttcgatatgccactggatcttgagtattttggtctcccccctaccaatcgctttagtgatgatggctgcatataaacatttcaaataagtgccagttgtgaaatacaaaatggaaacctttgcttaagtagttagatactgtcagaaaagggagttagttttttcaacagtgcaaatggaaaagaaaaggaggtttaatcataattcctacaactaaacaactagcatcccaatatccttaccttatggcatgctcttgatagtttatacaacaaattatgatttataaggaactaaaaagtcgtttagtttgggtaccaaaactgcgattgtgttacaagaaaaagcatgtccacaggcaggagtaaaccatgtgcaatcattcaatgacccacattctctattcaatctatagggagcactaaacgtcggtaatcgtctacagataaggtggttataagcgcatcttactgacttggcagcctgtcatgcctaagaatataaaggtggctaatagaggttattcctttacatttttaggtctcttgtactcctatatgttgcctccttgggcttattattcaatacaagctatatccataacatggcatcagagcaaagatccgaattgtagccatcaatccaacatcctcgctagtgctggcagcaactccatccaacagatccaagcattatgaatatagcttgtattggataatagccccaaggaggcaatacataggagtactagagacctaaatacgtaaaggaataacctatttatgtaaaggtagtctatattccttaacaatgcatataagctgatggttggtttgtgcaaataagctggttcatttgcaccccttttcagaaactaatgaagggttaacttcacaaatctatgcacagccatagtaaaccaagctcgtcaatgaaaacaaagtgacaaaacctatcagaatactgcactgcatcctcaaagggatgcaggaactaaacaaacaatgtttagacctgtattgttgatgtactcttacggtcttgctagcacaagggaagaagttgttttgtgattagtgattatagcaaaattgttctagaaaataaacatgaattgatttgaactaaatcccaagcaattaccagcgaagacaggcgagagagattgtggaacatcagcgccggctgtacatgtccacaacagaaataagaactaacaaaaactgttttattggttaaattcaaatgcatagaagtttgcagagcttacaggttccttatccttgtccttgggttctgcttccaatatgttctgcccacatatcattactactggtccagtaagtttgtcaaacatctcctctaccttttggataaactctctgcgatttgattttggaactgctctagatagccactgggaactgtctggaaagtagacaattgctggctgtagagatggcagaacctaaattcataatcatgtaaggcaggtaaaaattattacatggggttggccaacaacaaaatagaaatgttgggggtatgtaacaccaaaattcaatacatcgtttgataaatcacctcgcaaagtgcttcaattgcgatatgccaatcttctgactcagtatcatggtcatgaacaatgtcctgagctaagcacaaggaaacgagatgaagtcaaggcgcctgaaatttccaaatcaaatacttgaacacaaaactgttcatgaaaaaggatagaagcatacaatcaacccagtaaatggatgcctcagtattttcctccttgctagttgcatcattatcaccatcatgcagcttctctgcaagagggtcgaatatgactgcgacttgatccccattgatctcatatacctctccccgttgtccctttgataaagtcctgtaattttcaatggtagaaacattacccttgtttcacaaattcatggtaatgataagtttacacagaacagtaagagagtgtatagcttggttgctttaagaaactatgaaaaacaccacttgaaatgaagaggatcaaaaagacaaatggagaaaccagttctcctaagcaactgcagcatagggtcttttgctaatatatttcaactgatcggatttgcaaaagttccaaaatattcaaaattacagagagcaatgcctccctgaggttttagatctaccaaaaccatttttatcctgtttcacatgggaaagatatatccacccacctgccactaataaaggtataggcatttcttgagccatctttagtaggtactttccctaaaatgatcctgtatatgatacatatggtacaaatcagtgtttgcatgaagaacatcaacttcaaactacggtaaagagtagatagtggcgtaatttctaacatgtagtagaaataacaaacaaccagaagtaaagtttgtttttcaagtttcactaatacgagtggacaaaatataatataccattgtgtgcgtgcgcaagctcaacataagtaaacttactgctcactttcttatactaatccacccaaacccacaagactaaaccacaaatcaacccaccatgttcttgtgtgcaccacatgtaaagacatgaaaattacaagcagatgcatgtgggcacccacaccctgtagcatgcaatacataattatgtgcaggcatgcacatcataaactttgtaacttctaataggaacatggagcgtttccacttagagacacctaaatatgattgcaaaacttcagaaataaggagccctgtgttgctagatgttaaaatttctaaatcaggaaaactaaataaatagctaaggttttggtgccaaactacgaaacaagaaaggtaatccaaatcactgcggaattgcttatactcgatgcaagatcaaaggttgtcatgatgaaaaactatagaaagagcaaaagagccaacatctaatgatcacctctgatctgcttcaaaggcttctgaggatccaacatacttgaccctatctcctgataataggcattgaaataagtaactagttccaatttttccattgaaccataaggtagtttggaagagagaattttaacttgatttaaaatagagtactcaatgaaataccatacccctttggtaaggccttttatcttcctctgatgactcaggactttcagatgattctgatgttgtgccttcttctgcgccagcaactctctagaatcataaccaaatgaagaagcatcatcaacaagacatacaagtgaaagaaaactcagcattcggggcagatactggaaaacactaatgcattattctagcttaattttcttcaagtaagaaaggataaaagaaccagcgcataaggttatgattcaggtccatgctagaatgacaacacaaatgttttttagttgttggaagaaacacacatttttagtataaaaagttatgtttttatcacggggtattttacttatgttattgtattacttccatgagattgtttaacgttggaaacttagaatgacctattgtttgcagatattgcagggaaaaggacaccaattgatgccgcatggtttatattgaataagaaaaatcatagtttctagaaaaacagacaaaattatgaaatattttgtgagaagagaaatacaaaaacttatttctcgttatggttggaatgttggataggctaacagaatataaccttggcaaattcctcaagagtacatggaaccaattttctgaggcgatccacagacttcttcagttcttccacagatttcagagcatcctcatcgtcactttcatcggttttagcctcaccattgcttgtccaatcttcatcaccttcatcttcaatatcagattcctcgtcctctgactcatcatgttcatcctcttcgtcactttctgaatagtcatccccataatcctacaagttaggagttacattaagtttgcaaccactcttatatatttgataggtataaaggtgcagtatcttacatatggagctagaacgctgctgtccaggaccagcagcggcacctgcaactcgtgtgcgagagctcttactaatctctccctgtaaagctcagttcctgcattaaataggtctcaacacaagcatttgataacacttagtatctgcagcatgtccgctcaatacctggtaagctctggagcaatatcctccccccagaggattgcaaacgagaaccatactcagatgtgacaccattgtgccgcaggtgggacgccgtacactccctcagcagccgcctcgcattctcacttgcgatccaaaattaagtaaaaacgcaatttctcgtcgttagaaaactgatgtgactcactcaaacaaagtaccgaacaggtggtgcgcgcgtcatacttgacgtagtaagggaaattctgccacgtgaggttccccttctcccacggcacgacgcggcgcatgaactcgttgcggaacctctcccgtctggtgaggaacggcgactcccggcgcttgcaatcagtgaggaacctctcgccgctcagccactcctgctggtccctctccccgagcttcgcgtgctcctgctcgctgcatcgcccgctgctcccctccgccgccgcggcgctcctcgcctcggcgctgcccacgccgcccttcgaggagccgtagaaccggcacagccgccgccccgcgccccacggccgcggcgccacggcggcgccgaatctcctggcgaagcatccctcgccgccgcctgcgctggccgagatggcgagggagaccggcggccgcgtgaggaggcagcgcagccgcatcgcgtagtacatctcgggcggcctcgggagggggaatgggatggaatccgcagggttaggaggccgtggagccgggcatgtggtgaggaggaggaggaggagcggatggcgcgatggggagattggaatccggcgtgcgacgaagacggtggcgcaaggctgcgctgtgacggcgaggagggagacggagacgccacggcaatcttcttcggttcttcccccggctctcggcctcggctaatccgcttctcacgccgggccgctcttgccttggggagttgggagcttctggtgttgggtctctacaattttgggccgaatttgaaatgggcttctggtaagtatcagcagttcagcctgtatcatctgtatttgataaaagtctattttaattccctccaaaaattgacctaatccgattcacatctttcaacagcaaaaacctggtttatcgcctctcgaagtattaaaaccagtttaaaatttaagagtagcttggctggcgtgacagccaagtcataaaaaaataaaaaataacgtgagacacatgtaagtgactatagtctcatctttctctgagatttgcaggcactaacccgcgcaaataactttcaagccaggtgagctccacttgatacaatgatgaagctggagcacaaataagaacctcccacccctctcgtcgggacatgctttctcctgctcgttgtatcttccgcttcttcgcaaggccaccataagacactcgtcttgccgccacccattctcctcttcgagaagctagggtagccgacacagctaccacttagcttcccacgggccgcgatgtacgttgctccttccccttaagtggattactactactcccttcatcctgaataaattcattttcacccataccacacatgccattaaaaaaagtttaaaataccttcactttatcgaatcctagtgcaattatgcccctatctactttaaatacatttatttattactttcgcaaacttcaatatagttattactaagaataacttattttgaggcaaaatgggaacagcttaaagaaaacttagtttgtaacgaagggagcagcattttcttctcattgcagcaacgacaacggggttagaggaaaacgacggtggcctcgacaatgagatttggtaatttttaacaccccttaaaaataggtttcaattattttgacaccctggcccatcttcattcattcagatggtctcatatgtcatcctcacaagtgtcaattttaaagtaactagtaatcatgcacgtgcaacgcacgtctccacaaatatgtaatccgaatgcacggtactttgtaatagcccaaggagaatcataaaatatgcctatgcatgaaatcaatgtcacatgagacaaaaacaaaatataaataactacatatacatttcaaactcatgaatcatgtattatatagaaattaaaatgtcaatctagaaatattgtctaagcctacatcatatattcatgtttattacaataaactcatcccttctaaagatatcacttgaggctcctgcatatttttaggcatcgaattttttatccatacttgtcagttgtcaaaaaccgtgtttagaatttaaagagaagatcatacaaatttatactatattttgagacactatttgtggccttggagcaaacaaactttgtggccatcatgccatttagaatggactcttccaaccatgtttctgatatttgaggagaggtacactgttacaaggcagcctcaatgttagcatggtcagaagcttgacaatacctttgagagacttatgtaaataaaaaaaactacattgattataggaaattggtacaggaaatagaacttaaaaaatggcaaggtatcaataaattagcaaaaataaagaaagatcacacttgttcaataacatatattatcagatgaccctttagaaaatctaggtcctccattttccagattcagttaatccctcgaaataaaacttttccagattcagttaatccctcgaaataaaactgataagcacttgttttaagtattatatcagaaatacgccaaaatatattaatgacatggtttcacatacacatatatgttgagtttacctccatcagaatgtagaaaggaaaatggcaactccctggctgctagcacatcaaagtttcaatggtgcatgaagaaacataaagaagaatccatgtgtgtatggttatttacaacaaataattcagaaaatacacaacctgcagcatcctcaagaggcattgcacataaagctatacaggctagaatctttttcagaacatcatctaacatgagtagggatgttagagtaacaataatttatagtaatcaaatttgaaaaaattttctcatgcctcattactaacccacatgaccaacagaaaaatagaaatcccatgcaagttgtgtttgatagtgttacctgtctaaatcaggtagagagatcatgcaccgattgttgttccctcctttggttagataggaaacggatattagaaaatagaaatccatgataaaaaataccgatgataactttgtttcacatcaacactgatagcacaatctaacatattaataattcccttttatctcagtgtgatatatccaaagaagaaaaggcagaggatgttgcattgtgaatattcatatattatatatatttctaaaaaatcatgatgaaactaaaactataacaagaggtcaattcatcatgtatgttcccatgtctaaagcaatagattaccgcattttaaatcagcataactaatatcataatgctccactaaaattgtaataatacttcatttagcggagctataacatgtcagtcatagaaaagcaagaagcaaaccttgtctagaagtaatccagtaagcaaataaatgttgtgcctctctactgacacctgaatatgtcgatcactgcaggctgaaacattgtctattgacttaataaaaatgtatacacttcaaatatatctccttagtcacaccaatcttactaattccactatgcaccaatataacaattcaggtttagcaagaaaagaccaacatattgtctaataataatatgtactatcttaaggtttcatatgattaggtcagttttttatgtagcctagagcatttcaaatggagaggtccctcctctgtttctgtgattgcagcaagaatttcgtcatggaccttcagaacagcatatatattgtaacataacatttgcacaatagaagtgcaaagtatacataactgcagaactgccgaatgctacgattaatggtatgaaataccccaaaaaaaatgggcccactgttttctctgaatatttgcttgatactattctctgaagatattttttcttaggatctggatacctagttagatattcacatctcagaaatgcagaagctaatcatctctcttcttatcctctacatgtattaattacataaatatgattaaagaaaaacacatcataaggattatgcaaatttcagtacataaaaagatagcaattgtttaaagaaagtatcgctataactcaagatatgtcattagcctacagattgatgtatcagatgcatggtagccgtccatttagctactaatgaacggtcaaatgtgaaggttacggtaccggattcatccataagtcttcaacccctacccctggccttaattaatatctgcacaacaaaccaaactaaccaaaataataaatacctgtttatttgcgtgatgcaggtcgttggtgtctttcacaacctgttggtcggtcatttctttctcctcgtttcccttaccacaaggagtgccaaactggggagcagactggcctgatgacagtgttgagacagaggtgccgcattagtttgcaggaatcaaaatgttacttctagaagatcaatgatttgtatccagtgctcaaacttaactgccaaaaatgcaaatgctacaacactctcctttaagcatacctcccagtgcacgcccagtgccattgttgagctgagctgccgtcatcgcaaccgctctattcaactttatactccctgggccatgatggctgcagaattaaacaaaattaagcaaaatagaaatcaacacacctgccgagaattcctaataaaacaatcaatcaattaatatcatccaacaacaaacaagatcacctcacaataacaagctatccaatattctttttcctattataggctgtaaaacaactatgtaaactatgtaaacctgtttgttcagatgaggagtatggcccaatgaaaaccgaacttgctgctcactcctatcttgagacctatttagcatatggatggcttctccacctgatgacctaaaaatatagtaataaaaccaaggcaacaaagaattataccagatatgtattaggtaaagatgattagcaaataaatccataaggattttttaacctgctagtaaagaaggacatgaagcataggcgtgtgatgatgcccattgaaccgtgtgagacggcggtcgatgatggcagcagccccgttggcggaagtggccggattcatggcgccaaagatgaccagatggtccagatcttcttggcctcggcagctatggtgccgggcgtcgacagttgggggaagagcaagcgcggcgtaggtggcaatgtgggcaagcaccatgggaagaccctcgtggtagccattgacggaagagagatctgcaagcatgttccctgtcgacatctcaggcgccaccgccgatcctctcccgccacatgctatcaaggtcacttttgcgtggatcgaacgcaccgccgtcgctggtgtccatctctacctcccgtatacaccgtcagctcagcttgtccgcctgatttggctcgatagcggcggcttgatcctcactcgcgggcgctgttgatggggatcggctgtaaccctccaccgaaggcagcccccgcccctccaccatgagcccgagaaggcatggagggattggcgatggcgaggccgcgagggcagcggctagggaggggatggagtcacgggcgaagagag

SEQ ID NO: 5753 - DNA, 19052 bp, Oryza sativa
agccgcccgcggcgagccgagtcttccctctccgctccctcgctgccgctccccgagctcgttcgcgcgcgcgccggcgtggttgccgcccgtgtcgcgtcgcgtctgcgccgcccggtcccgctgccctgccgcctgcagccgcgcagccgcttggccccgcgagccagcgcgcgtgcccgagccgcgccactccatccgccgcgcctcccgttgcaagccacgtgcgcgtgccgtggtggccgaccgcccggtcgccgccgctgtcagcctctgcacgcgcctgtcgccagtgtcgccgctccgctccaaaccgccccgccgtcatcgccgtcgtcatcgcctggccccgccactccgcgcgcaagccgccaagggacggaggcagcatccctcctccctctgccgcgtcgcccccgctcacctcctcctttttcccgaatcggcaaaggggcaagccccctttctccccctccttttcccctttttcctcctcgccggtgtcatcctccctgtcgccgctttggccgcgaccgccgagcaccagctcgcgcctttgaccgcgcaagtcggttcccaaaccgacattgccgcccatttaaaccccagcctcccctttcccttcctcttccattcgcctccgtgccattgccgccgcccccgagctctgtctcgcctctgccgtccttcgccgagcaccgggagaaccggtgcattcgaggacgcggaaggggacttcgaccacgccctcttcttcctcttccccggcccgaggccggagagattactcccgcgccgtcggcctctcgtcacagcgccccgtcccgcacggtagtgtctccctccgttcttcctcctcgctccatctcccccccccttagttttcggtggtagcacgagtagacttcccgtagctagccggcgccgccccaaccgttgccgtcgctcgccgtatgctcgccgccatcgccgctcgagctccgtagcacccgcacgtcgccagcctcgctcggcgtagctccgtccaatccgacgctagcatcgagttcccgaaaccgcgtagatgctctcaccgccgggaatcgacccctcgtggcctcgtcgccgtttccctcttccctccccgccggttgtcgccgccgcgattcgccgccgtcaagctccctccggcgaatccgagccgttggctcgtctcccctcatcacgaacaaccgcccggtgtgctcgcttttgcccgtatcgccgtggttcgttccgccgttcgccgccgccgcccgccgtccattcggggccgggtcgtcgtctacctcccgccagcccacgtggcagccacgtaggcgccacgtcggcgccagctcagccgaggtcgggacgggccgaccccggtcagtccctccccgtgcgcgcgttccaccgcgagccgtgaggctgcgcgtgggcccgccgcacctgtgtcctccgcgaactgcgtgcgtgcaccacgtccattctccaccctagcgccgcgccgcgtgctccctccgcacggtgagccgagccgctgacaagcgggtcccacccgggaccgcgcgtggtgagcccggtccaccggactctctctccttcctccgcgcgcgcgcgtcttgagccgctctgggccgccttcttgggccggccggcccgttaagctcggccgtgccgctctttctctcgggccacgccctagccgcccgagaaaagtctataatctctccctcttttcttttctttatcttttccaaaaaggatttaattaaatccttttcctttagaccaaaaatccaataatcttagaaattcaatatcttccccaccataaatccgtttgactccgttcaacttccaaaattccccaaatctcgagatctatctaatggcacgcttagaggtcattaatagggctttatttccgccgtttgttgagttgtcccgtttcgcgtgtagtttcggagcccgaagacccgcagtgcgaggatttcgaggatcaagctccagatctcgagcaaggcaagccacctttgaacatcttgagcctatatttgaaatttaattatattgcttgcaaaatattatgcattgataggatcgcacttaatctgttgtcccgtctgcaaggcagattggcggacctgcctaatttgttgcatttgatccttcctttgttaattgttataccatgtccccttgtaaccacccagttgcgcctcgatattcgtgcactctgtgcgagtatcgacggtcgccttcaaacttaaaatctaaaaaacaacttgggtaaaacttgggttttacaaaagacttggaaaacccgacacctgggtcggtgcttgcaaactaaatgaatttctaaaatcgcggaccggggaacgtaccgggtgtatggttttcccgctcccgcacttaaggaccgattccttggaatttcatccgaacataagacaagtacgaccacatgggtggaatgggacacctctggctgagtaactagcttatcaggggagccatgatgccgagagacatgtggattcgccggggtggtgtcggagaggaccccctgggcttcctggcacagtatggtctgggacctaacctgttgttggtctgggacccctctcgtcggcatatggtaagcctgtgtcggctttggaaatgccttgtcatgaaagcttggaggtctcccgacgtggctgatccccacgggctgggtgatccgggttagtaatgtcgtgtgggtaaagtgtaccccctctgcagaggttaacaaactgttcgaacagccgtgcccacggtcatgggcggatgtgaggtgattcctagcgtagttttgtttgacaactgcttgtgaaattactgttgtgaaaaggggttcgatgtttgaaaaatcagcagctgacgggatcagctaggcccgggtggccgtttgaaaagttgttggcccgggtggccgtttgaaaagctgttggccgggtgccaaccttgttttaagatctaaagattgatacattgcacatactccgaccggacgggacgcactgtctcaaccgtgtcgtttgagaagcactcacctagatgtttttagaaaagagttcaaataaaatcaattacgaaaacaacagcctttccttgaagcctgtattaaacacttatttcccctggcttgctgagtactcccgtactcacccttgctctatataaatacttccccccctgttgctgatgaagatgaagcggatcctgctgatgaggagttcttccaggagcaagccggttacgatgagttttagggtttcggcctagttcccaagtcgcgcctgtgttgtttggtccaagtcccggcttccgtttcccttttgtaatgcagttgtgagctcgggatctgtccgcagcccaacatgactgtactcctactctataataaagagacctctgttgctgtgatattctatcttcctgtgataccagcactgtttcctgggactggtatcgattaacaggttaatttggagcatcacgggctaattccagtcgggactagctcggggcgtgacatcaccacccgatgatctcttttgctggaagaaagccgtgcgccaccatctccttcagattgtcttccatcacatcggagggcgcccactgactctcgaagctttctctttcttccgccatgaatgtgaactagatggtttgatttagctcgagatacggctgaaaagagatggggaatcggagcggtggatgcggggagaaattttgtgaagtttttgaggatggattggagcggattgatgaaccctaacttcgtcggcgcggttctgtactgtagcacggagtggggaatggcgagagtctcggcggggaagacgaagcgacgtttggacttcggtatttttagggtatcgggagtactaatgggcctaggcctgtacagtacttcagcccaattatgttttcagcgtggcccgttgtgatcctaagggacttaggcgctttttgctttggcaatatgtgctcacaatgacacggcccgatgctgttaaaatcctttttaacgcgattcaataattctttggaattattatgatgcacatgaaaaggtgcctgacagaaaggtgttataccatttttttaagcttttttaggctacaggagctgttgggttaatttgagatgactggtttattagtagtcattctcctagcatgttatatgcttattttggctatggtaagagtcacagcctaggctgttagactcattaattaccataattttctgtcatttttggtggatcattttaagagtttcttgctcggattcctaccaaatatatctatttttgggccttttgagtgtttgtcactcggcccttcttgtattttttgtccttgatatattcaagttgagaagcagtcggctgggtatcttactaagtaccatgcgtgcttcgctataaaaccactcggtgcttgactatatgtttagttttttaactaatcacatagtcaagggctacacctaattaggtgcatctactcgatgcaccatgttttatttttgcccttcacagtttttgatttttagtactcggcaagctggagcaagttgaattgaagcactcggactactagtttttgtttcgagaaggttgtttcgtcaactgcgaaggtctcgggggctactgtggagattatggataccccatatctgcatgacagttatactttaatcggatatatggtaccaaatatagatagaatatctttatgaggactcggggtaggttctcaacttgtatgtcaagaaaatacccgggatcctagtcggctacgattgtattttatctataatcccatattccgttaggatatggactgtaccttgtattacggatcccttcccctatataaggagggtccgtgtgcttcttggggcacgattcttttttctcccaatcatacaatcaataacacactcggcggaattatccccggacaggagtagggtattacttctttaataagaaagcatgaacctgtataaaattccttgtctctaaacccatccactttcctagcttgatagccaccccttttattattgccgaaatcttgtttcgacagtgaactaaacaggcccttaatcgttctcctttgtcattctgtccagtgtctgtcactttgacaagacgaaatgtagcatttcagacagccagaactctgaactttctgttgggcaaaacaaaaagaactctgaactcgaccacttcatcatgtcataataaaccattacaattcacaatttagtagtactcaagaacaagtaaaatagagagagagtatgaaccagcaggagatagacacctcatatgttctgggcaggctgtacgctgacactagagagccaatgcgtggagcagagaaatgcagagagcagagaaatggggatgcaagacatttgccattgccattggcattggcatggagagaccaggcagaggagctgatgcagcatcatggtccatgcatgtcacctgtctctcgccctatgccacctacagatcctcctccattcactcaacagctactatgtcagccatgtagggcacaggaggcagatgctcatcttgttaacatcctcattagtgtagtgacatctcaaatgcagcttgcttgttaggactaaacagatgcttgtaaatgccatcagttgatgattgggttgagttgctgtctccctcaacagcacacagaaaaacattagcaaatgctgcatggtccattcatcaatcatcatcagaggatgcatggtccatcatgccattaagcttgcatccagggggctacaactacactaacaccttctcactttctgttgtcattgtcagaaaaccccccaagaacccagctagaaagacatagggattcctgatccagcttaggcaagcatgaatggcacacgcaaacacacatgcatatcgatcacacagaggaacaacacaacactagcttaggtacacgaacacaggacaaatctagttatctactcgtaggtaggagggtagaagaaagacagtagtaataagtactagtagttcatagatacttcctccgtcctaaaatgtaagcatttttgaggttggcacgggtattaaaaaagtagatgagaatgattgaagaaggtgtatgattggttgaaaagacaaagtaggtgaaaaagaatggttgtgattggttgagaggagaaggtaggtagaaaaatagcttcattttaggataaagtactgtgctagaaatagctatattttgggacggaggtagtactccagtagacagggagatccagccatgccatggctgtccagtatgcaagcaaattagcaagcaagggaggaagaagaggctgggcagccggtccctccctccattggtatttatgagaggcatctcctcaccaaccaaacagacacagcatctccgtgtatagtacaggggaataaataagcagcagctgatgcttgcattgcattgccatagaggcatagagcattgcattgcagctcaaaaattggtccaggatccacagtggtagcttgtcagaatatttcaagcaacgcaaaggaaggaagaaaggaggattgtagtgtaggagggatccaatgcaatgggcaatgaggcaatgaaatgcaatgcagcagcagaaaggcagggcattcatggctgggcacatattaggttggcacaaaaaacacaagccaccatggacacatttactccccttcaaccaccccacagcatacattgcagaagaacagagcaagtcaatgcagcatagtagcaaaaggacaggtaaaaaatgaacaatactagtagtaataataagatagggcaaaggttacagacaaagagtgcagagaggtaacaagtcaattcccgaaccaagacccccttctagtgtgaagaagggtcacaactggttcgctcttgacttctcctctcctcctttctcttatctcatctcctaataacaatctgcttaatgtcttcttcttcttcaaccttacacaaagtctagctcgatcttaacacaaaccacacactcaagctaccaagtcttcttcttccatcttattattacaaaaattcaaaacaaggagctaaccttcttcacatgcagttctcacttttgatgaggaaagggaggaagaacctaaagagggatggatggagtagcaagaaaccgatgcacgaccaaaatgcctgcagagctgatgtcagcaaattcatgaatcagctggttggtgcaagtgagagcttgacaagaccctttctttctttctttctttctcagcagaagtagcttcccaaaatgatcaaaatgccccccatggctttgcttgttggctggttgggggtattttcgtcattttgagagcagaaatatggcgggaagagaggagagatttgagtagctgttagtgttggcttcttgtcaaaccctcccttgcacctgatgaaccagccagaccgagagctaacagaaaaacaaactgcgatgttagcgaaataaattgggaggcattttggtgtctgatcccatgttgctccgatcccctctcctccaggtctcctttgctactgatcggacgccggctcacccccagcaccacctgctgaacttttgagtgcagctgtgatctggtgaatggcgttgcagacatggctgttgatcgcagtgacactcgagaggttgagcttggcagaaggtacggcgctggccagcacctgcatgccgacggtgaggaggcagccattgggaggcagcagctcatctgcattgttgttgttgctgctgctgtttcttggaggagtgctactggtttcgccattgccattgccagtggtggtggtggtgcttgagctgatggtgggtgcagcagcaggtgatgggctggtggcagggaagatggcgaagcccagggggaggagagggatgtaggaaggatcctcgccgctcatcgtcacctgaattgcgtccacgtccaccgtcgcgaacaccaccaggctcccaccatcagggtgggtgctgctctcctgcagcaggagctccacattctgtgacgagttgcttgcagcctggacatcagtttttatcaattggaaaaaggtcagctcttgttatatatctagtttcaatcagcagagggaaaaaagtaaagtaagcaactctcattatgaaatgagctagatctatgtgcatggtacattatgattgtaagcattacaaggtgtacgtgtagtatatgaaaaaaaggggctaatatatatatcagaaaataaaaaagaaagattcagacataaactgtccatgtaatgacagcaaattcagagatgcatgtgcacacagccccagcatacaccactaaaatctcatttaatatggcatattgagtcatgtacagttcaagtagccggtgttaatttcttgtccttggcattggtagcaaacagtgagtgcttgaaactattgaattgaacaacagttcttcaccagagagtgcagttacagcagtaactcagtagctaccattgctaccattgagctattacaatttatactacaataattaatttccctatctttttctagtttttactgtataagacataaacacacaacgtgtgcatattgactcatgttttcatgtcccttcaggactctacaggacggggggagatattcacatgctcaccattagtaatccataattctgcaactatggaagaaactagacaaacctagacaataagtactacataatattcttgatcagaatcatttaagagctagctaagtcgtcgtgattttgctctttaatcaaagctactagatattatgcaccattaagcacttcaattattatgatcatgctcttgaatcaggaaattaactactacaaggacgaaaaaacatggcatcattcaaagaggtggtaattgggtactcacgttaatgcgaagaagagagatgcaattccttggatgtgatccatttgcaatatgtgccacctcatgaagggagccgccgtttgacaaaatctcaagctgcaaaaggcaaattaacaaacatgaccacaacgaattataaggtgaacaacaacaattttcagtatggactgagtatattatatggctcttcattgtacctggcagcgctgttgttcatctgcaagaagctcaaacacctgctgatgggtaaaaggaagccagcttgtggagacagcggtgaggatgacaccgctgggctgtccgggctcagtgttcttccgagttgtaaccctgatagtgtcctgggttgaatccgagagggccgtccaagattgggttccagaagcactgatgttagcacagaaagtggtgatcatccgctgcgacagcttcatcatatttgttcttgcctcaggggtgcggatcactgtgaatcagaaacaaagggatcgagaagattatatcataaatggtcaggatggattttgtgaattgtgagaattcagaatccacacctctacacaaactgtggattctgaattctcacaatttacaaatagctagtggtaatgcgcacctccgaggtcggcgatgttacgggcgagctcactggcgaggcgctcgcactggcgctggaggatggagagccagcgcgtggccccgaaggcggcgccgctggcgacgtagtccctgaacaccggctgcagcggcttctcctccccgaccatctccatgtgctccacccacaccacctgcattgccattgtcacctccattcatgttcatgctcaaattaacacccaatgcaagcgtatgtacgtaccctggagtatccattgggcatgtcctggatgatgcagccggacggccgccgccggcacctgaccaccgaggcttggaggagcccctcctcaaacccttccgccgggaaatccacgatcgcccagctcccctcgtcggcgttgtgcacgcagtaacggaagaacaccacctcgcgcgccgccaccagaggcgacaagaactgcacctctgcttgcatctgcatgccatgtaccacgcgcatttcagtccccatccatcccaaaaacaactaatctaatcaatcagtagtaggggagtagtaatcagttagtaattaccaagaggagagttccactgccgaggtgaccagacgcagctccgtggtttatgatctggattgttcttgccttgcaaacaatcgacgggaacagctccatccatttgttctgcaaaacaatattaatcgacattaatcagatgattagaaatgaagcatcatatactagtggaaaatggcagtatcactgcactgcactgaccgcatcgaggaaggcgtccaccaagttgatgctgttcatgatgaccaccgcgttgtcacgcgtcccctccgccctcgccaccgcgccgccgtctccttgcttcgcgccgtccaccggccagctgaacatccgcgcgtgctcctccacggccatcacctccgcgccacgctgccgcacccacagcggctcgccggcgcggcacatcctggcgagctggtccgccgccgtggcggcgaggtcgaccaccagctgcttgtcctgctcctgcacgggcgccatcatggcgcccatgtacgccgccgcgccatcgtgctgcggcacgacgggtggcgggatgaggtcgccgcagcccatgaccggcgcctgctcggcgaagtgccgcgagtagacgttcatgtcgaggtcgagcggtggcatgaggaccggcggcggcgccgagatgcagctcagggccgacgtcgacagcaccggctgccgtccgccgccgccgccgtagcgggtggcgatgcaggccaagcggtcaagctgcagccaggaagcatatataggaggagtattatgtgttgggaattgggaatgaatggtaggtagggttttagggagctagcgacctcgtctttgagcctggcgttctcgatgcggagctgctgctcctcgtaggacatgtcggcgaggacggcggcgtggccgcagttggggcagacgacgttgcggatggcggcctggaggcggaagttgtcgctcttgaggttctcgttctccgcgcgcagaatcacgttgtccgccctgtcctgctgcgcctgaacatattcaacccagccaatgcatcatgaacatattgccatttgcatttgcaaatacagtagcgtatatatggaattattaatttgcatatatatagtaccttcatctgggtccggcgattctggaaccagaacttgacctggcgaggtttgaggcccagttcctggctcagcttcagccgctgcttgtcgtccggatgcgggcactccttgaacagcctgcatggatggatgcatgcacgccacttgtcagtatcacaatatcagcaaggtttaatggagacgaatcgatcgaaacggctggcaatggcattgaagaggaagaagaagatggagatgaaaaccgcacgcctacatctgctggatctggtgcgccgtgtggcggtggtagcccttctttttggcgttgccccccgcggcgccgctgggctgggcggcgtccggcggctggtcatggccgatgtgctgccgcttgtggtcgtagtcgacgtcggcgaagctgaggaggccgtccaggtgggcgctgcccgagccgccactgagctccatgtccatctcgaggtccatcccctcgtccttggccacatggaggcctgccatcaacccctcctccttctgcaccgcacgcacgtatatagctagtgtcatgaggctatgcaaagaaagaaaggaaaagagaaaagaagagattagcttacaggtattaaggtggcggcggcgttggagaagtggtggaagggcatggcggcggaggaggacatgaagccggcgagagcggggttggggatgagcggcgaggcgaaaagcgcgtcggcggaggaggcggccccggccatggcggccatggacgacaggacctggcagtccccgaacatcctgcgcatatgtccggccggcgatatcttcaataggagtagctagctagctagctagtggttccttctccggcgatccggccagcgccctcctgcctagcagtagtagaaaaaaaaatcaaagacgaaggagcatggccctagtcaatcactcacacactcctaactcccgagaagaagagaagagaagaagaagagaaagagattggaggatggagatggactactgcggagcaggagggaagaggagaggtggtggtgaaaggagacaagcggagtaaatggccggagtaaataccctgtcggttgttccgtggccttccttccttgatcacttcttctccttcttcttgatccctgcagctgccttcccccttgagatcaatcacggctggctggctggctggagaagaagacgatctctctctctttctcgcctcctcttcctcctcctctttatggttgcaatatcgatggaggtcaaggctaaggcagcgagcgagcgagcgaggaagaggagtaaccgatggctttggctggcgcttatcttgtctagtagctactgtgacgctctttgacctcctccccccttattccgccctcaccacgtcactcacgtcgccgcgcgtgctccccgctcactgacgccccggtcccaccgttgaatccgcaccagcggggcccacgaggcagcgaccctcccccgtcagggtctcgacgaagacccggtgacgacgacgacgacgccttctccgcggcagtcgcggggtggtccccacgtaaagcgcggaggaaaggggggacccacgtgtcactgggagagggtggagcggggtactgtagtggtgggaagggaagggagttaatgcggtaattaggagagcggattacagtgagactgacagagtaaatgctcgcgcggcaacagtgggtaagtcgtaacgctgcgaatccccgctctttttttccttttcttttcttttcttttttttttcccccacccaccggctgaaatacagacagagagaccaggtcaactgcatgcatgcgatgcggtcgatctcgtccgtccgatccagccacgaacagatagagagaggaagagagatctgggccgtccgtagcgaagccgcgttacggcgcgagggggtctctggagcagcatgtgtgcgagtggccatatcatatcgtgcagcaattaatttgtaagatttgtatgtacagccagccccaaccccggcacgcagctatagctgtaggtaggataggagtaaacagtaactgctccatatcatccagcatcatcgcccgtatctctctgcttaatttcacttttgctatagggcagtcacacccatgtcatgtgtgattgtgttgtgttgggtattcatatccatatatgcctttcctgccaaagatatcaccacattgatatcctttttatatccttttttgtctggctagttttaatttgtttaatttcctgctacaaaatacttacttgtatacatatcctcgctcaaaaaacaagaataccactccctatgccctcaaatatatggatttctgaaattatccgtggtgattaaggaaatatgtgaaaataaataagagatggttatgattgattgtgacaagaaaataagcgaaaaataattatttaaaagatgattctgactgagacgactgagaaggtggaaaagttgctactccttccgtctaaaaaaattgacttctgataccaattcgaacaagcatatgttcagatttatccctaaaagttgatttgttttcctagtacatatggtgtatgtttttaggatggggaagtattatacacatgctgacatgcatgccattatactccctcattccaaaaatctgagaactattttattctttggtttctccaaaaatctgagttatatttttagtcactatatgctaaatgaaattgttgatcggaaataaagaagccattctagtacttattgattgcatattcattggttttgccacatagtgagtgagttaattgcttcttgtttttgatgaaaaagaaatatatctcaaaattttggaaggagggagtatatattaaggtacgtacttttatagttttgatcataacttcaattgatgaatagcatgccacgttcgtttgtgtgaaatatatgtacagtatattatattgtacatagctagcaaaatacaagacatacaagtgcagaatcgctgaaaacaaaagagcacgttaagtgttaatttcagtgggtacaagaactggccgagactcttaatacatacatttaagagaaaactagctaattaaagcgggccatggtcctccatatgcattttgctactcctaaggatcagtaacacagttgctactcctaagctaatactactgctccctccgtttcaaaatgtttgacaccgctgactttttagtacgtgtttgatcattcgttttattccaaaaaaattaagtaattatttattctttttatatcatttgattcattgttaaatatactttcatgtacacatgtagttttacatatttcactaacttttttgaataagacgaacggtcaaacatgtgctaaaaagtcaacggtgtcaaacattttgaaacggagggagtacttcactattagtttatttttaatttactactttaatgtgtcgatcgactagctagctactagctctagatcatccatggaagaatgttctccaaggttgttgtacttgtgtgtgtgtgtttgatagcatgcatgcatggcccatcctcctccgtttttgattcatgcttcctatatcccctgcatgctggatgcatgagtatgaggagctactagaacagtttaattaatttgagtttggaccgcacatatatatcaaagaaaaccagaagatcagtctgttatagttgtgatgatgagtttctctaaactagtttgaagggagagcacatgcatgcatgcgtactggacaggtgtttggaaactgaaaaatggtatggcaagctagctagctagctgttttttcttttatttcgtgtgaagtactatatactagcatatatatattggaggccaataatgtttttctttgcttggattttttcgtggaatatgtccaatatattatctaaagaaaatgttcaatatattatccggtcatgcatgtttccctccgttttatcttgtcttttctgcttcaccatgttcctctagcagttgctagctagctagctcgatccatccagctggctggtgacgatgtaagagctgaggtcgccatgaactaacggtgtttaatggtcgatcagctcgagcttgttcgatcgatcatcgatgatgatgcatgctatataatgtttagctatatacatacatataatccaaccagttcattcagttaattgcataccgaccgatatgatatatatgctgatatatagagttcatttcgggggcagccagctagctgtgggcgggcggagtggagtggtggcaatctatatatcgagttgagctagctagcttaagctaggtgaggtcgcagtgtagcagggcagtggggtgtaccgtgtacgtagtacgtactggtgcatgctggccggccgggatcgatctatttattcatccaacacgtacacgtactgcttatctagtgcatgcgcaccatgccatattgcatgccatcgctacgactattcccaaacacgtatttactccgccccatgtgatctttgcgtccgtacgccccgacgcgtaccgtgcatgcatgttaaccacaaatatgctattgggcacacgcatgcatgcaagaaacacaagcagcgcacattctattcattttatcagattaactggctcttgtttttatccaccccatcatatactccctccgttttaaaatgtttgatattgttgactttttagcacatgtttaactgttcgtcttattttaaaaaaataaaaaatatgtaaaactacatgtgtacatgaaagtatatttaataatgaatcaaataatatgaaaagaataaataattatttaaatttttttaataagacgaatggtcaaacacgtattaaaaggtcaacggtgtcaaaaacattttgagggagtatatcacatcgtcttcgatctcccaagccgcacgactcactgcaccgctgcgcctccttcctggctcctctcccaggccataccaccacctgcatgtagatcgagctctcctcttctctcggcaaaatgccagcgaaactcctcatatctaattcactaccagagaaaataacttcggtgttagatagtaatccctcatcagtaccagaaatcaaaccgacactaaactgtagttagattcgaatcaaaagtttttgggattgtgaaagctggcgtgtatgcacactagtaccaaaatctgactcattgccgaatcagatagtgaaacgcaattgcagtgcaggtagcagaaacccgagacggagatgtatacgtggccgtgggttgtgcatgtgcgccaccttccccctcctgacgcaccactccacttacgccctgaaaagaaaaaaaaaaggaaaggaaacagaaaatgccgtcacggcctcgcctaaactgagctgggcctcgatggatcgatcgactaggccgaaatcacggtggcccagtccaaggtaataactaatagcccatcaacaaacggcccaaaacaataataatatcccaactcccaccctgaaatgtcgcgtcgcgtgccacctctacctttttctctcctctcgtgaactcgtgttcggtgttcgtcttcctcccgcaccgcacctcacgccatggccatgcctcccccgctcttcgccgccgcctcccacgcctcccttctactcccctcccccaccattcacagctccaccggatctcgccgccccttccgcctacccctccgttcctcccgccgcccgcccgtcgcagcagcagctgcctctggcgtccccgacgagtggggcgaccgctcgccctccgcgcccgagccgccctcccagcccgacccccccatcgacgacgacgagtggggccgcgacgacccctccgcctccgggaactctcgccccgtcctcgtcaccgacgagtggggcgagccgggtgtgcccgagccccaatccacctccgccgccgacccccctaccaacgacgacgagtggggtggggatccggcgccaccgccaccgccacctcctgtgccggaggaagacaacgaggaggaaaggcgggaggagctcaagcgctgcttggtggacactgtgtacggctccgacctgggcttccgggcgtcctccgaggtgaggggggaggtgctagagctcgtcacccagctcgaggccaccaatcccacgcccgagcccgtccaggccacccacctcctcgccggcaactggatcctcatgtcagtacttactattctactctctacacacgctctcctctacttcctttcttccttcttctactactacattgtcttcattggactacaataccactcaactactactagttgttattggtgaaatgtcaaatgctaagcttaacatcatttattagattttcattttcaatgaaaacgtttgctgttcctgaaatatgtcttgtgttgatgtcatcagcatctttttactagataactgatcgtctcaattgtgcatggtcatttacttgcagatatacagcgtattctgagcttctacctatcctagcagttggtgcagcaccattgttcaaagtcgatgagatatcgcaagaaattgacacaaatagcatgaccatagtcaatgcctcaactatctcaagtccattcgcttcgttttctttcagtgccactgcttcttttgatgtacagagtccatcaaggatagaggtacaaaattccttgctataaaatgaatcttgtgcttctttggattcagtaccatcatcttgtttggaatagagctgtttattcagtcatgaatataggtaatctaaaagaatttttttgaccgtttgtttgttgggaaactaaaaatgccatgctaccttgtttgatttcttccaataacctgtattaagtttactttgctagatatctctacctactaattctagtggaattcagttagcaacacaaatgttaaagtaagttttatgacttctgtttcctgccataaaagggtacactatgcatgcctgaattgacaagccgctaattttgtctttgatggtcgtacatcaactcaacgtcagagatttccgttccttttaatcaaaaaggttttctagttcatcaaccaagttactattagatgctacttataggcttgaacagtatggaatatgcagtttctattagatgctaggattgaacaatatggattatgcagtttctattagatgctacttctaggcttgaacaatatggaatagctgggggaggggccgagggggacctttcctggttaggcatagatatgattctcgctagctaaaatctgcacaactcgctagctcaaatcttgtaggatccaaaatgtgtatccatagatctgaagacacataacaaggggattatagacttgtacaaatatttctgcttgttgaacctgtatttatcaaggatttctacacaaacctcggtgcaccagaagcttgagatgtgcatagaaattattgagatttctgatcatcaactttcttgtgcaaatatgtacattgaccaaactgacatgttgatggtcattccaatgaaggtccaattcaaagagggaagctttcagccaccgaagatatcatcatcggtagacctacctgcagaggttgatatatttgggcagaagatcagcttgggcccagtccagcaggtgctgaaccctctgcagcaagcctttgcaagtattgcaggatccatttctgggc

SEQ ID NO: 5754 - DNA, 5916 bp, Oryza sativa
tgtctatatcgaagtgtgatgtgtcagaatagtttgtttaaagaaatcatttgtcagaatgttgtggcatcctactggatggttctttagatgagaccaattttaatacgaaaaggaaagggaaatcattttggtaacagtaaataaatgctggacatgatttttatgaacttcccctatccctagatagggggaacactaaaatgaagatggaatgaatggttttaccatattggtagtaagaggtgcacttaatctgattctttggtatttcagaacggaggtcagcctaataaccatgaagcactgagcaatgagtggctggaaatgggtcaatgccccctggcaaagtcgtacagggcattaagtggtgtcgtgcccctcgtcgcaaagatgatgacacccccggctggtatgaaactgagatgcccacctgcagtagttgccgcccgtgcagcactatcacgcacagcctttgccaaggggcttcgtcctcagcccctaccgacgaaaatactggtgatggcgttgcttggtatggcagcaaacgttccccttggcatctggagggagcacacggagaaattctcagtgcagtggtttgccgcagtccatgcggcggcacctttcataggcatgctcaggaagtctgtgctgatgccaaagacagccatggcgcttaccatagctgcctcaatattgggtcagacaataggtacgagagctgagcgtatcagattgaagagggcagcaaaggttgctgctggtagccagggtgatgctagcaccagaatgagcctgaaaaccgggagatacactgatgatgtccagttctgggatccgcttgccctcagagttgagagtaccataggaacaggaactccggttcttgttccaactttccattgatgatgttgccttgggtttgtttcttcggtcgattattgttgtattcattgtgttgtgccttagtctttatactaaatattacgttggatgcttctcccatgaatctggggtccaaatttcagtgtacaataaattgcacgtgtacatttccgaaaacaagtgttactagtgcgctaagaaatacgcttagagctgagaactaagatgatgtccttgaattcgaccgatttgcatctgcaactggctgatcttgcagtcgttgtacaacttttcttacaagagctattcggatggcgtgaaaactgaaggaactttgtgcgtgcgtgtgtgtatagagtactagagtttatttggtcaattaagcaccggggcgtagctacagcctacatgagctgccacgcactttggtcaaattgcccagtacacaaaccacctcatcaatccatccacattcgcacaccaaacgcatgcaatttcaacgacaaacacaaccaataagtctaactgcgtgctcaacaatcgtaatatggcactagttggttaacatgtgacaggaaaaatcaactagtgctaggactaggagcatcgtctttgattgcaagcagcccccttgccgtgcgaaatgcaaacgacaggcaggcaggctcattacctagtatatctcatcatctgggacatcaggtgtaaggaacttctgtggatccttgtacagttcctcgtagttgtatttcggcttcaccctctccgggacaggctcaagtgggatgatactgtctccgtcgattacactgtcgatgagcccgtaatcaacagcctcaagaggacccatatatctgtctctatcaatgtctttctcaacctgctccggagtgcgtcctgtgaaacctgatataagccggatgacattcctcttgttagtcaatatctccttggcctggacctcgacatccaaggcctgcccacttgcgcctccaacgggctgatggatcattatcctggtgttgggcatggcgaatcgcttgccctttgtgccaccaccaaggattatagaagcagtggaaccagctatgcccaatccaatagtggaaacatctgccctcacgagctgcattacatcatagatggccattgttgcgctgagagagaagcaggaatcagtcagaaaacacaaagatatttgcatcaacagatttaccagactgccaagaacccaagagctatttaacgtaatgacctgcctacagctacttgctcttggttgatgaactagtatctcctacttgtattgcaatacataatcaatcttgtaccagtgctattaaggtacattgcaaacaaaacaaagagaaggcattcctacactaacttaataaacaaaaaaaaaggcaatatcctgcaagggaaacataaaattaagcatcactctgaacaggacgtgcatcatttataaaatgccaaaaacatcattaccaactccgaactgcggcaagatctttttacagaaaggaaggaagcaaggtttacattcacataatattgcctcatcagcccatctctttctttcttgtggtgtgtgggatagcctctatcggatcaaatagtgttgttgatttagaatctactccctccgtcccaaaatataagagattttgtgtgcatgtgacacatcctaagactatgaatctggacagtcacgtccaccaaaaatcccttatattttaggacgaggggagcaaatacactatcaattcaaaacaaatggttggttgatccataagattcatagcaggagctctgatattcattataactggaacctggaaggactgtttatttacaaagggaaaaaagaaaaggatatagtctgattgatgttattcatcatatagtaagtagctcaagacttgtcttttacccacaatttgcgttatcagaaaataactaccctataagtagcatacttgtatgattcctaatgcgcttaattaatttcgtgctccaaggttaaagcaattcaaagcaaaaggagaaataaatttaggatgcgcgacctgagtgatcccccaggggagttgacgaagaggcggatgtcagagttggggtcgacggcgtcgaggaggaggagctggctgacgactgcgtcggcgaggaagtcctctatctcgttgccgaggaagacgatgcgctcccggaggaggaggcccatgacgtcacccccggctccggctccgggcgagtcggacgactcagctcggacgccggcctcccacagaggagtagagggggcggaagccgcgcgaggggggttgagactggtgagcctgagggggcgcggtggcgcgacaacgcgcaggcgtcgctgctgcgtggggcggagagcggccgccgccaccgccaccgccgccgccgcggagagggaggcagtggcactcgcactcgcagccgacatcgctcgcaattatctctatcctgccctcggctaacctacttcttggttgggttgcccttgtctcttgccctttctctttgtctcttgacgggggtttggggtggattttcttataaattactatatattacattcgtcctataatataaaaaaagttttatagttgaatacgtttattaaaaaaaactagtaatatatccatgctaaacactacaatataattatatttgttttaataattcttaaaattttatgttagtaaaaatatttttatatggtttgtgcacgtgaacttaaaatcaatttatgccgtacatcaaatcaaatatatttcacgtaaatttgaatttgtttccttgcacaatattcacgctgttttttattcctcaactgtcgatcttcaccattaattttacctgtgaatatttttgcaaaataaaacggagaacgattcatatctcacttttatactccctcgggattaaccaaaaaaatccccttccgagacgttcccatgtccgaagggcctgagacacgatgcatcgaattaccccctggttaattggtaaacgaatgtactagtggaaagaaggaaaaaaaggcagcagcagagttagaggtcgaggtgaatggtcttccctccgtttgcctgccaccttcggagtttttttttcttttgagaaaaggagacaaaaacaccatcgagtactcaagctggtaatcagttatacttactgctagttcagtaagaaacacagttagtatcacgctcatacagttctgtccacatcccagcttgccatacgagaacaaaggatatataacaaaacgtagagggtgccatcaaattgcattctcgcgtcctacattagtctagtcagcttcttcctcttcctccatgtcatttgcacttattagatgcccaagtgaaactttggcttttttcagttccggtgacctcagtgcagcagcaatgccatcgcttttcctcttctcgccaaaccccgcttcatcttcgtcttttgtagcctcacccgaggacttgtcatcgtcaggcttctcagcaatcgttgacacagaatcatccttcttctccgatggaagctcacctcccttcttcaatgactgctcacattctttcaggaaatcacgaacatcatccttctctgcaacatgtagagccgtctgacccccttttgtctttgcggcgatgtctgcacctttcttgactaaatacttcacaagctccaggtgggagttctgcgaagcaaagtgcaacgcagtgaagcctttcctgttctttgctttcacagaggcaccagatgccagcagctcacggacaacctctacatggcctttctgagaggcaaaatggatcgcagcggtgtcatccatagctgcagctccaacatcagctttgtgcttgcaaaggcacttcacaagctcaacatgccagcccatgctgccaaatggagtctaaatgaacaaagaaacaccacatcaaggagataaccaaaaccgagaaaattgatagagcttgagcaagcttatcatatctcataatatgatacactcataaggcagaagcacaagtgataatactgatgcagcagtaatggattctgctcaagaaaatcaacataaacacaagtgatgcagtcagttgtttctagttgttgaaaaagcaagtgacagatgaaacaaaatggcctagtaaccccccctgtagagatagtggaatagatgcctcacacccaatgtggggaggtgatctctcatatatagctgagttacaatcaatgctagtgagatacacaagaccaaaggtctaggagataaacagcctatagactaataaataattctaatacccccaaatcagaagaaaacttgaggaacaaccatgtagtagtagcctagtaggaggaaagtatgaaaagtatgaatggagagatagacagcacaacagctgtaaattaacgcaagcttaaactatcttacacacaggagaaaaaatgttggacaccagaccaggtgaaacaatgtgtggccgaggagaattgaacactgcctgatggagtggcatgacaacaaccacagtgctatgtgcaattctttacatttggagtaaattgcagattggtccagcttttattaccaaagtgtcactttgggctacctctaattcaatcttttcacttaaagccaactattgttaccaattctttgcaatttgggctagtggcccacctgtcaataggcttatgagcttttctgtttctccttcttccttcttccttctctctttcggtttcttcttctccaggtcgagcaacaacagagagggagagggatagggcgtcggtgctccggaggaaggggaatgatggcgttggcggcggagtgtgttcccgagtaacgcgcaaccgaggagggtggtggaaagcaaagggagtgagggagatggccggaacggcgcagaaatagctcagctccggccggcatggatggtggcggtggctaaaggggaggggaaataggaaaaataggttcacctc

SEQ ID NO: 5755 - DNA, 2312 bp, Oryza sativa
cacgcagctttgcatgccttcctgcgacaattgagcgaggcagagttctctccctttcctttaccaagctaggtatcggacggagctcaacgtacgagaataatattggtggtggattgagagcgagctcaagaatgatcgatggctgtgtgggagctcgatagatgatggtgcttaattcccagttgacgtacggttggatctatatatagcaccgaccaagcgtgaggaggagctacagcctacaggccagggacacagcaggctgccacacatgagctcgccggtgatggccacaaagctaaggagagggagagacagaaagagaaaaaaagatgaaatccagatcgaggggtattttgatcggctcgcgcgctaagaaaaagaaatgcaaaaattcatttaatgatcaagaagaaacggtgttgtaacgtgttgacgcccttcttataataatgaagttttaacgaaacccggcctatctgtgagatggcgtttcagcaaacctcacttttaacaatatatatatagcagaatataccaattattttctcctttcatttcgattaggattgcaggtgaattaattggtgatcgaatgcaatatctcgatcatacggatggacggttgctgtgtgcgctagctagctgtgcacagaccacagtacaggcaggcgggcagatactagacagacaggcaattttggttatggttttccgccgatcgaatcaaattaaaccaccttatataatttcctcgtttaatttcatgtgcaatagtatactagtaggccgatcgactgaatatattcaacggagtgagtacttatttcatttataaagtgaggaagaaattaaaagaaggagaggtactccagcggccagcgagcaactgtatctccggtgctgcacgcacgcacgacactgtttaattaatgcacctccctcgcaaccgaaatgcgagtgcatccttgaacgatcgcctggcctgtttaatttgctccatcactgaatggcacaccaacagcttgatatagccaggaaagttgacttactgctgtctgctggtgaggtgggatcatccatgacttatctgatcacacacgattttcttttagaaaaggaagaacatcgtgataatatttgagaaaatgaagagctagctaggaaacatccagttggagggtgaggaacctgatcaaattgtgcatgggcattactccagcatcgtcagtctaccaggcacagtgccgtctaggggcaacaaagcacgggcttcgattcactgattcggaaaacatggacgccagggaaatacaaattctgcacgtggttggtcattcaaaatatggtttagacttgggatcggctcgcaaccagagaatgacaaaatgtcactaaccttctttgctgtagagaagtcaaaatgactctccacctcttggccaattgcatatacacgaaaagaaaagaatatgaaacccggtaaccacttggatggcctatcatcagctcgatcttgagctttgggaagcaacccaaaaagggcaagactaatgagagacactagtaaacatgacaagtgtttcaaaatggggattgcgcactttaatcctcgtcgtcgtttgggtgatctgaaatgagaggaagcgatgaatcttagcacaaggagaccatgacagccaacctctttgataaaattaagaaagaagctaggacgtacttgggctctggcatgagcaaagtgatttcgggagttcttaccaaacagtgtatatgacttataaggtgcttttccccttttcacatccttaagggttgtattttctcccaatatatatttaatgaaagagcacaatcttatgctaattaattataatctaggaaaagaaagagctaggaaagaggtcacatgttttgttatcctaatgagcaaaaaaacacatccttttgttaaagctagtatgtccatgggcgatcctagatgcatgatacgtacatactcgtagagtcaaggagtagcaatgaactggtggctacagaagaggagatttacaattggttgaatggcgatggaatggtggatgtgcagatgcgtcgtccatatatgcatgatcacgtggaagtggagactggccagtgggtaatttaagtgtatacgtggccaccttaattacatggtggcttaagctccaggtggcccgactgatgctgatgggcacaaaattaagtgtataagcttttactccagttgatgataagtaattattaagagtaagaaatagttaattaaacatttaaagaagcagtta

SEQ ID NO: 5756 - DNA, 12111 bp, Oryza sativa
ttaacaaatgattggtgcttgagcttgacacacttcgtatctaggcaggtgtacagtcgaatgacctttacctttttccttcaaccatgtaattacataaaacattctatcaaaagaaccccattccgtatcctctaaaagaacaggtccagatctttaaagacgagcgacttctccttatcgctcctctgatcctctcttctgactaaattgcagataactgtaccttgaggtcttgacttctagagttctacttctactgttattaccatgctactgccaaaactcaaggggaaccaaacatgaaaatacatacagacggcagacaacatagcaacatttgcatcaaaggcaaggccgcaagtccgcaagcttctgcccaaatcaaccaaccccgtttgaggaatgtttttctgtagctctggattatctttcatcatgaatcctgcatttttgtaaagaataggccaattagaccccaagtaaagacacaaatgcatgatattaaaatgtctactgacatgataaaaatgactattcatcatgtattcatgttaaagataggatattccttgaaaatatgttaacgctacacacaacatctgttaggtaactttctttttttttgcatattaattaactattaaaaaggaacatagtgttgccatgttcatgtctggaaatttaagcatagggttccaaaaaggaaacaatttggaaatgggctaaacgtacatatcctcttaacagtgatgcttagcaatggaatcagcggttcagcagtagtagttcccgaatagagattaaatgaaatcacaaaaacaataatatatgactcgaaattcactgcaagcattagcttttaccactagacccttgttgatgtaggtatttattttttctcatttgctaaacattaatttgcatggcatattaccctttgacagtgccgatataacattttatcacagtgacctcagcatgacacaagtccctcaggaaggtgccaaggtgacagcagggagtcagggaggcatattcaacagacctgaaatacacagtggtactgtaaaataaagaaatgaaccaaataagaaaaacctttaaccataacatgcctgagctttgtgctttaccagatttcatgttaagactgtatcctgcatacttttgaaaacctcacgtacagatgaaggatctatatcacatctaacaccctcacctccatacagcacaaagagatactctcttgatgacattggagggggcaaaaggtcagacagctccactagatcttgtttaggtggtaaaggaatatccctttggttcaatgaataatacacatcggccataagaagccagacaaggtcagaatcaatagaagcaattcccgtcaatgcccttatagcagcttctcgcaggccgatcaaaccactataggcaattcccaccacaagtccacaaaccttctttagtacacttcccagagcaatagcacttcgtttgttggaagatatttcagcgagcatgtccagcactgcaatctgaatcttttggctggatatctcagccataggctcctcggatgtaagtgaggtattcctatatggtaaaataatagctttctcatccatcagtgccattctttttcgttggaagggagataaggttagcaacctccaaataacagatccatccttatgaaaccggcgtacaaaaaaatcgcctccagatatctgaatgactttacttaacacctctgtgcattttctgacaacagactgcaaataccataataatgtaagctataaggataacatacagaaggaaccaacaaggcaaaaatagatcaaaagcatgcatacaaagtaaacaacaagaaaatgaaaactccctattttagcatattcctgatacatgttttccaaaaaaaattgtatagggcccacttcatgcacactgtttttagactagtcagtccaaaagcattttattttatgacagaagaaccaattaaaccctcaacgatggcaacaagtgtacgagtgataagaagaatcagtatatgacaaagttataaggttgcaacttcaggtggtgtttggggcgtattgtatacctaaatactcagcaacatgtattgcatccatctgattattgatcaataaagatgatcaagaacatggaaaaaggtctggcagcactatgttctgttctgaaaatgctgaatatagttgtaatctgtttacttcggaatttcttatgcaaacttgtatctcacagagatgcaaatatattgaggcattggattatggatcaactccccatggcaagtcatcaaacaagatctagaaatgcctaggtgtcatttaagaggtgaagttactgaatgaggacaggccccaaaataacaattacttcctatgtttcacattataagatgttttgggttttgaataaattcatgcatgggttcatgtatgtaccttcatatatgtgtctaaattcatataaatgttagtgaatctagacgagggatagagatgccaaaatgtcttataatgtggaatggcgggagtagtaacatactaacatgtcacgggataatggaagtattggtaaagtatttgagtttgatcacacaaaagtacctggattcacaagcaactataggacccttctaatccaacaaagtaaacagtgaaaagaaaattacgaacttaaaaagaaactatggtacagtcaactccaactcccaaagtccaatgtctgattatggtaacaaatattgaatttgtgtgaaattataatggcatatttccaaatacatgaataccagtggcatatttcaaaactagaaattttttaatggtatgtatccaattaaccctttgttaaaaggaaaaggcaggagttttgatgttctctatattgatcgtgttatggtttcagatgctctacagatcaagagccctcaatattcatttcgtgcaagtgagacatgaaacaccaacaccaatgaatgaatgtaagcatctgtttaaataaaaaaaagagagaaaagaaagctaacaatctttttgttgcaaaccaatgattaacagcatgcaagaaattgtaccactgagattttgttcccaagacaaataaccaagtatggccatagcttgttcacagctgggagtagtctattctcatcaacatcttctgcagcatccatgtcatcatgaagttcatccactgataataattgaattgtctcctcaataactgctttgcatcgactttcacacttataggcttcctcaaccttggctatagacataatagcattctggacaaaggaatttttttttaatgtaacttcgtctatcataggctcatagcgaacttcatgccaggatgaatgaaaagaactcaagcaattattccttataattagcattaaagtgttagcataaatgcagcataccttttccttttatttactaccaaatgacaacagaaatggagatataagggctatgggcatgttcgttttgatgccaaatttaaccataccaaattttggcaatgctctgtggcattgccaacttttgctaagctagaggtgtgtgaaggtatgtttgttttgatgccttaacaatttttggtgtcctgttaggtaactttcttgaatcaccaaattttggtatggaaagtcatttgggacgtttggattgtcacgtcgccaaattttggtaaggatgaaaacagtacaaaataaaaaaaatgctccctatttcaccagaattagaagaaattttcttcctagttgaaatactttagagcttgacatttcttgtgagaaataatggaagataggtcaagatatcataatatcattttttgaaaaaagaagtatttggaacgccatgaaaagatgaccaaaaactattgttagacgaagttgtaggagaattatattgacattgcaagtaaaatatcttatgaaatggaaccaaaaccttgtctacattagcaggggaacaatacctctacaatgtcaagggccacaagacaagctgcttcttttgttgaagatagaagtggagtggaagctactacacaagagccaacaagagatcctactattctcctgtatcttctcatctcatttagtttgcaaagtagatcctcccaatattctaatcccataaaatcaggctgagcatcaacatccattctttctgatgcaatcgcaaagagaggttatgagatagggactacacgaataaaatattgcatagagaagtcagaacaggagatgcatgcaatatttacttccataattattatattgctacctaatgtagaagatattgtaattaattattaaacttatcaagctattaccaggcattgcacaggtatccctctcttctctatcaaactttggattgcttcaccttccgatctaaccttcataaagaatgattccacctcatctggcaaactaacagattcatgtcgagatgccttagcaacctcagaaacagcctagagaaacccaaaaaagaaaggggaaaactggctctgttagacgggtaatttaagtaaagcgtaaacaaaatatgaccccaataaagttatccttggtgtaaaagatcaacttagcaatctaagaaatgagagttaaaatgatcagaccagcgagaaattcaaatccccttaaagtagaacaatagacagatacaacatgttatcacttatcaaaactttattttttagtaccttcagaaatggaacagttaaatgcgggtgatcatgcctaccaagaacctccagctctgaagaaacagcacgcatctgcaagaataaaaatgtattgacacagacattacaaaaaaggcacctgcttcaagtgcaaaaggacatcaaaatttgttccgattaaaggataacatttgcccctttctaccccatactaattacatcctcttagccatatattttaaagtgctctgtaaaaataagtgtttccacttttcagagcaaataagggccaaccaatttgactggttcagcaattagaacaacagatgttgggcacttctcttacaacaagactgtttttttaaaaaaggaatatacaaagaatggattaaatggatatttctgattctgagattcatagccaccctaatcatcataccggttcttccaggaatggtaaaatgtcacgagaagcaccaatataacacagcatagaagcaagaatatcagggacgtggggattgagatccaaatggtgcaactgtctgcaaagagagtcaacaatgtagtcggcatttgccacaacaaattgaccaacctgtacagggaggaagaaaaaacataaatgcaaagtccagaagataaggaaaaaaaaacttgcaagaaataaggccatgtattaccgaacagtaacctccagcagcagcgagtgctcttaagacagcatctgaagcaattcttatctgtacacttgagctgataagttttcgaagcagaagataaagtgaagagtgcataaatccactacttgcaaaatcttggccaagcacaacaccaaatactccaattccttcaatcattacctgataaaaaagatcaaaaattgagcttgagcaaacaagacagtccagaacagaacaagcaaaaggagaacttttgaaagaccaactggcaaattgtaagtgcatattacttggtgcaatgcagcagtatcacgaaagaaatacaagggaatattcaactctgttagggatagttcagagtccggttctgttggaagatcccaaacttctggtgccatatattcatgcagaatacttccgatacaatgaataatgtggtttttcgtgcccatttgctcactgatcttccaaatatttctgttagtgcctccattattctggccaaaagcagttaactgatcattttgaccaggtgctcctatcatctgtgctgagttcttgttgaatatttgtaaacatatactgagggaacgatcagatagaccatatatgagctcattgagcatgcaaacagcagagcttgcctggcgtagtgtttgcccagcatcacttttcatgtaccacctctgcccaccactccgcagctcagtgctcaacctcctgaactgatcaagtaggatatcaacaaagagagacagtgatgcactggtttcttcgcctagtatcatcaaaagcaaccaaaacataagattcaagtaccatacgtggcaccactggatacaaaatgcaagactgagattaaccctaaatgataatgttggcaggcatacaacatagtcgagaaagtacctgaaactgccgatagaccaacaagcctaacaattccagcaagagcaaaataaagcttctgactattcacgtgaacaaaccatggaggtacatggggtaactcatagtcaactgaactatgtgttgtatttggcaaaccattatcatggataacagatattttggtggctgttgatgcaggcatggcatgctgaaaaccatagttttcatctttaggataggcaccactttttaactcagcaacagaaaatagatatccaacagacagtggctttgaaacaattagcttgtccatggaaccagaaaattgtgaactttgactgatacataaacccaaacagtcaaataaacgagctgcaacaacctgaaagtggaacaggataaagttaaaagcaaaagaatcattgatccaacaaaagggatgtagataacttacaggagaacggtgaagataatttgccaaaaactgagggcctgcataataagttagagctagtagtcttctagcatgcgaaatagcagtggtctcctcactaccaagtaccatttgtggtaacttttcaacaaacctgttttacatgtcaaatggttgagaactttacccaaactatcacttgtgttgttaacacagagtaaaatagaacgaacctggtaaaaatatcagaaacatcatcttctgttagaactctctcaccctcaatgaaaagataatcaagagagtcttgcgcagcctcagacacagatgctgcatcatcacatgccagaatacataagcattcctgcaaccatctttgagaagttaaaaataaacatatagcataattctaggcacaacacctcaacaagtgataaaatatcatatgtgtacttaccacaagcaacatcttgcttttccttagtgtatagctgcagctggacaaaaggactcttataccattaaccaccgacctccttactttctcagatgaatgaatagaaagctgcaaaaaaaaatagctctaatattcacttttgatggtccaaataaccactcaaacactaaataaaaataacagagaagaaaaatactggcatacatgtggaaatgtcgcagagagtaatttatcaacattattagctgtttcctcaagccatttttttgtccgtttaacatgcagttctcttctatcagcagaggttttactgccatcagcgttcacatcttctgtagcttcaccactgccgatctgcttagataaagttttggccggtaattggcgaagcatctgcaatacatgttcactagaactattgccaccagaacaaagagccacattctcaacgctggaaatatcaagttcactcaaattctccttgtcatttaggactacgatcaaggcctcggtcaatccaagaacagcttgttcaatgctcaaagcactcccagcagcaccacttatcatattcttagatgtgtaaagaacctttccaagacgactgacaagtccaggaaggaaaaaggcaagtgcatccgcagaacctacctaaacaagaagagtaagtttactgaattgtttgtacaatgggaaaacaaaataatagcctcggaaggagtcatgccccagagaaaactaaaacctctgtaacatgcttttacacagaggtatcatgccctaaagaaagataatggatatactaagaaaaacagtgaggctgattcttgctatgaatcagaggaaactgggtatctatcatctctgaaggttggtgtatctaacatcagttcaatatattttattctctctttttttaaaaaaaaaaagagtaaaacaactagccttgtcatcctctcaaaaagaacaaaaaaaaagcctggtcattatgccaatgcaacagctaaacagatactgctggttttttttagccttcatcttttcatggctttacagttctgcaggagaaatgacagcaaagaaaaatgctaatcgacattatgattaagcatttcctgaacaacacaagtgtcttggctagtgacccatccatgtgttgcttgcaaaaaacttctcaccttgccaataagaacacgcagtgtaatcagtgattcttttctaacatctgcactgccacggtgaccccttgatgcctcaagttctgatgactgaaagtgaaaggtgtcatatcaaccaaaaagacaataaaagaaaagaaaaatcaagtgaatcagaagataaaagtaaatgaatgatgtacctggagaagtagtgaaagccagtgccccacagcagctgaagcgttttgggactggaggaacgcaagcaagcactcttctggttgtgccgagtattttggggtaactatagtgccaacttccaaacttgtaaaagatagggctgtagacaatgcagttgcttgtttgcaagaacaagagcggtccaagcatgggtgtagctgcagaatcatggctctgaagcatcttatgatgccttggcggaattcctctgaagcctccgaaggtgaaagcattgccccgaaagttaacttctttagcaatgcaaccatctagtaaggcaaacaaaaagaaactcatgtcaaatatgtgatgagactcattaagattaggatccaggatttcagaaaagttctgcctgccatgagctacacagcacacaggaaattatggtttcatactgtcctcagttgttcgagatcaattgtcagataaaataatacacagattggttaacaagttattactaatgcagctaatgtgtacaggttctagttggagatgatagaatattaaactagagaatcatcaggtatacggaagcagagaaaaaaaaatgaagcacctgattgaccgaggtgaggcggcatttggtaaggagcacctctaggcacgcaagaccgccttcggcgatggcatcaaagatgtggagctcccctgacgcattggcttccttcctgcattgcaccgcagcatccaggagcagcaccaatggaaacacggtgtaattaggcacccaacacagctccaaacaagccatacattagcacaaccaaccaaataaacaaaaaccaacacgcgcagacacttggggcgggggagaggagaggagaggagtgggtactcgaagcagagctgcaaggccggggcgggggcggagcggaggaaggaggccatggcgcggagggaggaagccgcggcggacttggaggccggggtgcgggtgcggatgaggtcgagaagggtgacggtgtggggcttgagctgagcaaagatggcggctagggtttcgtcggaggccgccgcggccgcagcagcagcagcctccatctccatctcggaggtggcgacggcgaggaagcttggctgcgggaggtagcgcaaggactacagtcgagttgctgctgctgcgttggtgcgactgcgagtcgacaactcgagagacctcctcaggtttcgtttcgttcctctggagaagacgacacccacaggccaaaggccaggaagcgtacttcgactttacgtgtacatgtatggcaaacggtattgtgatttccgcatctaggcctcgttggcatgggcttctaccccgggccatctacgtgtacggacggaataatagtaaggaataagttcacttttgatcctcaactcataatattggtgtaaccaaggctccatcgtgtccagttttaactgacaagacaagttagcgtatgacccatgtagcctccgtgtgttagtgactaatcttcttccttctctctaccattctcccctcttttgcctatctctctctatggatagtatattttgttgttaattattatgtcgattatggaaagattagtgataattaaaatatttttttgttaattaaaaatttactgttctcatctcattctctctcatccagccgactaaacaaattagttgttttcctatctagccaatgattaagagataacgtttggatgatttttgtggtaaatttgtacaaagacaacagtgtatagtagaggtagatcctgccgagtcctaaccaatacactccagtagtaaggtagaaagaaaaacatacagatggcaggtgacaattaacaagaaggtactactccagtacaattgtacggctgtgatctttagggcctgtttagttggaaaaaaaaacctacataccacatcggatatacggatatatggacgcacatttgaagtattaaacgttgtctaataacaaaaattgcagattccaccaggaaactgcgagacgaatttattaagcttaattaatccgtcattagcaaatatttactatagcaccacattgtcgaatcatggcgcaattatgcttaaaagattcgtctcgcaatttcctgacgaactgtgtaattgattttttctacatttaatactccatgcatatgtccacacatttgatatgacagcgtgggaaatgttatttgggaactaaataggcacttagtctactactttcccaacttcatatccctcgttttttcattatatgcatgcttcccaaattgttaaacgacgtgtttttaagaaaatgtagaaaaattgctttaaaaatcatattattctattcatgaattttttagctaatacttatttagacatacgctgaaccgtcatttcgtattgcgtgcaatggaggaagtgttcacaacttcatccggctcagccgtatcaagccagcactacatacatatggtgcaggaactctgtgtttagatctatgggcgtaaagtttagatatacggacatatatttgaagtattaaacattgtctaataacaaaacaaattacagattctgccaggaaactgcgagacgaatttattaagcttaattaatccgtcattagtaagtgtttactatagcaccacattgtcgaaacatggtgcaattatgcttaaaagattcgtcttgcaatttacacacaatctatataattgttttttattttatttatatttaatactatatacatgtatccaaatattcgatgtgacatggtgtaaaattttaccagggatctaaacaggcccctactccaccaaaagagcacaaacatggtaacactaacaccccccgtgctgttctacagctgtaacaaacacatacttcctccgtttcacaatataagactttctagcattacccacattcatgtctagatttattaacatctaaataaatatgggtaatgctagaataaatgaatgtagacaatgctaaaaagtcagtacattataaaacggagggagtaataaaaccaggaatttacacttggcgcgtacaaaacggggaaagccatgctggcaaattcattccttccttgcatacacccacagccaaaaggagttacatgtaaatcttatccccttgggagtatttttttcccccttacaaactggtcccctgcagcaaatgcaaaaggccacccagtccaggagtccaggcaggcaaggcagaggcacacacacctcacctatccccttcccttccgccgccgccgccgccgccgccgccaccacgcaatgcagcgcctctccgtgggatcggcaggcggcaagccccgcctcctcgagggcggcgcggcggcgggggaggaggaggaggaggaggagaaggccgggaaggcggggcgggcggcgccggacaggtccatccacatcatccccgtgctcacgctcctctgcttcctcgtcctcttccttctctcccacgacccggcttcctcctccctcg

SEQ ID NO: 5757 - DNA, 14741 bp, Oryza sativa
  unsure (1)..(14741): unsure at all n locations
agagaaaggtgctctcacagctggtacagtagttcatcaccttatattattagctacacgtaaaacgagaaacatgattagcattttaattaggtattaattattaaaaaaattaaaaatgattttatttgattttttaaagcatattttggcccggtctagttctcaaaattttttgttttggggtgtcatatcggatatacggacacacatttaaagtattaaacgtagtctaataacaaaacatattacagattccgccaagaaactgcgagatgaattttttaaacgtaattaatccgtcattagtaagtgtttacttagcaccacattatcaaatcatggtgcaattatgcttaaaagatctgtctcgcaatttctgtcagaactatgtaattggtttttttcacatttaatactctatgcatgtgtccaaacattcgatgtgatagatgaaaagtttttgttttgtgaactaaataaagtttttatatagaaaatttttgcacgaatattagtttgaaaaaacgtactgatggaaacgagaaatagctaagctgaaccagctgtttagaacacggccctaatgtctttatttgattgatcatctggcatcaatcaatcggctcagtcgctaacaacaaaatactaatactccctactccctgtgtaccataaaaaagaaatctaaaattaggatatgacagattcttagttttaaaatgtattatatttgtattagattggttttcagacagatggagcacatctcaataaaaccaatttaaaattggatttaacataattctatattggttttttgttaggacagagataaatttagaattgaatttaattagtttttattgggacggagcacatctcaataaaaccaatttaaaattggatttaacataattctatattggttttttgttaggacagagataaatttagaattgaatttaattagtttttattgggacggaagaagtagagcgctgcaccctcctcaaatctcaatgatcagtatagtagcagagagatagagagagagccaaaacacacgggttacaaaactccaagcgccaaaaagaaaaagaaaaaagaatgtagtagtaggctgtagctggcctgcactgcacgcctggagtcgtgcagccagaaaggcaaggctgcacacttgctgccgctctcgcctccccatactcagtacagtagctaggaagaaggcaagggaagggcatggcgacgctgccggacctgggtgtgtccgccttcatcaacatcttgggcgccttcgtcttcctcctcatcttcgccgccctccgcctccagcccatcaacgaccgcgtctacttccccaagctctacctcactggccagcgacgccaccaccctcaccctcatggcttcgtcaacctcgacctctgctcctacctccgcttcctcgcctgggtccccggcgccctccgcatgtcccagcccgacctcatccaccacgccggcctcgactccgccgtctacctccgaatctacacgctcgggttggttcgctccctcntacacctcccttccttttcttttttactacactacttctactggtattccagattaattaagcaccaccgtatacgtagttgcatttgctttccctgcactgcacattattatgggcatccctcccttcctagtgcaactcttgttgatttgtgtctagtatgtgctcttgcttgcctgtgtctcctaccaaagtcgtcctgctcatacagtactactatggacttcaattatggttgtttccagctgcatggagtatgcgataggaattactcttcttgcttcttttttttgtgtaaagaaaatccttgcttgctacactactgtagtcctttttattttctctgccgctaattaaggagctctttcctgaatactttcgctcatttccgattccatccacaattgattgattggacctcacaaattgaggaggagtgctgcttgccaagaatattactatattgcttgtatgtgtttggtgatgacgacattgtggccgtgatggatcccgcggtaattagttactggactagttaatactccttcgttgaaaacggtgtcggcggataggataatcttaacttgatgtgcaccgcaattcctggccttgtttcatggaggaagagccatagcctgtatattttgtttggggcctagcctacacgactggtactcctatgaattcataatgcagttctaaattaaaatatacacatatatttctaatgtttggcgtgttgctcatgttcttgaatcatgctcgcccactacctttggaaaattgccgtccaacttttgtttgtctccaacgattcctcaatccgtgtgatggtggggactgctcttttacaactggagatgcttttcttgccactttggaacttgcatgaaatttactcaaaaagttttacctatacaggatgtactagtcatattttgatacttgtactcttgtcattctcttatttatagtactgtacagaacaaagtatatataactccaccatcacgtggggggaaactaactaactaacttgtgctagaagtttgaggatttttcagccatagttcctcaggcagcgccttggaccttttctttttccctttccccactttcctgtgagcaaaagttttgagtttgtgccatgagacaaatgatcaaattttatttaaccagtttctatgttttgcacactaacccttttgttttgtttctttggcagcctcaagatatttttgcccatcatgactgtcgccttgctggttcttattccagttaatgtctctggtggcacgttacttaatttacgaaaagaaattgtctttagtgatattgataagctttccatatcaaatgtcaaccctggatccaacaggtttgtccacaagtatcttaatcatgaactcttagcagtgttaattattctttggcagagctcgtataattgttgatgactgctgtacttgaactctacattgctctggctttatgctttcatttgtagcattgcttgaaattgtctgaccatgtcctctgcatttcacttcaggttctttatccatctattaatggcatatgtgttcactttttggacttgctttatgctatacaaagagtatagcaatgtggcatttatgagattgcacttcctggcttctcagaagcgttgtgctgatcagttcactgtaagtgcaaataactaggcaatgctatatttagttctactacaatttatgtatcacaaccaagctccactaaattttttgtaaaggaatagaagagcagttgaacaaatatttggatttaatgtctatagtgttgtcttgctgactggggcatactccttttattgtgatataactcaatgggataccatttaatattgagatccatagttatactatatcacttactaatatattttggcatggcaggtgattgttagaaacatacctcatgtttcaagccattcaacatctgaaacagtggatgaattcttccgtaggaatcatccagaccactatcttggtcagcaggtacctaatcctcaccattgcttatgcctcatcatggatttaaactggaatgatgtttaaagctctacttgatttctgaccgatattcaatttacaaaccatggttattgatgaatatactgaccgcaaaactaacctcaatctggatgttcaggctgtttataacgcaaacaggtatgctaaacttgtgaagaaaaaagagaggcttcaaaactggttggattactaccagctgaagtttgaaaggcatcctggaaaaagaccaattggaagggtattttataaacgttgatcctgtcctttcgtttgcatcaataccaagttcttggacaactcgttctgaattcatgttccccccaagaaatgtttcaagcttgtgaatatttttggttctgcagacagggtgccttggtttctgcggtagagaagtggatcaaatcgactattaccgtgctagaatcagcgagcttgataagaaggtagagctagaacccacagtgtcgtgtttcttaccattcacaggcactcagcataactttgcaggctgttgcatgtatgtttgtatgcatgagtgaggctcttgttcagttttaacttttaacacaagctgtttgttattgtgatctttttagcttgcatctgagcgtcaaagagttctcaatgacccaaaagctgttatgccagttgcttttgtgacatttgactcgagatggggagctgctgtatgtgcacagacacaacagtcaaagaatcctacccaatggctaactgattgggctcctgaaccgcgggatgtatattggcagaatcttgccattccatttttctctctcagtatccgcaagttcctgatatccattgcagtttttgctctggtgttcttctacatgatacctatagcttttgtgcaatcacttgccaatcttgagggtattgaaaaagttgcacctttcctaaggcctgtgatagacacgtaagttagctcccattatatctgtcgaggttctgtaaattgcgccccttttgctattcactcatcatatggcttgctgtataacttgcagaccagtggtgaaatccttcctgcagggtttccttccgggtttggctttgaagatttttctgtatatcctcccaacggttttgatgattatgtcaaaggttgaaggttatgtgtctttatcatctctggaaaggagggctgcttcaaaatattactacttcatgctggtgaatgtatttcttggaagcataatcgctggcacagcttttgaacagctaaatgcatttttccatcagccaccttcacagtaaatttcttcgagcaacctctcttttgtcacatatgctactgtttccttgtcctcaattaactaatgcgatcatggcatatacgagtaaatatactgatatgatccttccttccaatttctgcagaataccaaggaccattggagtagctataccaatgaaagctacattttttatgacatacataatggttgacgggtgggctggcatcgcgaacgagattcttcgagtgaagccgctggtgatataccacctgaagaacatgtttattgtgaagacggagcgggacagggagagggcaatggatccgggcagcattgggcttgcagagaacctcccatcactgcagctgtattttcttcttgggcttgtgtatgctgtggtcacccccattctcctccctttcattatcatcttctttgccttcgctttcctcgtgtacagacaccaggtgagtctgtctgtcggtcatgcctgctgctttggctttggctttggctttgaaagtgatggttgttttggtttggctattcagttaggcgctaaaatgtgttttttttttgtttagatcatcaacgtgtacaaccaagaatacgagagtgctgctgcgttttggcctcaggtgcactctcgcataatagcgagcttgctgatctcgcatgtaactctgtttgggctgatgagcaccatgaaggctgcctactccaccccgctgcttatctttctgccactcctcaccatatggttccacaagtactgcaagagccgtttcgagcctgctttccgcaagtaccctctagaggtgcgtgcatctctcattactctctttgtgaaatcaagaataatttgttcaagtatatgcaacaatgacatctaattaacgagggaataacctgtggtgttggcaggaagcgatggagaaggacaatctggagcgcacgtcggagccaaacctgaacctcaaatcgtacctgcagaacgcttacctgcaccccattttccacatgtttgagcagcagcagcagcaggagcaggagcagcaacgggaggagaaggtagaggtgcgaatcgacaaggcgcagcaacatcatcatcggcaggtagaggaggaagaggaggagagcaagagcagccaggctacaacacactactaccaccatcaccatgagcagaccacaacgacgacacaccaccattaccatcagcatgagcatatgagccactaccacatgggcccctccgacacagctgactcaccctcgccgccgcactttgtctaccattatggcgtcgacccttgataatcgcccagatagtctcttagcttctgaatcactagattgtttgttcttttgttttttccttttgtcaattgggggtgatatttttattcctctaattaacgaccgactggctgctgataattatttaatgatctgttgtaaatgcgaatatgtgagttgattgagtgtgtatatgcacgtaaatcggaaaaattccaatttgactccctcgaatataggccaggtatgcctgatccgtatccctcagcctgtaaaactaggtataatatcgtttccttgttgatgacaccaaaatgactaaggagagagagagtggggtagagaaggaagaagaaagagaatgtggggaggatgatatatgggctctttcatattttttttaattttctcaaatgattgggttgccatatagacaccatgtcagcaaataccaccaacaatactatctgggagtcattttgcaccgattttaatagttggagttattgtacctgattttatacttgagagatacaaatcacatccaatctatatttcaaattgagctttttccatgtaagttctctttgtttctttttaggaataagtcaatttgccgtccctcatttttccgtcgaatttaatcggcatccctaaaacctaatattagaaatctcaaacccaaaccgttcaaaatcaagtcccatgatagtatggatggttgttttagttgtcatggcatcctagtcacaaaaagaaaattaaaaaggcatgtgaggcccacatgtaatcggacctcaacctttcctgacctatcctcttttcccactcactccacctctcccttctcttccctaggagttcgccaatggtgagaggggcagtggccgatgagcttgttcgcgagggcttcggtgatctgcctgccaggctgaagcggtttagaaccgacagaagaggtagctagagttgtaggtcaaggcggcaaatcaccttggcctcgaactcttcagccgctgacggcatccttacagcacccacggcggacattgagctatgcctcccaaacaacgtcctctagatcatggtggccgaagagcgcggagtagtcaagggcaccgcgcggagaagcaaagtttggatggagctcgatcaagttgaggaagctaggcggggtcgatgggctagtcaaaacgtcgtggcctcaagatcaagcgcccacatgtgttgtggaggtctcccacttttttttggcacataaatgcctaattagaacgagtggacaggtcaatttgcaatgtcagggaaaccaaccatttatactgctgaaggaacccggttttataagttgttggttctaataaggtataggtattgcgatttagggatatcaattaaaatcgagtggacttattccttgtttctattgggctagaatgggctgtgaaatggcggattggggccgcaggaaatattagtccataggaggagataagatgatgccaaaaccaaacacgcaacttataatttgaaaagcgcagagagtcagtcacaggctcacagcgcaggagcctcacgctcgtcttccttttttgcgtgaacctcctcctctgtctcctctcctccctgcgatttctttttttcctatctctctctctcgatctctgaagtctcaactgaaagcagccgccgccgccgccgccgaccttaatttccgattccttccacccgccgcctcaagaaaccgcaatgcagcccgacgccgccgccaccgcccaccccagcttgagcttctactccgccgccacgggcctctacagcagcctccaccctcccctacccctcccctccgacccctctctctccctcgtcccccacctcttctcccatctccccctccaccaccattccctcctcgtcgatgcccccaccgccgccaccctctcctgcgccgacttccgccgcctcgtctcctccctcgccgccggcctccgccgccgcctccacatcgccaggggatccctcgtcctgctcctcctccccaactctctcaccttccccgttgccttcctcgccgtcctcgccaccggcgccgtcgccaccaccatgaacccctccagcgcccccgccgagatcgccgcgcgcctgcgggacaccgccccctccctcgtgctcgcctccacccacaacgccgctaagcttccgcctctcgccgccccgctcgtcctcgtgcccgacaccttccagcagcaacatgatgatgatcagttcgacttcttcttccacgcgctgctcgagaccgaccccgaaacgccggtggagatgggggtgggggtggggcaggacgacgccgccgccgtcctctactcgtcggggacgagcgggcggagcaagggcgtggtggtgacgcaccgcaacctgatcgcaatggtggagctgttcgtgcggttcgaggcgtcgcagtacacgcggcctgctcgtgacaatgtctacctggcggcattgcccatgttccacgtctacggcctctccctcttcgccgtgggcctcctctcgctcggctgcacggttgtcgtgatgaggaggttcaacgtcgacgacgccgtcaaggccatccgcaagtacaaggtgacgcacctgccgctcgtgccgcccatcatgtcggcactgctcagggccaacccgcccttggaattggattccttgctgcaggtctccagcggcgctgctcccctcaaccacaccctcattcaccacttccttcacgccttcccccacgttgatttcattcaggtccctccactccttcccctctctctctctctatatatatatatatatatatatatatatatatatatatatatatatatatatgcattattaattgcttctgtcccatgtttctcagttagcgtatcaattaaaaatgtggctgctaatgaatattttgtctttatctactgcatgtactacattttactcagctgttagggaatagtatatatgtggaatgggctctgaaatctccaatatatcttcatgcaatgtttgcacaggggtatggcatgactgaatctactgccgtaggaactcgcggcttcaatacatgcaagcacaagaagtatgcctcagtaggtcttttagcccccaacatgcatgctaaaattgttcatctggaaagtggttcttgtctgcctccaggctcttatggggagttatggctccatggcccggctataatgaaaggtaccgtgtcaaaaaaaatttactttattcaaaattctactatttttgcagtctgatacaaaagatttgataattatttcaaaagttaattaacaagcctaattattcacatatgctggtatgatctggctgcttggaatcttatatgaaaactacgcttttctactgactctagtttcttctgtactctctgccatcttgtttagctcctttagataatgtggttattcttgttgactgaagataacatggtcattcttttttagataaaaacgtggggtggtcattttttttttccactgcagataacagaatcattctgattttaaccttgtgtacttgctctgccgaacactaatcgttgcagtgctaaacactaaactctttttaaatacggtactgcattaggactcccatgggttgccatgcttagccaaaaaagaaagattcccaatgcatgctgctctcgaggaatagatttagctgccttcactaagtattgttcctgagatcagttaggcaaggttcctgagatccatggggaatggggatttagtttagcttccatactttagtctgtaacatcatatcccgctttaggtttgaatcatggtatgctgtacttgttacctctttgtatttgggttgtcagaattttgcttcgtcacaggttacttgaatgatgatgatgatgctttcactagaaaggatggctggttgaggactggtgatattgcttactttgattcagatgggtatttgttcatagtgggtcgcttgaaagacacaatcaagtacaaaggatttcaggtatggcctcctgtagcaggccttggaagttggaatacaatatcgttgttcttgtttcaaggaatttcaggtatcatgcaaggaagtctttggttgtaacaaattggtgtatttttcttgccttcagatagctccagctgacttggaagctgttctgatccggcaccctgaaattattgatgttgctgtgacatcgtaagatttttatttctaaacagcgtgatattatagctgttttatctgttatcatgtccttcaacgtgtttctttgattctctcgttactttttttttttgacattgattctctcgttacttagtgatgaagatgaagaagctggagagatacctgtagcttttgtggtgagaaaatctggaagcactctttcttgtacgcatgtcatggagtatgtggccaagcaggtaagaacaagaaggtcctacacaacacaacactcaccatattttcttgcttgggaacattacaagataataataacagcaagtgcacagagtgcattcttgttagctagagtatcaaattccagtaaaaatggatcactacaagctttatgcccacctgtgcaaataaatatggcagatattagttagtctcaagtcgtgttggtcagtgtgctcctctgcatccagcccacctgttttgaaaacagagatgtggttgttgtcagttgagcccccgtgtgtaccgatgggaatgtgtaactgatatgagcctgtctgtcagttggtttggccgcagccatagaagacattgtccatccagaagctggttgttctttgaccctgcccatccaaattaacaatatgtctttttttttcctgaagtaataatccttgggctgatgctgtctagtagagtgcttaccaagtagtgtgatgttgtatactgttatggtgggtgcaggtggcgtcgtataagagagtgaggaaggtaatattcgtggaggcgatacctaagtcagctgctggcaaggttctgaggaggcttctcaaggactctcttgttgatgcttccagtggcagatccaggctatgatcagagaagaagcaacatttacgcattcaatcaaagattcattttggccgtcaagttaggccaggcctcctcccgtttgttaaaacgaaaaagcaaaaggtccgggcaggccttcgttccaaagattttttttatttagaaaaacaaagaaacaaacgaggtcagtccaggctggcttgtccagcagcatgcctgttaatttccctgtagaagagtagatcctgaccagaagtggtcaatttttatgtattgttacttgtagtcgctcatgggtaggaatatgcttaagagcatatgctcttggaatactggtgggattgatgaaggtgtcaatgatataatactatggttgcaaacatatatatgtaatactattaacttgggccttgttatcgatcatctggtattttgttttctgatggatggtaggatgcgtttaaatcgatctctgtgtatctatctgctcaacaaactccagcgaactaacgaaccaactaaccaagggcaggcatcctaccaggcccctggattctaactattttgttttcggtaaacaaggcaaaagaaagagattgtaataggaggtttgtttgcttttttttttttgtttctagtcgcatcgcggcggcgtcgtggcgaggctgtgggtgcgtgtcctccgctgcatattattatgccaccgcggacgcggataaatgatggatttgctttctttctttgttaaaagataaaaaaactgaagaaacacatctctctccaagagtctgctgattcaacctcgccctcgcgcgtataatggagatgatacactcgcatcgcatcgtatcgtatcgcatatataagttgtcatgtgagtgtgtgtgtgcgtgtgtttaatttaccttaataataataataataataataataataaaatgaataaaaaagaaataaaggagacgaagaaggcgtgtttgaagcagtgattcgattcgagtagaacatgagacgggtggcggattatgcatatgttgggagtaagtaattgatgatgtgtaaaatattaaagagagagatactaacagtgcgtagtgtagaaattacgcgtgacccacctggagtcggagtcggagtcttgttccctttttattgagaggatcccctccctcgtgtcgacacgatcgtccaaaatagggaagagggagggggttcttcttctcctcgatccggttgaggactttgaggtagagagaggcagaggcgacgaggaaggatctgatctatcgatggcgcgcgtttcgcattccagaaagcggactagggctccctccaactccaactccaagcccacttcacaaacccaaccgccgccgccggagctcaccgaccgccctgtccgcgtctacgccgacggcatcttcgatctcttccacttcggccatgcccgcgccctcgagcaggccaagttgctgtcagtttctctctcttctcttctttacattacattacatggatccccccgatcgatttctcttggatctgggcctctatgttagaatagatcgagagatctgttcaattccaattcctgattgctcatggcgatcgcaggttccccaacacgtacctgctagtgggctgctgcaacgacgagctcaccaaccgctacaagggcaagaccgtcatgacccaggatgagcgatacgagtcccttcgccactgcaagtccgtctccttccttccttcttcaccttaccacatacgtacatggattttcatcaactgctcttactggattctagtattacatatcaatatatatgcaacaactgcatttgcattggattggactagactccttaatcaacacgtagagaacagaatttggattaacaagcacacaaggaagccaccaacgtttctatttccctttcctagccacaatattatgctcgcggcttgagtctcccttctgttgtgctctttgcaaactacatttctggattaacttatttcaaggggcctcttaatctctaatttagtgctgtaaatttaggttccataattacttctcaccttgctcctctcagctactttcatagctccactgatcctggatatttttttacatcagtcaatttttttccttccctcttgtgttgtgctgatatcaagcttcattattgtctgccttcttagatgggttgatgaggtcattcctgatgctccatgggtcctcacgcaagagttcattgacaaacatcagattgactatgttgctcatgatgcactgccgtaagtttcagcagcacaccaactattatcgaattcccattttttgtccctttaatactgtgctctttcagcttaactgaccggagttccttttttttttgccacagttatgccgatactagtggagctgctaatgatgtctatgaatttgtaagtcagagtagctatatttgctactagtaactacagatatttctcttgcattgctccttactgatggctgtcttcatgtacttaggttaaaaagattggcaaattcaaggaaacgaaacggacagacggtgtatccacatcagacctcataatgaggatattgaaggactacaatcagtatgtcatgaggaatttagcacgtggatacacaaggaaagatttaggcgtaagctatgttaaggttagtctcatctctgtgttggtttaccttcatcttcttgcagacaaattcagatgcatttttattatttgcatggttttgctgcttttgcaagtaatgacatgcttgtttatgggttcttactatcattctatcaggaaaagcaactccaggtcaacatgaagataaataaactgcgagagactgtaaaggcgcatcaagaaaaggtaaaccatgcatgtgactctaagatatttctgctgtgtcacatggaaggacagggagttccccttgtgtttacgactttacagatatcctgacccgctgggtaaattatttggtgcagttgcaaacggtggcgaagacagctggaataaatcatgaagaatggttggccaatgcagatcgctgggttgctggtttcttggagaagtttgaggaacactgccacaacatggtaagtttatacatgaaacttgagacaaggttgccgagaattcgtcgacagccagattgagggtaaaatgcaaaattatttggacgtggtacccaacactgattcctcgttggtatggtcaggaaactgccatcaaggggcgtatccaggagaaattgaggaggcaaacaagcagagggataattgggggtctaatgcagcaaccggtggcagcgtaataagttgtagaggagagatgacgttgagttggagtaagctgccctggggtcaccacggacgagaaatnnnnnnnnnnnnnnnnnnnnnntgggcgcaaaatttctct

SEQ ID NO: 5758 - DNA, 8238 bp, Oryza sativa
ctctctctctctcttttctctcgtaagcccgctgataggtgggccactagcccaaattgcaaaggattggtaacaatagctggctttaagtgaaaagattgagttagaggtagcccaaagtgataatttggtaataaaagctggatcaatatgcaatttactcttacatttgagacaaagatagttttaactgtgtagtggggctgcttttaggaagtttaagctatggcaaggaaaaacaaattccacaaaaatgaacctgatattagtctaacataaatcatggggatacattacagcaggccttgcaagttgcaacggcagttgatgggctgccaaataaaaagtactagtactagtatactggcgataagttgtaaggatcaagcgcatgatgaatcagcagagtagatacacagagtatgatgaatcagcagagcagatagacggagttatgaattattcgcagcaacaacagcaagtaataatacacagagtggtgtatagcttccatcccaaagacctaggtttcgctaaaattaactcaggcgacagaggggaaaataagtactccgtgcgctaggtcggaggaagggaagggaagggaagggaatcttcttcttacggggtgcgagagaggcgatctctggaattgagggcgagagggttggcctcgcacagagactccgccgccgccaaatctcccgaccgcgcggccttgtgcagatgcaagtcatcctcctcgcctcctccgcggcctcggcctccacggccacgaccgccgccgccgccgccgccgccgccgtgacgcctccccatctctacgctgcagccgctccggatcagagaggaagaaggatgggaattggatcgaacaaatgatgggctgctgctctgcctcaattgctgcccaggctggcggcccattaagacagggaatcttaacctttatccttatctatatatctcgtgtctatctctatctttaatattataaaaattagaaatatttttgtcaaaattttaatatgccatccgtctttgaattgaattttaattttatcatcagactcttatatatcctcccatatccggccttcatcaccacgtagtgggcactgtgagtccaactttatcgttgcaaccatgtatataacatctcctccatctttaaaaaccggtgcaaatcgccttctttaatggattggaaagcggtttatactgatatgacaggttgacttggtccaaacatactgatgtgacagcccagtcatcaaaagggttaaaaatagaagtgggtccctaatctaagtggcaaaggataaaataaaaaaatatgggcccacttgttagtcccacttttcctattcttcttcctctcttctatctctctctctctttctcagccgccgccgcaaatgctgcacacacgccaagaatgaatcggctgcgcacggcagctgtgctgaggccggcgcggacatcccatatgtgaagggtgcagccatggacggcagcgagccatggtgttagtgcttgccctttttcagttgcctatgtgcaggtctgcacgagaggcccaacagagtcgccagcggcgagaaggaggagtgggccgtggcgtatgtgcggttgtcgttgtcgtcggacgccatctcctactcctccagcatctccacggacatgccgctctatgagccccccgaggtaaaccacatccttctcgatctctgcactgccatgggttgatgcgacgagatgaccggaattcatgcgcgtcgctcgtgcgcgtgtgtgtgcaggtgtcgttcgacgagtacctcctcgactgcgcgcgcatgttccacgccatgttccccgacgagagcaggagccagcgccccagcgacgtaagcaaaccaaaaaccaaaaccactcccgaagtcctgttcgctctgctccggcaacgacgctaaagcttagctgatcctgtgtatgcgtgcaggaggagtggagagtctagatgctgtcgctgcatgtgtttgtttgtttgtctatttgggcacgtagacgaagtgggagctacgtgggctggagcgcggctacgcatcggcgagcttcgaccttggcatccgcgggtcgctctacaccgatagaagagtgcgcgactaagactgatgggagaaaagagtgcgcggccggccggtgaccctttcccccgcacgcgtcacgacctgcgacccctcctaggcgcgtcggttggccactccgcccccacgtgctgctgtaaggtgagagaagaggtagaggaaagagagaggtggagaggtaaggaagaatatagatggaggaggttgctgacaggtgggaggtggggcacacaagctgattcagtcaacggggtcaaaactgccacgtcgacgaaaccacctttctaaccgctgaaagaggcgatttgcactggtttttaaagatgggggagtcgctatacccggttttatgattgagggaagttatttaactagagcaagagttgagggaagcagtatggacttattctacttagaaaagagccacatatagcccccagcccaactaactaatccctagctcggtagctcccgaccccggcggccgccggcgctcctgtctccggcaggtagcaggccgcaggtggaagcgcgcggcgctggcggcggtgagcaggcaagcagcggagtacgggacggcgtgtccgcgcgacttcgcgagcgcgagcagcagcagcagcaggccagcagtcagcagaggccagcgcgagcaggagggagctgagcaggttgcagacaggcggcccgcggccggccgccggcgccagcgacgccacgggaggtcgggtgcgtgcatactgcctgcagtctgcagcagaccagcagcaggccggcggctgcaacctgccaatctgcaaaacaactaaacaaggtatgcttatcacttatcagtttatgcaaatatgcaattgtgattacctaagtggaaatttggaatggctcaatccattagcaatttagcacagtttcatcttgtgaagttgtgatgtatttctcattatttctctatttctatatgaaacttctttagaatacaacataatactatggtattataatattgtatgagacatgatgtgtttatgccgacgtttccctcaatttttcattcctggattcacccctgcttttcaagatgcattcatttggccatttaggcccagatagtctaagttaaatcaacagaacatggctcagatcagttacaggccaagttttcactacccaataaacaaggccagtttaacttacatagccattttactacagatcttcatagcatactatgtcacatacaataaaattactaaattcttggacttcctcatcagtttcccatttttaagttttaacaatgcaaaagtgccttactgtcatgcggtgagtctccttgattcaatatacgcatcacatacttgataggtgtatactggcagcaaaacttttagctatttactccaagagctgatgataaaccaacaatggtcatggaattttagctctcttcttcagattcttccacttatcctactccaaccacagcacgtagatcgatgcggtggcactaccttctatgtgtgttaggctcccatctttttgccaaatatggaaaatacgtcatatggcgtattagcaaaataataataatttgtaggtaaaacatatatatatatatatatatatatatatatatatatatatatatatatatatatatatatatatatatatatatgttcttagcgacttaaacgacaatcttcgacgaaaaaaaacttcaaaaccaagttttaaaatttaaattttggcatcggttgatgctgaatagagtaaacgatgggcgcgagggagagatggctgcgccgccgccgtgcacggatgggaggcggccatggtgtgattcgaaccggattctagcaggaggaagacgaaatgggccgatacgaaatttcggcaataataaaagggggtggctatcaagctaggaaagtggatgggtttggagacaaggaattttatacaggttcatgccttcttattcaagaagtaataccctactcctgtccggggatgattccgccgagtgtgttattgattgtatgattgggagaaaaagaatcgtcccgagaggaacccggacccctccttatataggggaaggggtccgtattacaaagtacagtccatatcctaacggaatatgggattacagataaaatacaatcgtaaccgactaggatcccgggtattttcttgacatacaagtttagaatctaacccaagtcctcataaagatattctatctatatttggtaccatatatccaactggaatataacctccatgtagatatggggtaaccataatctccacagtggcccccgagaccttcgcagttgaccaaaataatctccaaaaaacaataatccaagtgcttcaattcaacttgctccggcttgccgagtgctaaaagactgtgaagggcgaaaataaaacatggtgcatcgagtagatgcacctaattaggtgtagccctcgactatgtgattagttgaaaaactaaacatatagtcaagaaccgagtgattttatatcgaagcatgcatggtactcaataaaatacccagccgactgcttctcacttgaatatatcaaggataaaaaatatgaaaagggccgaatgataaacactcaaaaggtctaaaaatagatatatttggtaggaatccgagtaagaaactcttaaaatgatcctaggccataacccttaccataatcaaaataagcatataacatgctaggagaatgactactaataaaccagtcatctcaaattaacccaacagcttttgcagcctaaaaaagcttacaaaaatggtataacacctctctgtcgggcaccttttcatgtgcatcataataattccaaagaattattaaatcgcgttaaaaagaattttaacagcatcgggccgcatcattgtgagcacatattgccaaagcaaaaagcgcctaagtccctagggatcacaacgggccacgctgaaaacataattgggctgaagtactgtacaggcccaggcccattagtactcccgataccctaaaaataccgaagtccaaacgtcgtttcgtcttccccgccgagactctcgccattccccactccatgctacagtacagaaccgcgccgacgaagctagggttcatcaatctgctccaacccaccctcaaaaacttcacaaaatttctccccgcgtccaccgctccgattccccattcctctccagccatatctcggaccaaatttaaccatccagttcacattcatggcggaagaaagagaaagcttcgagagtcagtgggcgccctccgatgtgacagaagataatctgaaggagatggtggcgcacggcgttctcccagcgaaggagattatcgggtggcgaccggcgtccggcgaagcattcccgaccccggacacacacgaaatcatggtatttgctcatttcttctatggcggattttctcttccaaccttaagattcttccgggggattctgaacttctacaggattagcttgcatcacttgaatccaaactccatagtgcatattgccaatttcatccatgcctgcgaagcttttctgggcattaggcctcatttcgccttgttccgccgcatcttcttcctcaagccccagccaaacaaaagcaaaccatgcgtcgttgcgggagctggtttccaactcagaggaaccttgagccaaaaatatttctccatgcccttcaaaacctcaaacaaaggctggcatgcaaactggttctatgttcagaatcctgagcccgcagtccccgagtactgctgtcttcctccggtttaccaggatacatggaactcattgcctatgggagatgaagctgctcaagcagtagaactgatggagaggatgataaagctgaaagaatagggccttcaaggagaacagatcacccggcactttaccaagtgtcggttagctccaatcaaagaaagatctcgcacagccttcgaatttgacggcaagcatgacccaaaccgtgaagatccggattctcttgacttcaaggtcatgaaggaaaggatgtataagatcttctcaaacgccatcgttgtcagctactcacacttgctgccagtcgtaccgttcaatgcattcaatcctcctccaccggtgcgtattcatatacttcaacctttctcaaaatatgatcttgttttcttgttgaatcatttaacaatgaaggatattacacccaggaatttgctttgatgaagtcggatcccccaatcgctcaacgccgatctccccgccaccaaactgggcaagggagcggaagaccaagaattcggtatgaaactcaaccaagtgcttctgatccagtcggccagtcagattctcgaaagaggaagctggttctaagtgacgacgaagccgatgataccaccaggaggcctgtagaccgagagacgaccaagaaactaccaaaacaggctactccaaggaagaaaacatccagtcgtcctgtgccaaagatcaggaagtcttctaggtgcaactcatataacgatctctcttgtattgatgcgcacccattgcggcaataatactgataatcaaatttgcaggaaaccatctgatatagacccgtctgggaaagactctgacccaactaacatggacacaagtttttccaaagaaaccgggccaacagcagagaatcgtccgagtgacaaacaaccggcaaccgataatgtagaacccagcaacgagcccccgactgggaaccagtcgactgaagctgaagtcggtgctaaccaggagcccccgactggaaaccagtcggatgcagggccaagccaaaagattcccgaggttgaagctcaaacgaacagtcctctcgggaaggatgctgacaatgaatcagaaaccaggtctcctgtgaagacaccaaagtctactcgtccccgaccgggaatcatcacaggtagacacgctatctgaaatcgttttgatccaacagactttatttggctgcttcatcttcattcatggatacactagggccaataattggtgatgaagaagaaatcctccggatacaagcagctgaggattcactccctccgattctggtcaagtggtgggatgacaacatgcagcctcaagggatcgtgataaataagcaaaaagaggacgaggagctatgtctactgaagaaggcactaggtcaggcaacccgcattgtaaatgtaagccctctggtacctgatctcaaccatcttgtttgccatttaattcatgcgctaattaaactgttttgtagaggatttgtaacaccctgaaaattctcccaacgaaatcaaaacaccaaaaatacagattttcaaaaactttttaagtaataaattgcatcatgccgattttattcgcctatttcattggattttgatctcggaatttattaatcgcgaataatgaataactaactaggaataaaccttaaaaatcaagctggctaaataaataattaaaatataaattaaaataaagattaggtgggattggaaataaataaaatattatcgcgaccatattagcaataattaaattttagtacgatggaatgagaattaaccctaattaaaaattcaaataaattatataaacaaaatatgagtgatattaaattagggtgaatttttagttagtataaaacaaatatggagtaaacttcatttatgcaaaagttagaatttataggactatatttaaatagaaaatgggctaaaatcgggataaataggaaaagttactgttcattgcgtcataggtgttcgatcgtggtccccctggccccgcccccttccctgccgcgtgcgccgcgtcgcccgcccgtcgcgcgcgccgccgccgctgccgcgccgtcaccgtcgcgtcgccgtcggcctcgcgccttgtgccgccgcgcgcccgtcccctcgcgcctgcgccccgccgcgcggccgtcccctcgccgtcaccctgcgccgctgccgcgccgcccattccatcgcgccgagccctatgccgccgcgcgcgtcgcgtcgccccgcctgtcacgccgctcgctcgccacctgccgcgtc

SEQ ID NO: 5759 - DNA, 11271 bp, Oryza sativa
  unsure (1)..(11271): unsure at all n locations
cccccctccctccctccctctccctctctccacctggtttacttttttggcaccgcattacttttctattttagtaaatttatgcacctaaagtttatacacctcaagtttacacatctaaaatttagagaccaaaagtttataagtcaaaagtttatatatccgattcaaatttgaatttgaattcaaatactttttatatatagtatttctatacatctaaagtatatacacctaaagtttatacacccgattcaaatttgaatttgaattcaaataattcaaatattttctatatatagttgttaacagtgaaatttggtaagcccaaagttaccatcgatttagagtcagtatcggcttcaaagttctagaatcagccgatgggagtcaagtcgccacgatgtcgtgttcttggtggagtcggatcaatcaaaggaagcttatctagaagagttcgagttcaagaaggatgcgacataacaattatctattaattaggcatagtttattagtttccttttatcttaggaaagtgtgtttagtgtccgataaggactttatcttttcatttttagtttctttcttgtccgacaaggactagtatctccctatgggtataaatatgtacagccggggtctatgtaatctatcaatctatcgatcaataatactctcggcgtatcaccactctcttccctgaggtttttacttatcttccggcggaacttgggcacctgacgcagggctgcatcggctttcgatttccagcgaaggggtaagtcctacgttctgtcgggccctggtgaatctgtcggctacgttggtgttgttcaaggctgcatcgattcgatctcttggatcgctctggttttattgatatatttgcctacctaatatctcaattctatctctaattgcattgtgattagagacgcatcggtttagttgggactgtctcgattaggtctgatctcctgtcttagccgatatatctctacaatcataatgctgttctaaatagatttgttatatccatcacattagatagatctatcagctcatcgagtattagattatcatatacaatctcgtgctgcatcggttaggttcgatctactagattgttgttgataatataagtcttgttaagccgatagattcatgctaatgttttatcggggtgctagctgataagttatctggacgttgcatcggcttgtagggattgcatatacatataagttggatttagccaatggcaacaaaggttttactgtttaatctaatcttgtggatcttatgacatcggacctccagccgatgtgtgctttaacctttggatcaatacttgttctactatttcatattggtagccgattggtttctactagattatattactatattatattatcatcagccgattgtctttatatcattatctacattggacatatagccgattgcttaaaccctatcgctatcggctagtatcggtatcggctatcggctggaactactccatcggcttgttagccgatcggctgtttgatctattatttgcaaatcttgtcagttgcaggattaaactgactggcacgcccgcatctcatcaacctttggacctgcacagaagctaagcagatctccaggccggtgtgttcgattttttcgtcaacaatagtatttctatacatctaaagtttatagatccaaagtttataagtcaaaagtttacgtacccgattcaaatttgaatttgaattcaaattttttatacataaatttttctaacttttttggttttttaaaattttttgtggtgtactataataggaaaagaaggggaggaggaaggggagaaaggaggggggaccgatcgcttaagcgagcgatcgnccatcaggcgccccctcccttccttcctctcccttttttaaacgttactataatgtattttatatttgagatgatgggtattatcatatttaatttaaagtaaattattttgatggtatataaatatgttaggtaggtttaatttaattaatatatcaatttataaaactatcattttggtgtatgagtttgtaaggtacatactccgtacgaactaaggtaaaaaagacacaacacaacaacttttatcaagttagacgtgggtttagaacatgacgtacacacgtgaaatggacataagactgagacatgctatatttataaacttgattttctgtttcattattctttgttctatctcaatgtttttatattttctccatgcaatccttaggctttatagaactttttactgaacagacgcaagcctatgtggcattcttgtcactaaggttgtttggttagtatacccacattaccaaagcttgccatacttaatttagctaacatgtctaacatgtggccaataaattcgaagccacatttcagccataggagaacaaacttgccacacttttacgtgccaatgacatgtgggacccacatcatgatgaaggaatcttgccataagtgtggcatgaaccaaacagatgtctaacttagtcgaacttggctaacctaagttgtggcatggtgagacaaactgtggtagtgaaccaaacaacccctaacaccatcactcaactcctggttacaaatttagacatagtgctacatgttcgtagctcggatttgattatgtagtaaaataatcaacatttaaattaggaggattaggtttattaatattctgtggccttagtttgcacagaggcataataagttcgaatagtaaaacgaatattttacaaattcatatactagctacgtacaagctgttggtctggctaattaacctcgtaactttttcactaacacctgaagagtactaattttcccatgcaaacctaataaattttgtgtaaataaccttactaaaatatcaagcaatgataagagtaaaattgttggctctacttatattttttttcttttttctgattacgacctttatatcgtaatctcgtaatttttttccactctatcaatataactttgcacatttattaagaaaaacaatttactctttaatttacgtgaatggatggcatcaagacaaacgggacctggctagctagtaggaatagctagcaagctcagctcacagtgtatatgaagcacggcgtgagtgaagatgacaaaccagctgctgctccgttattgttatctcttcattatttaattacgaatacttctccgtccttgtttgtttccaggaagaaaataataattgaaatgaaatgaaaagggataaacattggactttagaagatgcgaatgcgacgacactgggtgtgcagagacaagcgaagccagtactgcagctgagtgtgccgtacagccaagcagcaggtcagttctgtggatatgtttttctataatttaaagctgcatgtacgacacgtacattaccaacgtgttgcacacctgtgcatctctaaatccttccttacttcctttggtcatctgcatagtataagagctactagcactacctctgtggagttattaagtaaatttctagcactgataagccgctgataacttgcatgttctcaattaaatgatggaaagttgaacggtgatttacacgggcgttccaaataataacaatttaatttttccacttaattagtaagaaaatcttgtgttcaggagtgagggcctcactccctagcacgtaaaacaaagcagtgtttagcgtatgattaattaagtattagctaaaataaattttaaaaatggattaatatgatttttttaaaataactttcatatagaaaatttttacaagaaacgtatcatttagcagtttgaaaagcgtgcgcgtaaaaaacgagtgaggtgagttggttaaatggagataagaattcggcctaaatcgctacagctattcttttctaccaagctagctactcccttagtcccataatataagaaattttgacattttgattgcactgtttgaccactcgtcttattaaaaaaaattacaaatataaaaaacaaaaaagttgtgcttaaagtacattagataataaagtaagtaaaaaaatagataataatttttaatttttttaaataagatgaatggtcaaacagtataaacaaaatgtcaaaatcccttatagttttatattataagacggagggagtagatcatcatcatagcctcataggtgggttagtttcttggccataactctagctagctggcaccagtgcgcatacatacatacacacacacacacacacacatatatatatatatatatatatatatatatatatatatatatatatatatatattacatttatattttgctcggagcctccataggagtagttgggtaggtagagtagcaagttgtaaaccagccataatcacatattgagaagaaaagagaagagagagaagaaagcaggctacagatttatagccgactacaacacggactccaaaacattatgtgtgtatgggaggtaggaccgggtattaatggtgtagtatatttttataagtaattattgtataaatgggctattagattagctataaatgatttggagccagtagttggctatactattggacttgctctagtgcttaggggtgaatctgcttaatacttttattttataacggaaataatttacatcttttaatagatctgggcacaccgtttaccaaatctttttttaaaagagaaagagtgttggattgtcttacttttatggaaaaacaacaatgctttcccctaattaatactctctccatctatttttgatagtaatatttcatcttggcacatagaccaaggataagtaattctacttatcattcatttaaatatgctactagtcattcctcgtaaacaagcgattcattaatatttacatttctcaatgtctatgtagtcaatcatgtgtggaagaatgaagagtcatgcattaaatccaagaaagcaattaagatgataatttgttggattgaaatatgcctatcaaaaataaaatttttagatttggaaatatgactatcaaaaatagatggagggagtatttttttagcgagattatcttttgttaatactatacatatgaacataatatataaatataaacataactgtacgtgatatatagtgcgatcacatatatatgcaggtggcagcgagacgggcgggcgaatatcttggccgatcatgagatgagacagcccggtcgatgtcgccgatcgatcgtgtttgtgtgaaagaaacttcacctgaaaactatggcagtatagtagggcgtagcgattgccaattgggcggccaagttacgttacgttgtcagttagcggagaggagcagacggtttgcgcatccatcgtccatcgatcgatcgatgagaggcgtttggaaagaaaaaccagcaaaccgccgtacgtatgtatcaacggacaaccgcgcgcgcggcgggcggtttcgatcacttgccaatatctctggcttctggcgaagcttgcattggctgcttgtgctatattcgatcagccactttcactgtactagtctccatcatctatatattcatcgatccatctgttccaacaaccacttcaattccttcttttctgcttcttttggaatatatacgtacgtcttgctatatattctgcttaattaattgccaccgctatatactctacttgtatatatacttgtatcagagacgatcgatcgagatgcatgcatgcacctgcctgcggtatgctatactagataccaagccaatcgtcgtatgcagatgtcactagctactccatccgtttcacaatgtaagtcactttagcatttttcacatttatattgatgttaatatatatatatatatatatatatatatatatatatatatatatatatatatatatatattcattaacatcaatacgaatgtagaaaatgatagagtgacttatatcgtgaaacagaggaagtagtacagatcctctcatctcaaacagtctgtaacataactaaattttacgggccgtcacagtgagtacatctaaaacatgctaagaaaaggtcgattgagtatatagctgcttgccaccgctatatactctctacttgcatatgtacttgtatcagagacgatcgagatgcatgcacctgtgccttcctgcccatgcggtatgctacggtagataccaataagccaatatcgtcgtatgcagatgtatatactacaccaccgtgcatgtaagtacgtacgtgtagtacctctcattactcttactttttcaccgttcaacggtaaagaagtgccctgatcaaattttactacgagaaagtaaaaaacgatttcaacaaatataattattgagacattgacgtatatgggtagtctaacttatgtaattcttttataaatactctaaatatagcaaagtcatacgtataaattgatcaaatactgactctggtcttgagctcagctattaaagtgtgatgaaaaaatcaaatcagtgaaagttgtatgtcgtaatcttaagtcattggttatgcaactgttcgctaattttggatggagattcacaaatagaattcaataatttttgtgatcttttatgctgtgtgagtttttattagtttgtgtgtacttttgtttattcaggtgtgagtttttgttgagttggtataataattgactgtatctctttcagcaaatgccgggattaaatttcattatctaaaaaataaattgattaaatgtgcatcatagtatattaataaagaagttttttttcttttttttaaaagtttcttttcacatatgtatatatatgcattgcactaggattttttttggtggttcagggtcattgggaccacccctgaatccgcctatgtattgagatgattacaccatacagttatagacaaacatgattttaattacatcatccaagttaaatcatgtatatcggattggcagtcagtattgcactctaaactagcaacaaatatgacatattacctaagttgcccactcgtgacgtacatcattcctccatgtccatggcacctcaagcgacctctattggggcactatccacgcatggttgactgtaaaatagtcgtctggccaagttaggcctcacttgttggggccgctggcttcagcaactcgcgtgttatccattaacacgtttttcgaactgctaataaatgatgtgttttgtataaacttctcatgaataattaaacaaatttatttttaagtttataactaatgctcgattaatcatgcgctaataatttgtttcttttttgaacgcaaactgctatacagtcgtacaaccgatttaaactcagacataaactgggaattaattaactcgaatttaaactgaagatgaataccgcaggtaggaagcgagattaaattaaataatcaccgaaagatatgtatagtacgtaagagtagccaacgaaaccaatcaagcgattgatcgatcgatcgaccgacttgcgctagttcgctgcactttacgtgcgtacgccatatatacgaataattcaccgttaaatgaatcatcaggatatacagatgcaatgcatcgacgatactagtgcccagatgtcacttgttccttgtccacagcgaattcaagactactactagtattcacatgctagctacgagtactttgaactacttacattgacctcacaattcatggagtaataagtaatccctccatcccaatatgtttgacgcagttgactttttaaaaatacttgaccgttcatcttattaaaaaaaatttaagtagttattaattatttttctatcatttgatttattgttaaatatatatacttttatatatacatatagttttacacatttcacaaaagattttaaataagacgaacggttaaacatgtttaaaaaagtcaacggcgttaaacatttagggaaggagggattactagttaagtaacatatccggcctgcgcccgaaaaatatttttttcttccaaatggaccgtccatcgatcgatcggtcggtgcatggagtaatctatacgtcctgcgcatgaaattatggacgtgtcttcttcgccgtattcaactcgtagctgctaccaaaaccatcatgtttaagaccggccggtcaacactctgacggttacctcaaatgaaaaaaaaaaaaaactctctgacggtgcaatattatactggctgcttacatctcaagtccaagtaaagccgtatcgaaactcccatcttaatcaatattattacgtatggaccttttcatactattgacaaggtgcgcgtgatgtatttattatcttgatgatcggatatatttttttcgaatgcgcaaaatcctgatgatcggatagattgtgcactggcataaagcatatcaattacaacttcaccgtgatgccaaattaaaagagatttatattttcatgaaatatataactgaaggtcttcacaattaagtcctcttgatacgacccctcagaacacttactttgtccggctacatttacaacatatttcccatccttcgtattgttcagaaggtgaaacttcagccatatatatccttaccagcactgactattgaatctgaaacaaaaaggtctactgaactttttttttttgtcttggaacagaagaagggcccaattctttactagatgatctgatgatgaaaagaactgtttccatcgatcagcatgccaccgactaattctaagatgcctccagcatcattcgatctggaaagccataaacaaggtgttactcatattatatcacgattcacaaggtttggagaaattagtcctgttttatggtttggacaaattaacacaaaaacttgtcaacatgcacaacaggaagccgatcgaaaccctgtgtcttttcccactaaaaatgtttatcagaaaacccactaggatagataatgcagttttactagcttgcttagtcgtagtgttttgcagcaaacaaatgctatgcaagtcaacaagatggagatcgagcaagaagtacaagagaaacggtgagctctgaaagcaataaatctaaccaaacaacccgtgatcaacagtataagaacaacatggagacctgaaaaatgaggcaaaaacaatcattggccagtgctgaaagccatacaagtcaatccaaattaaaagctgaaggtatatatcattgacacgctaattcaatgtgttagaacaaggaaggatccgatcgacttcattgtttttgttatgaaaatatatgcgtaacgaatatacgaattttacgtggaaaacccttacgggaaaaaaccacgggcgtagaccggcaatgatcactatagatgaattgatacaaacggaggacatattagactacacaccctccccgtgcggcttacaagcgatacatagagatatcgaggagtactagtgggtaaagacttagagtcatactagggaactaatcctaatagttaagttctattagtaaacttatttgaatatattgtggacccaaaatttggatcacatatttaacaatttttgtgataatatggagcaccaatagagttgtatgcagcgaaatagtattaattattattccttactatagtgaaaagtaactaattaattttgttagatacaccaactgtaactaacacatttcaagaatgtgtagtgaattcatgcatatactgagaaacactcagggggtctttcggctagctccacaagatggtgggatagccggtctgggttcgaagtctcaccccttctaattaattgatattaggtcctttcctactatatattcacttttttttaattcatgcatatactgtactggaggtaattctaattgaagtgagcaactaatgcaatactagcattttactgtaaagtgcaaacctgattagaagctaagctagtgagggaagttgttaatgcgcaatctgatgatcgcagcagaaagataagagcacggtatggataagaaaggaaagaaagagagttggtaccgaattgaattccgatgtggtccgtccttgtactccctcctctcctctgcatcgatcgatggatctccctgagcttgtccggcggaggggatgaggatgggccaccaaacttgggccttggtttgcggttagaatggttgggctaatttaggcctggaaagagctgaggtttgtgggtctaaaataattcatgggccaaaacggaaagataatttgtctctatatccaactttagttaaattaatttacacagcaccaacaaccttttcaacttaatttctcatggaattggttgtccttgtctgctgcttggagtgtactccagtccagtatgcaattcaggctcgctaagtgctggacctcgtacatcttttgctttaacaccagcacaccgaaccaaactaatcaaatgatatcacgacgatttgcttcgtaacttcaacaattaatgatctgtgctaattaactacatccacaaaattaagttgtgccttttgaatgcaacagtgtcgcatgcatagacacatacgtactctgccagctgcgtgcaaactgatcgaatgtgtgtgtggaacatactcctccactccactgtagtaatccagtatactccacttagtagcgagggacatatatatcacatgctaattaagcaatgagttagtttgtatagcgctcgatccatatccattcgatcagtctagtacagttaacaattaattaaagagcacgtaaacacgcggaacggaatgatggcttagaagaccaatcgatcgcgacttagtttcggtcatttaatttatggtagctactacgtaccctaaccacctagcaagccatatataccagctaatcttgtatggagtactagctaactctctcagtcatcaccactagtcgatctacaggacagcaactaactgttagaaaacgataaagcgaacaaacgataaaaaacaatagatcaatcacagaagacacaagatttaacgtagaaaacccttttaaaacaggagagaaaaaaaccacgagcgccagccagcaaaatatcttcactatatctggagtgaggttacatcgccgtacgacggcttacaagaggtatatatctggtagaaccctaaaagggatgacgatctg

SEQ ID NO: 5760 - DNA, 16833 bp, Oryza sativa
caacgacgcgacggtcagatcgatttatagcagagcagtagttacgttgatcgatcagtttgagagtttgctagcgctagatagagctatagtatagggctcgaagatgacgacgagctcatggagcggcctgcttgtgatatcctgtatgttattgatgagctgggcggcggcggcggtggacatgtcgccggtgcggttcgacgccgcctacatgccgctcttcggaggggacaacctcgttccctcgcctcacgcccgcaccgtcctcctcaaactcgaccgcttcaccggtaatttgtttatttatgaatactaattaatttgatttattgctagctagcatgtatagaatcaatcgatcagtccatcgatcaattagagataaatatatatgccgcaggttctggattcgtgtccaagtcggcgtaccaccatggattcttcagtgcttccatcaagcttcctcatgactacaccgccggcgtcgtcgtcgccttctacgtatgtcttataccaaccttcttcaattttctaaattatgatatcgctatctccaagttaattcatacgtaccgtacgtatgtggatcgatcgatcgattaattgatcagtgctaactaaaagttaatgatcaattaatttgtttgtgcccaaactaatttgtgcttcaatctagctcataaccaatttaatttgtgtggagtacgtacgttgtaacgattatgaatttggacggtggagctacgtaccctcgctggtatcttgttgacaatttaatttctttttgcaacttcgatcgatcttttgcgagcgagcatggtgttatcttgttgacgacgtccacctgcaaaagatcgacgtacgtagcagccgtgcactcatctcatcttaattaattggtccgttaagttggtacgtgttaagttagttggttcataaattctaagcaattgtgtgggtttgaaatttggatggcgatgacaaaggcaaaaggcaatatgtatatcaatagagaaaggtcgacagatgggtggtggatattaataaacctatagctagttatcttatactctgtccggacataattaattgacattttcaaacaactatagtatatttttttagaattacatagcaacaacgcggagactatagtatataatttacaaagaaaataagcctgcaaaacatttgtctgaaacgcaaagttataaagctgagcctactaattaacatattttttaatgtgaattttgagttgataattatcacgtattttctctaccccataaaacactactcaaatgatgtcggattagattattttaagatagagggagtgcatactacacgcatatagctgaggtacctatttgtttgttattgtcgcgctcgattagtaggtgagtgcgcattgcacgcgcgcacatatgcatatatgccgccacacccagcatatccatccattatactcattggccatattatgcatatggagtatatacatcgggcaatgcaatagggtatagtagctagcccatgcccggcctccatcaatcaaaaatcgccgcccaatcttcttttcttctcgatgggtggaggagattgattattcaccctcaatggtaggcgacatgtacctgtcacaccttttcctttttccccctcttcaattttatagccaaaaagcaaacaaatatatactagaatacatgtatatactagtatacataccacacaaatatatcttgtacgcataacaaataaatatcaccaaatttttttcaaaaaatatacttccaataatattatacatatgtataaagtatacatatgtgtttgtatttatttgtataacggatttatactcttaaaaatagctgatttttactttaaaaaaatttctaaattttcgatgatatttattatgtcagttggtattacatccgtccaaaatatagcaatctagactggaatgagatgttttagggcattgtagaactacaaatataaggcatgtctagacgttttaggatggagggagtatgtataatgtgtatactcagattttgtgtctttagtgagggattttttttttcaaaagtgacggctgtatgctacacctattctacgtgtgcgtgtttgctagtacgtactactgtacgtatttccttgggttgattttagagaccagtaaaaacatcacaaattaatttatgtttgaatacaatgcatgcagctgtccaatggcgacgtgttcccggggcagcacgacgagctggacttcgagctgttgggcaaccggcgaggccacgcatggcacgtccagaccaacatgtacggcaacggcagcaccgggcgcggccgcgaggagcgctacctcctccccttcgaccccaccgccgccccgcactcgtacgccatcgcctggacccccgccgccgtcatcttctacatcgacgccatccccatccgcgagctcgttcgctgctcctccggcgactaccccgccaagcccatgtccgtctacgccaccatctgggacggctccgcctgggccaccgacggcggcaggcacaaggtcgactacgcctacgcgcccttcaccgccgtcttctccgacctcgtcgtcaccggtggtactgacgacgaccactgcgccgccatgggcctgatgacgtcggaggtggccgtgatgacgccggcgaagcgcggctccatgcggcggttccggtcgcggcacctgacgtacagcgcgtgctacgacacggtgcgctacaacggcaccggcgtcgtcttcccggagtgcgacgagtcggagcaagacaacttccacgcatggggcgagtccaagcgtgtcatcaacagcagatccagttccagcgccacatacgccactggttcaggcgtgcgcatcgactaatttatttactagtactgtgtaatctcaatcatgcattattccaccagttgatcctgcttctagatgatcgatgatgagtttgtacgtacgtgcacactgacacattttccagttcatatatatactcgtatttccttcggtcgttcgattcgattcgattcaattatttggtgattttgctatcaaccgggtgtaccctatgatcttttatatctcaatttttaaaagggttgcatgcatgttaattcctatactataaaagataataataatgataggtgacatctttgccaccagcttaccaccaccaactttttaacttgttttacaaattagttattgatgacattttttgatattttatttggattccagtgaatagactgggcatttacccatagcaaaggcatgtgcgttttactagtgttttgcgctttggttattctaggatcgacggcgcgttttgcgcaccctaacatacagttaattaattattccaactagtgtagtggctagcattttttttagaaaatgtaaaataataattatatttagtgtttttgaaatatagtagatatttttttagataataaatatagtagatataatttcacactttatcgtgaacacaaaaaaatattaaaaatgatagtataattatgtttagaatggattaattgtaatgtaaagcttaaagaataaaatagatactcctacttgtatgtccccacaatttcagttatccatgtttaacacaactatttactcagctcacgtgtttcattaacaaatggatgataaaatagttaaacgctaaatgtaagggtggcaaatagttatatgcggccttggtgtcagcccgtagagactagcaggccagggttgaggttgaaggcgtacatgtgctagatggactgggccgtagtacgtatgtgggcctagttgcaacggctagtaggtggcgtgtagacggagacgggaggcgaggcgagcggcgccgcggaacgggacaacggtcatattaccgaccgttgtactccaccacccacgaacgaacgaacggctacgcacttgcgtttaaactttaaagcagcagcagcagcagccgccgcctccgtccgtccgtccgtctctctctctctctcttcttctcttgtcagtctcgcgcctcctcctcctcctcatacgcagcagcaagcagccaagcatggagacgcccctctccagcaggaggatcacccgctccatggccaaggcctccgccgccgcccccgacgccacgtccacggcccacccgccgcgccccgccctgcacgacatcaccaacgactcccccatcgtcggcctcgcctcctcgggcctccgcacgccggcctccaccgccgccaaggcccgccccaccagggcctcccgccgcacccccggatccggcgaggcactcctccgcggccaggtcaagacgctcctccagaaggtccaccacgacgcctcctcctcctcctcctgcgccgcagccgctcctccctcccccaacatcctccgcatccacgcgcccatcggtctcgccaggtcgcccgcccacctcctcgcccccacgccggccaacacgccgcacctcaccgccgccgcccctcacgccttcaccatgacggtgccatgcgtcctcgaggaggagttgctttccaagctgcaggtaaacattaacctaattttgcccccccccccccccattcctcctcccttgcttgcttcccaatatggtttcctttgcttctgttccaccaatcaatcatgcgtgcaatcattttcttcaaataatccaatccaatccaatctatatgtgtgtgtgttttgttatgcgcgaaattgctgttctagctgtaggacatccaacattaggcgaattctgttcgattaaccatgcgtcgcagcaatcattttctaggataacatttcgtttcttcacttgctgcccattccaaatatattagacccaaggattcagaagatggtactgtatttgcttattgctgcgcttacattacctgtaacacgacctctgcattacgtaatgcagatttgacaaggacatttgtcaggtgttgtacatgaaattcaatttgtctatatcttcagtctggtattgattctacactgggtgctattctgttggattgttctaagatagtaatgtttggtttcctggcttgctgcattcaaaatagattggacaaaaggatccagaagatgcttatcgctcttcttacatgacctgtaacaccaactctgcacaaggacatttgtcatgtgtttgcagtacatacagtagtacatgcataaacttacttgcccaaatgtttgtgtttgtgtttgtgaagctatccatgtgtagttattgttgcaattggtcttgagctgatttggtccctctgtctgtggtgcaggtcattgcagatgccctgccgccacctccagctcaggcggaggagaaccaccttggagagtgcaaccgtgcactggtgttcgacgactcccccgggaaatcggacctgtccaatgctgcctcggtgctctcgtcgtcgtccctctcgttccaggacagcagcagcaccgacagatcaccggacgacgacagctcatcggcttggtcaatccaggtcaatgccagctccgagaagggcgacgaggacacgttcactgatcaagacccagaggaggaggaggaggagtggctaacagaagatgatgatgatgatgagtgctttgatgatctgtgtgaggggatgagcaagatgtctgtgtttgacgatgaggaggaggaggacaagaaggctgggctgcctgcgtttcaggggaagcacaccaggttcatctacgacagcgacggcgagatggagagggaggacgtggcgcatgtgccggtggagaactgcaccatggttctgaggggcctgccggtgccggaggggaagcatctccgcttccacgaggtggaggaggatgaggaatagaatgacattgctaccagtgatacacttcgcatccaagcaacaaaaacaacattgctactatagtagcttcttctttttcttttcatctggacagacacattgattcagtctactgcaatataatgccttctgtgtttcgcttcatgtttcagttcttctgaatgccttttgaatgttacaactgaataatgcaatgcaatgcaaatatgcaatgttccattacccttcgttcagttgcatgtttatgtgaaagcatcaattacccttcgtttttcgaaagaaggagaagaagttcagacaaggtctgaacttcaattcctgttagctgcctggcatattactatttgcagagcaatttctttcttggcccaattggaccattcctgatactggaatgtggaaactatccgaaggaagaagaaatcattaaatcaacgaagcaatacagggagatggagattaaaagattttccctccatttaatattacaaatcgttttaacttatctttaagtcaaaattctttaagactaaatttatcaaaaacatagtgacattttcaacacaaaataagcatactatctaaatgccccctccgttttaggttatagatgtcaaactgctttaaatttgattaagtttagagacaaatatagtaatatttacactaccaaattagtttttattaaattaataattaaatatatttttataatagatttatcttggatcgaaaatattactattttttatacaaacttggttaaacttgaaacaatttgattttttgaccaaagtcaaaacattttataacctgaaacggatggatggatgtagcgcccgttccgtcgtggcgcctagcgggaaaattatctcctaaaaaccctaatttcgaaatttgtttcttcgcttgttgtctagtgtccgtgccatctcaagatctcaatccccgatctatcgtcgagttcaattccgaatccaaatccttccaaatcaaattcctccgcaaaagtccattttgcctcccccaaggtcgatgggtcgaatcccgctcggcccatctctcccccggccccctctctcccgggcgctcttgctgtctatggtttctgtacaatctctaccaccacttggtgctatccaaattatctgtgaaccgccactacatgtcataaaagataaaacatgagcaacccaatgtaacaaggaggtgaagtacatgcgtttgcgttaagaagaaacaaattcagatctatgacggattaatggtgaatgcagaataattccttgaatagtcttgactgcactgcaactaggtgctaaatttgacacattataaaactagcatgtgtattatattttctattactaagtactaactatatatgttctattatacatggttaaacaatcaagtcaaaaaggcctaatatttataagtaaaaaggatgaaaactaacatgttactataagggaagaataccgtaaaagtaaagccatttccttcagactacgagtatttgccctcctcttcatatcaactagctcaggaaaatcattcatatgcttttttgagtacacacaaatgaggtttctgcagggagaaaattcctttatgaaattaatatttccaggcaatagaaacactagaaacagaaaagacaactcagccatatgagcttctggggtggattaaaaaaccttcccatactaaatggcttgcagagaggatctgtaacaaccctatcaccagcaacataaacctacaaaagatggcatattagtgataatgtgattagtcaatagcatatgacgattcacatgtaaattatccaagtatgtccaaattactgtcgtactatgttttcgctgatccatgggttgcttctttcaagcagcaaagcaatgattgctggatctgcttctgtctgatggttagacatcagaacaacattatggccctacaataacaaacaatttcagaaaatgcataagaatctttagtaaacaattaaaagaattattcgacagctctaaagcatgacagaagtatgttaggataattactacaaacacctaagtacctagcgtcgggtgcttccagcaatgacagaaggtcagaagcaacttacacaaaaatcatccggtgtgagggacgtcatgtgctgacatacactggaaacacttttatcactaaagcataagaattggcacatgatgtttgttctcatcattctcttctatcagacatctctaaataactatgaaaccaaaaaatcaaacattgatgtgaggtagatcatatctagttgaagctttcttatggccgtctcttgctgttgatgcttatatatcaaaacccttggaaggaggggaacctctgttagtatgtatcatgatattactatcaacgacgctgggaggattacctctcctgttcatctaaaaaatgaagggtcgattccagagaggtctttggagggtgctatctatcctagttcttttaaccctagatatgtgattcatgggttattggtttgttctgtttactaaaccatggcagcttgcactcaccaagatgttgaagaggattgattatcaaagaagatgtttgatcagaaataaatacagaaaatagatagtacaatggagtttagatgaactaacctgttggagcttctgttccatgtcttggaaaatggatatattaccaacatatgaatttctgggcatatgaaataaaaagttagcatgataaggaagacatacctataagctatacagataaattataacacatgtgaatgttgcaagtttgacggcatgccacggtaataagcaaaaccaaaatgtgttaatagatatcacttttcttgttgaaggtatatctatgactaagccattagttaaaaaaactagctacttatggagaggatgggaacaacaatgtcttcaaggactgggaaagcaggtaatatcttatgctttgattaaagaatattgccttcacctatacagggtatctatatcctcactgcacccatcaaaacaatacggtcatgtcgcgcgacatgacagaaatatctgccatctatgtgaaatgtgattaaagcatttgtgctacaaagtgtggaaatatactaaataccatgaatgggcaaaaaaaggggaagattgaaagggtcctcgatacctataggggaagagatttgcattacctatagtctacaaggggcctaatgtagttctgaccaaacatgtaatagtcgaatggttccctgacagctttgtgataaggcggaaaggtaaacggattctgcaaaaggaggaggcagcttggtataaaagggggcataaaagaaaaatgtcagaggaaatcaggaagataatgacaggaggtagaacctctacatcgagcagaacacaatcgaacagggccaccatgtttgaaagcacgatgtcgtgtgcatttggatccctgctctgcataacctgataaggcagagtatccccgtggccatatgagccgatgatctaattgcaattgcagcagatagaaaagaagaaatgttaccgcgtccttgtagttgtagtatagctcttctagattggcagcgacatctgcaggcagcttccctttctccacttcctttctgatatgcaaaatgagctctgcacatgacaggaatcgagaagtgagcagagcacctcgtggtttcatctcatctagattctagagcatctaaaggtagagtgattttctaggtccaatatatccaaggcacaactaatataaggataataataatcgagcaattcaccaaccaaccatgtccatgcatcgaggattccaatgcgacccccatactaagtagcaatgcgaatgcgaatgcgaatggagtttgtgagattgggaaatggaggggagagaaccttgctcgttgcgcgcgtcgaggaggggagaggggcccaccacctcggaggcgaggacggcgcccttggccggcacccgcggccctcgggccgccggcctccaggcggccttggcttcgaggcggagggcgccgcggcgggagcagcagagcctcgccggcgcgggcaggatggcggtccacgccggcgacggcgaggaggcgagcggcggcgcctgcatagaagaagcttctagaaacctaatccgaaagggggttgttaccctagtggggactgggttgggagtggtcgccggagcgcttcgggatttgtgccaaacccaccctccatctccatctccatctccatctccagcccaattatttctttttctattttctcttgtatatattttcacttccgttgtatcattgcctattgtccccctacgatatcaaaaacgaactgtatcatacgatttgttttcgtagttcttttattagatacggaaacgaatacaaattaccttgaatacaaataagatcgaacacaaatacagaaacaaatatttatcagaacacgaaaccacagacaaataccataatatattttaagctcattttatacacaaagtttgatcataaactaaacatgtacaatattattggtataaatacatgtctaactggtattacaacacataatacatatagtatattttataaaaaaatatttaaaagtttaaataaaattattagtgtggactaatgttaaaagactagaactagagctagaacgaaatggggtatgtttttatgccttcagcgaatatccaaatattattgtgcaccggatatctgtattattatttatagaaaaagtgctcgtgcgttgcaatgggaaaaaaactaatgttatgataatgattatagttattttataattccatgggagttatatgagatagttctaaacataaacaatgaattaaatctatacctaaccctaaattcattcctcttctctcccaccgagagcgatggcggcggcacatttccccacctgtgcagcgaaataatatgatatagttcgatttaatttttattaaattaaccatgattaataacactctttgaaatttgttgttggaattttcggaacttaattgctaattttgacaatacaaacatcatttcagcatttatttaaataaaaatcccaatttctctatgggccattttcagtcgatttactatctcagcccgcaaatcaagtctaatttgcctcccccaactcctcctctgattgcgttgtagacacttgatggcagggccatcaagtgtgtgcagcccggcgatggaggcggcccgaagcggaggtgatctgagccattcgatttgatagatggcttggatcgcctgcgcaccattgaagatgcatgtgcattggaaaccctaaccctcacgttcccccgttctcgatcctgatcctttctcccagcaatgagcgagcggcggtggcggcggcactctctcattccgcgtgcgacagcagcggcggcggtgcccttcccccatcgcgagcgacggcgtcggtttcccctaggaggatccgatggcgttggtggctgcaagtggcggcggcgctgccctcccctaccgcgagtgacagcgtcagcttcccccgggtggattcggcggcgatggtgacttcccacggacggattcagcggcgtcggcggcttcccacggggttgagataagatttgtgcgctttttattatttttcatgttccttttctctttctttggattgtccaattggatttcaatcggatttacggatgaaaaaaattcacggacaacggaagcaaattgaatcggacttttttttgcccgatttttttcaccctgtttttcacgtacggaatcggattcgatttgttttttttattgtgtcgcattttttttaccgcatcacatataatttgattcgatttcgtttcgcccttttttcacggacggacaatggaaacacttctaattttttaagtagtagagatagagatacctatcgaaaactatgataccatattcatattcatatttgagaaaagaatatttgtatctgtatccgtatctagactatccaaaaattatacgcacagaatggtatccatatttgtttttcaccagagcggctgaaaactatatgcttcgttttcactggaccggctgaaaactatccgcttcgttttttctcctagttatctccacttatctactatattcattctgattttcctgataaaacactcttgagtttatggtaaatgcagaaagtttaagtttatatacacaaggtaattgaaacatgtacttaaaaaaatacagtatatttttaatggttgaaggaacaactatgaggaatattttagtactctcgttatcttggtcgcttgggacatttggaaatatagaaccgattgtgctttttcaatattgcaactcctagtgtagcggttgtcactcaagatgtggttaatgaaggtgcactttgatgcttgactagagcatcatagctctaggagaagttggctctagctgtgtgtttagatccaaagtttttcttcaaacttctaactttttcatcacattaaaactttcatacacacataaacttcaaaaatttccatcacatcatttcaatttcaaccaaacttttaattttggcgtgaactaaacacaaactctatagcccttttgtgtcgtagggtgtttgtttgcagttgtattttcttgttatattttttgttgcaagacatgttggtgttaggggaagggggtttctaattccgcaccctttgttattttctatcttgcttaatatataaaatgatgtgtgtatcttatacatgttaaaaaaaatataaacgagcagtaaaatcatgtctccagctatctgaataaaaaacgatattccctcaaatatttgtagaaggaaggatttaaatccaggtaggcttgcacatcaccaccagatccaaggagtcccctcttatccggtacacatatagacctaaattaatcaaaaagcctactaaataagcattgttaaattttgataaaagcatatacgtaaataatgtaagttgctacttctattttatattataagacgctttcattttctttatttgaccaagttcataaaaaatataaacgttttcaataataaacaaacatcgtatcaaaatatattcaatgtttggtttaactaaactaatttggggttataaaaatgattatatttctctataaatttgattaaaattttaaaaaaatgacaaatcgatttatatttagaacggatcggaggggccgggtatgcgaaattggtaaacggtacatcgacaaggcatgttttccatggtcgatggcaagctagagcctagaggtcatggtgattgtaacggagactgtaacggtgattctcatgttataagccattcacaccaatttctagctagtttcctatgcaagatatattgaatcaaacgactaaaaatcatgcactgcaggttagaactgacttgacaattacaaatgaattgccataccgcaagtcattcgctatcaaggatttaagctcaccatatagtcaatcataatgacttgaaaggtcccattcacaaagtcattatgtaaactatactcatttgatagtaacctttttttaaaaaaaaaatcagagacattctagaatctaatatacaaccaagataaaaaataaagcagccagccaactttttttgagaatttgttgttgatttttccccctcagccgcggagtttaggaggaggaaaatcagctacaaagtgctcttctagactttgaaagacgatacgtattggatctatcagtaaaaaaagtggaaacatgtgtttttgaaactccatcaggtcaggtgcaaatatatactacatcaggtattatatagcgtgagtgtttaggcactaataaaaaactaatcagttagtaaaccgcgagacgaatttattaaacctaattaatccatcattagcaagtgtttattgtagcaccacattgtcaaatcatacaacagttaaacttaggccctgtttttttcagcttaagattattataatctagattattgagtcagattactataagctagattgttataatctgtagtagaataagctgttagttgtttctttcctagattattagagcctagattattgggtttgcaagtctaaatagggagtggggtggcatgatgggtaatttttcacccaataatctagaaaaagctcacctaaatgagcttatcaaattatagcaagctgggtttcatactataataagctacttcaataagttgtctgtttctttcagcttactcctaataatctggattataataatcccaagctgaaagaaatagggccttaaaagattcgtctcttaaattagtcgcaatctgtgtaattaattatttttagtctatatttaatacttgatacatatgttaaacgtttggtgtgatagggtaaaattttttttggttgagatctattcagggcctaactgttcaaaaattttcacaatttgaccatttgcaaaaactatttttacaaatgaaccgtccgcaaaacttatttcaaaaataacccttttgttcagcgccaaatcatgtggcgctgagcttagacacctcaacgccaaatagcgtggcgctgaatatgcgttggcatgctgacttagtctcccatccgcgatggcacgacattcagcgccggttgacatggcactgaggtatctaagttcagcgccgagtgatttggcgctgacaaaaaaaaaaggtcatttttaaaataagttttgacggcggttcatttataaaaatggtttttgcaagggtcaaattgtgaaatttttagctaactgttggtatataaacataaagactagaaagcgtcttcaaaggaagttactccgtggccacgtcaccggtaatctaataatgcacgcaaaagaaacaaaaactaagaagtctgaactagtagcagaatactagatggacggctggcgttggagcagagaccgttgactacagatgtgaaccgtcggatggtggctgcctccctcacgacgtccccatttttgcttacgcggcaagaaagaagggaaggcaacttggcatccaaggaagatgcgcgccaaacgctcaccgccagcgtggccccgcgtgcgggtgggcccacatgtcggtgagcggggtgtagggcgtgagcggtaggcgaagtaggaggatgggacacgacaaaggcgtggacctcgcggcccaataattccaccgccgcacgcctctctcccttcctcccctccttccttcctccccgcctcccgctcgttgccttcgccgccgcctcacgccgccgtgatttgagttaggtttttttttttttttgctctgaccagacttgccggcgaaggaaccaccggcgggcaccgcctctcctcggcaatcgttgccggggataaagtggggtcgttaagggagcggtaggtttgggggtttgggattatagatcgaggaagatgaagcaatccatatcgtctatcatctttgtatctactcacgctgctgctgctaactataggtaattattatccatcgatcgattcgtcaccctaatcctcccttcatctggatctgctttttttgtttattgtttttagcaaattttttcgtctccctttccaatttattttattttgtgccagccgatttaggtagatttaagattccctacctgtatacttccttcccaatttattttattttttattttgtccagccgatttaggtagatttaaaattccccacctatatacttgtacgattgatttgctataaacttaatttttctacttatcatatatgaattcgcgttagactcctcttaaatcactattttagtcaaggggttgcccctgtctatgcttgtcagttttcgatgttaaagttaactgaataattctatgaagttccgatgaattttgtgtcatgctgtatataactttggtaatttccgcaacatgctagtttcattcaaaactgggaatgaacagccccacatgctagttcgtcgccacacaatcacgctgaaggaaattttcttgttggtgtttgtcttgtatttttttttctccaataatctattcctactgcctaaagtaccacacaaactacgtttatgctagtaacagtggctattgttttgagcgactttggcatgcagtctgtcgtattgatgatttaaaatattgtgtttttgaagtgttctctaatatctggctttcattttcaggatcatttcgcttctgcctctttctgacccgactctttttggtttttgcctcgtcgataatgaacttgagtacactcagaagcttgcctattagcttagtgtaaatagtaggcttgttggagtttagtttgttagaaattattagtctctggttcatttcagctagcaaccatggctgcgatgaacgaaaaggtattggataaatgtggaagaaacataagtagcctcaagagaaagcgggacaacccagctgcacgttgcgctgatgccggcaacacctctaaattgcataagcatcccgccgataactctgttgttaggttttatgttgatgaaggtcacaaggcaaagatcaagtgccatttcaaaatgcagattatacagagttatcagaatttcatgactagtgctttacctaagcgaattctgcttcgtcaaggtggtgaatggaaagactttccaaagcaaattgtcaagcttgcccacagtgattttaggactaagaagacaatcacagaaggtgaacaccagacccatctttttttgctggattttgtgcacatgacattcatagactcaaa

SEQ ID NO: 5761 - DNA, 19180 bp, Oryza sativa
caaaccgccccgccgtcatcgccgtcgtcatcgcctggccccgccactccgcgcgcaagccgccaagggacggaggcagcatccctcctccctctgccgcgtcgcccccgctcacctcccccttttccccgaatcggcaaaggggcaagccccctttctccccctccttttcccctttttcctcctcgtcggcgtcatcctccctgtcgccgctttggccgcgaccgccgagcgccagctcgcgcccttgaccgcgcaagtcggttcccaaaccgacattgccgcccatttaaaccccagcctcccatttcccttcctcttccattcgcctccgtgccattgttgccgctcccgtgctctgtcccgcctccgccgtccatcgccaagcgccgggagagccggtgcgttcgtggacgcggaaggggactccgggcgcgccctctttttcctcttcctcggcccgaggccggagagatcactcccgcgccgtcggcctctcgtcaccgcgcccgtcccgcacggtagtgcctccctccgttcttcctcctcgctccatctccccccccttagctttcggtagtagctcgagtagtctccccgaagttagccggcgccgccccgaccgttgccgtcgctcgccgtgtgctcgccgccgtcgccgcccgagctcggaagcgccgctcgtcgccggcctcgctcggcgtagttccgcccaatccgacgctagcatcggattcccgtaaccgcgtagatgctctcgccgccgggaattagcccctagtgacctcgtcgccgtttcccccttctcccgccgccggttgcctccgccgcaatccgccgccgtcgagcaacccccagcaaatccgagccgttggttcgtctcccctcgtcacgtgcaaccgcccggtgtgctcgcttttgcccgtatcgccgtggttcgctccgtcgctcgccgctgtcgaccgccgtccgttccggccggcgtcgtcgtctacctcccgccggcccgcgtggcagccacgtaggcgccacgtcggcgccagctcagcctagaccgggtcgagccgaccccggtcagtccctccccgtgcgcgcgttccaccgcgagccgtgaggctgcgcgtgggcccgccacacctgcgtccaccgcgaaccacgtgcgtgcaccacgtccatccttcaccctagcgccgcgccgcgtgctccctccgcacggtgagccgagccgctgaccgcgcgtggtgagcccggtccaccagactctctatccttcctccgcgcgcgcgcgtcttgggccgccttgggccaccttcttgggccggccggcccgttaagctcggccgagccgccctttctctcgggccgcgccctagccgcccgagggaagtctatattccctccctctccctttttcttttctttcttttccaaaaaggatttaattaaatccttttcctttagaccaaaaatccaataatcttagaaattcaatatcttccctaccgtaaatccgtttgactccgttcaacttccaaaattccccaaatctcgagatctatctaatggcacgcttagaggtcattaatagggctttattttcgccgtttgttgagttgtcccatttcgcgtgtagttccggagcccgaagacccgcagtgcgaggatttcgaggatcaagctccagatctcgagcaaggcaagccacctttgaacatcttgagcctatatttgaaatttaattatattgcttgcaaaatattatgcattgataggatcgcacttaatctgttgttccgtctgcaaggcagattggcggacctgcctaatttgttgcatttgatccttccttttttaattgttataccatgtccccttgtaaccacccagttgcgcctcgatattcgtgcactctgtgcgagtatcgacggtcaccttcaaacttaaaatctgagaaacaacttgggtaaaacttgggttttacaaaagacttggaaaacccgacacctaggtcggtgcttgcgaactaaatgaatttctaaaaccgcggaccggggaacgtaccgggtgtacggttttcccgctcccgcacttaaggaccgattccttggaatttcatccgaacataggacaagtacgaccacatgggtggaatgggacacccctggctgagtaactagcttatcaggggagccatgatgccgagagacatgtggattcgccggggtggtgtcggagaggaccccctaggcttcctggcacagtatggtctgggacctaacctgttgttggtctgggacccctctcgtcggcatatggtaagcctgtgtcggctttggaaatgccttgtcatgaaagcttggaggtctcccgacgtggctgatccccacgggctgggtgatccggattagtaatgtcgtgtgggtaaagtgtaccccctctgcagaggttaacaaactgttcgaacagccgtgcccacggtcatgggcggatgtgaggtgattcctagcgtagttttgtttgacaactgcttgtgaaattactgttgtgaaaaagggttcgatgtttgaaaaatcagcagctgacgggatcagctaggcccgggtggccgtttgaaaagctgttggccgggtgccaaccttgttttaagatctaaagattgatacattgcacatactccgaccggacgggacgcactgtctcaaccgtgtcgtttgagaagcactcacctagatgtttttagaaaagagttcaaataaaatcaattacgaaaacaacagcctttccttgaagcctgcattaaacacttatttcccctagcttgctgagtactcccgtactcacccttgctctatataaatatccccccagttgctgataaagatgaagcggatcctgctgatgaggagttcttccaggagcaagccggttacgatgagttttagggtttcggcctagttcccaagtcgcgcctgtgttgtttggtccaagtcccggcttccgtttcccttttgtaatgcagttgtaagctcgggatctgtccgcagcccaacatgactgtactcctactctataataaagagacctctgttgctgtgatattctatcttcctgtgataccagcactgtttcctgggactggtatcgattaacaggttaatttagagcgtcacgggctaattccagtcgggactagctcggggcgtgacaatggagtaattaatttgaagtaatttaatgaaataacagatttagtgaaattaatttgaagtaaatgatttgcttttttttataaatttagttaaacttaaggaagattgataagaaaaaagtttaaacgatttataatataaaacgggaggaatattatagtatttttgtttttgaggggaagtgtattatagtacttgaggagcaaaaacgacatgcatcgtcgttgactgtcattttgtcttgtttggctttagtttccttgctttcgcttggcgttgccctgccaacatcagcttagtttccctgctaattacgtcttcacaaatttcctgttcataaataaaccctactatgtcttcacaaaagcttgttattcctgcagttttccacaagttcggtgttatcgcaaggaaaaaaatgttgagttcagaagaagacgtttctcaaaaaaaaaaaaagttcagaagaagacatggaataatttgctggatgtgcatgcaacagctggcccaagtcaacttaatcggttgatgtaagaaagaatgtttcttttacacaaaaaggaaattatataagcaaagcaggtatctcgagaaattattaatttgtctagcttgttcaactctatttcataagtaagtagaaccgatctccatagcttggcgtttagattagcttatgaattaggttgggtttttttaggacggaaggagtagttccttatgtcggtagaacatgtcgtttggggctttctgcaaaggtccagaaaaaagactgaagttttacctcattctcagtataacgactacgttcagtaaagaagcagtatcatttcccttaatttgatacaatatcaagatgtctcaataatcattactatcaaaatcattatgcaccttgtatgcatatacagatactcttgtactgtactagatttatttttgacctgaagaagcaggacttgatgattgttagcatcgttgttggtcaatggctattagtagtagctatgactgtgtttagtaggtcttggattccatattcagaacgcggaggataatatgtggtcatctggacacgctattgcaattgcaggcattgatatctgaagcgcgttgaagtggagtgccctctagctccctccctgcttgctgatgccgcagttcgtacgtgagttttggttaacgtttgagtaaattaagataagcacccgtgttaagtctcaccgaataaactgaataagaagaagaaggcacatccgatcctatcacctatggcgatgtttgttcaatacttgagtccttttttttagataaatacagtacttcggtctggtgtattttgtggtgcaatttaactccataaattactttcagaaatgtgcagacctagcaatgtaatttcaaggtctagtaatgtaaatgagtgaaagaaaacatgaagaaaatgaaagctgctagggtttgctggcaagaaagagaggattgagaaccaaaactcgtcaaaacaaacacaagtgaaatgatttggttccactaatttcgtgtattattaattgacagttttgtgcgaaggaaaaaaatacaaaggggttttctacacaattctagatgcaattttttaatcctacaaaatatgccatgagtacaaggtatgctcatagatagttagatggataaatgactctttttatttacattagtaatttaaatgtgtatttttaaagtaaagtgacttgtctaaataagctggattaccctttatacattttactttaatctctttgtctcctttatcttgcagagactgtaaattcatgaggtgatgagattattactgcaaattggatatggagaagttgttctttttttcttgtgaaagagcgagaagttgagactgagaagagcagccagcaatggacacaggaaatgggagcaagaatcttgctatatgtacgaccgagccgtacgatttgtttccgaccgagtcatgcaaccaatcactgaaattatgcttatacatacaccagtccaatggatgggtcggacgtatagcaatttcgtgggagcaaatagggatcagtagtactgtagtagtagtagattcgcttgccgtcactctcgtcccgtttgccgctgcactgcactgttgccctcggccgctggctgcctggattagtggtggtgacccaaaagtcaagaaaagaaaaaacaagttgcacttgcagttttgcggctcacttccccttctccttccccttccgtgtgcatcccggcttcctctagctccgccctcgacgccaaccccaccaatccgccgcctccatgccctccccttcctccccggcctgagattagcttcgccgccgcgcccaatcgccccgccctgctgctccccgccgccgattccgtcccccgtccaccgccatggatcgcagcagcagcagcagcagcaacagcaacccgcatctcggggtcaacaagctcggccgcaacatccgcaaggccacgccaccgccgccgcagccgcagccgccgtcacgcccgccgcagccgcagccgcaggtctacaacatcagcaagaaccagttccgcgacatagtccagcagctcaccgcggggaccccctccccgcctccgccgccgcagccacagcaccagcaccacccgcaccgcccgctgccgccgcagcaccagcagcccaagcccccatccatgcgccttcagaagatccgcccgcctcccatctccacccccgtcgcgcggccccctcccgtccacaaccaccagatccccaaccctaaccacaaccccgccttccaccgcccaccgccgccgcagcccatgcccatgcctatgcctggtccccccgtctgggctgactcaccggtcaccgcctacatgcgcatcctcgagaactccctcttcagcgccaccccgccaggcgccgccgccgccgctgccgctgccgccgctgctgctacgggacaacaggcccctccgcaccaccctcatcccccacccccgccgccggtgccgtcgccagggatactcccctcgccgagcggctttctcaacctgctctcgcccacgcccaggtcgccctacccgctgctatcgccgggcttccagcacccggggccactcacgcccaacttccccgcgctgtcgccgctgccgggcactgggatcctgggtccagggcccatggctccgccgtcgcctggcctctggttcccgcagtcgccgtcagggctgctctcgccctccgggttcttgccaattctgagcccaaggtggagagagatgtagtgcacatcgctcgccgcagcgcagcacaaagctcccgtgaaggccacagccgggtaacatttgacgctagggttgtagctactgtgaggtgaattggtcgctgccccggagatgggcgcaggtgggttgcagcttcggacaccactatttgttgctctcacttactgcttgtgtgattagtcagtcattatatcagtcagtctataaggtggttgctcatatatttgtaattgtataactgggaaagtttttaattcattcacttctcttagctgcaaaaacctggacagcaaaaactgggcatgttgtagtttagactcttgagtgattaggcttgaaacatgtaattgtaaaactttagttcattaaagattagccctttctcactgttattttgcttacgagtgatgtttggtttacctactcttgagcagaatgtttgccctacctttttctttcctagggggaagctaacttttagacatcagcttgacaggagatcagcaactctgtcttatttgtaccaacacctatcagatgagagttgaggtttagtacatcattgttatcgctatcactttttgagcgcttgccagatatactcatatatctttacagtaatatggaattaatattccttatccctaagtgtgtgatgtatatctttacattgtgatagataccgcagcaatgttactttcgaatttgggaaatgccacaatgtgaatcatgctagtcttttcatgcatccatggagcttgataagcttggttagttggttgcatatccatggttgaaaagtattggttactggtttctgccagggatatatatacctttttggtcccagttattagcatccaaaaatgtccatatacctttttgtacgaatggggatacactgatatactctttggctcttgtatgctactgattcattttcttgtgtacctacaatgtgtgatggacccaaaagttatgcaacacactaccaataatatatcctctgattgaaactttcaatgtgcaaaaaaaaaaattctagataaatttgatatttcttgaaatggtgtggttgatgtgtattattctgtgcatcacagaaatgctgttgcttttgcaagtgagggttcctgggttatcttaattttcttctaggttctagccttttgagttatatggcttattatagtctgctattcctctgttctaggattaatttgacatctccttgtgaatcctggccttgtaatgataaggtagggaataacttaagggtggttcgtgttgttctctatatataggcaatcagtattctttgtgcacctcatacctttgtaagttaaagagtattattgcaatcattatcaaattttgtaagttaaagagtattattgctatcattatcaaatttcatggtaatggcatgatagtttttctgaaaaggaacaaggtgtatgaccatgccatgcttgcttgtcgaagctagggcagcttccagaaagcaataccgttgctacattgtggtattgttgcataatactttcaaggatgaaaatttgaatctctggatggctttcttttacagcttttggtcccttatactccggattcagggaatctcatgctgcacataagtaacctttccaattctctttacctgttctaatgcaatactggtatttctccacttattttgaagaaattaaagacattgcatttgccatatcaactacaccattgcaccatactttcctgctgtttctggtctgtatccaagcatatttgcttcagggtaacaagttaaataccagggtgacacgagtgacaagtaattagccagctgtaactctagtgtttttgaaggcttgtgttggttagcaggcgtgccaatcatgccggatagcttagaagcgttacactgtctttgtattcgtgaagataaatttggcagacgtggtacaattttttttaataaaaaatgtaaagcagtactagctgtttgcctcgtcgtagaagtagaagggatatattcatttggtgatgcggtatttgtgtaagcaaatggatgttgctaatgcttggcgtgtccgtgtggagaagaagaataaataatccttgcatagctttccggggtcagccgaaaatatgggcaattacaggacgtaagacatttctgtggtcaagtaaatgacgtggcaaattccagtttactttaagggacatatatttgcgtgggggccgtggacggctgacgtggaaatgggccagcaacctttatttgtagtgcttcattatattgcttgctgattctggatctggtcaaatcaaatctggatcgaattcttcacattcacaggttagagcgtactgcgtgtggcgagcagattaaccctctgttgatctggctggcaccacttgactggctaagctaaaatgctcttcttatacaaagtggctgtcaccatcactcatgtaccttgtttttcattttctttgtaagtattttttttggtcactttgttcttgtgggatataatcggcgtgttctttgcaatttgcaaaagaaaagcggggagaatatggcaagaggcaggcacagcacatatactagagaagatgatgattatgatagtgatgtgcttccagtccacaaaccggcctctatccgagctggtggagcgcctgctggtagcctggtagtatgttgtttgtttggcaacccacaattatcaataatacaagtatgtactccttttgccttgactaaacgagacatttcttatacaacgaatctggacatgtaagacatttctgtattctaattattttgggagagagggagtatctatctacatattgctactgctaagctattactactaggagtactccagaatctgatgaagacgattaatccaatccatcctgcaggctgcaggaggacaggagtggagggagacggaccaccacccatgtatctgcatctgtatcattcccagtggcccagatctatcgatatgataatgatgatgatgatgatgatgggaaagacaaattaattattgacttttcaaagcacaccctcatccgcctcgctgaaatctttgaccaggacgacgactactggagcctgcagccgcctgatgcatccaatccaacggtaacaaactgggggacctcttttcttatcttctcttcccttctgttattatagtactagtatactccatgatgaatatcaacggttttagatttcaattctgctagcatgtccaactatcatgcctacatactgagggagtagatagtactttttttttttttgaaaggagtgggagtagatagtactagcagctgtgatatttatttaacagcaaaatgggtgatttctggattcagagtttcagacatttcatatggatacatgttgcttctgtacgtttatggttcggtgacaaaatcactcaatgggtacaaattaacgagcctaacactagtaccaaaaaccaataacctgaacatatatggagtagttgcgaggaaattaaagaacgggttgttagcatagggtgtacatggaattcgagtttaagatactagtttggcatggctgttcaacttggtgaaatgagctttcttcttgagcaggctcccgaatttcttcagcaaagccttcttcttcttatgctggttgtgctgctccttgttgaaagacgacgtcggcccatgaatcagcggtccattcatctgctctacagctgcatcgtctccctgcgactcgatctcctcatcgtcgctcgactcattatcatcgtcgtccctatgcttgcttatgtcatcttctatgatcttgctgttctcaagagtcttcacctccattgctaaagcctcctcctttccatgcttcactatcacctgctgctgctgctgcttcatgatcaccgtctccacttcgacgtgcttaatctcatcctcttgggttctcctgttgctgctgttcacatcatctcgcacattgtccatgggcgagcagatcatcttccggaacatgttgtgctgcttctctgggctcctgatagccgccactccattagccgagtactctcctgctagcttcctagctgtggaggcctctgcaaccagtgaagagagctcatcgatcttcgcttgcgcagcggcctctctcgtccgcaggccgtcgtactctcgtgcaatgctcagtagctcctcctccttctccgcaagcgtctccttcaaccttaggctgctgattttctcttcttcggcggtcaggttggcctcggtcatcttggactcgagcagcctcagcttggcctgcagctgagccttgtcatccttggcagcatttgcttcttgctctgctgctttcagtgatcccagcaacttgtccatttccagcttcatcagtagtaccttggatttctctgtgccttttgccgcctcttcttcttcggctttcttcgcagttgcctctgctagtagctttgagagctcgttggcctttgccaaggcagctgtctctctgagacgaaggtcagtgacctcatcattcagagcaagcacttccttctcctttcttgacacaaggtccttgaggcctactgtgctctcggactcatcagctgtttgttgaacgccagtagatgagatgctactaccttctgaattggtgagttcagattgtttcagtttatcaagcagctgggttctctctgccttgagctcctgcacttgcttctctgcagctccaagtgacaccattagactgctcatctctgacttgatagagctcatttcttcttctgatctcctgatcatttctacaaacccggcctctttcgatgcccattcgtcgttggaaatcttggcttctgaacccagcttctcaactgtcttgctgatgcattcaacctcgctcttggattcatcaagcattagctggtacctgtcctgtgcattcttcatctctgccttgagctcggatatctgaagctgtgcactgtccagctctgtctgttttgccagtacacgttccttggcttctcttgcttccgatgacacttcgcgcagcgcagccgctaaatcttcgacggccttcttggccttatccctctcatctctggcaccatcgagctcctgctcaatcctgatcttgtcttgagacagcaggctgatctgcgagttcaccgtcttctcgttggtgacaacctgctgatgtgcttcgttgagcagcttatgttgagaggtcaagcgatcaatggtggcctgcagctgatgcgactccttggttgcaacgtcgaggcgcctgttggtctccaagaagcactccttgtactcgcgcgcttccttctccaaggatgacaccttctctttgagctggacgacctgggattgctcgtgctgcagcatggatttgcattcgtcgaagctgctcgtcagtgactggagcgagtcctcgttggatttgttgagagaggagagttcgtggaggcgagcttgaagcgactctgccttggtcttccactcctgggcggcgaggttggcatcggcctctgccctcttggcgtaggcgatgtcaaccttgaggccatggagaagctgctctgctctgcccacgtcctccttccgagacgcctctgcgttctggagctcggctcgtagcccggaggcctcggactccagcttggcgacgatcgccgtggcctcctctgctttcgtctccagctccgactggaggcgggacacctccgccgccagggtcgccgccttgtcggcgttggcgtcggcgatctgcctggccgtgttcgtggcctcgacggccagtgccagctcgtccttgaccctgccgagctcggcggcgagctcggcgcggcgcaggtcgatggcgtggcacctggcgttccagtcgcgttctttcgtctgcgccaggtcgatggcgagctgctcacgctcgatggacttgaagcgctcgaggtcgagggcctcctcggcggcgctctgagcggcgtgggcgtcatcggcgaggcggcgggcgagggagaggtcgtggaggagctgggccttgtccctgtcgatgacggccaggtgttcccgcgcgttcttgaggtcctcctgcaccgcgttcagctgcgcctgcagcagctgctccgccgccgacgccgccgcgggcctcgcattcgctccgcgcgctttctgcattctcttcgatccaccacatatcaaccgatcaatctaagaaatctataaaaactgaattcgttgatcgatcgatgagaatgcatttgatccaagttagttggggaaacgtacatcgggagttgtggcccgggatgccttgaaggatcgtcgttctggcttgggtatgtccatggaagatttgtcgagcagcgcattcgcattcgcatgcgcattgttggaggtggaagcagctgatgatggcctgacctgctgcagcctagcaactctaggcaccgatgaggaagccctgcagacgatttagctttgatcaccatctatccatcttgttactccaattaagagaatcaaatactagacatgaatacatatctgacgactgactattgatgcagcagcagcagtaataaagctagtattagatgccttaaaattaacacagtgcaaatgcaatgcagggagatgcacacatacttgggcttggatgcttgctgcattttgttggccggccggagcgtacagttttaagttgagagatggagcatgctgcaatgcacacagacaaatgatctctcgtcctatttgttagtatgagctactcctatatgatagtatcgatccatcgatgatatatccaggtccagtatggcaacaatggacgtgctgggctgtttcgtcccttaataattatggcatgcagaccactactctaatgttatacgcatgttgagctggtgatgatcgatacgatcagtgcttttgcctgacgttgatgcccaacactaaacacgattacatcatactctttaactcatggccccatgtttgacacacgtactattcttcttcaaggttttattttgcttgatgatttcttatttaaaataatggcatgccaacacaaacctgaattctaaactctaaaactaaggaattttgtggcttccaagttatggcaactttgaggaataaaaaaaatatagttgttgatgttttatatgtgaggtgtatgaataaatgcagttgcataagatttttgtctttcaacttgggccttattatggtccatttgatcactcagcctgtcgaaatacagctagtcgccccaattgtcttattatcaaagacaccaccaccattagtgaagtgtttgagagcacaagcaactatccagctccaaattaaggttcttatatattactgaatgtgatatttttgtgtccccaaattttggatccataccaagtgtataatataaaacggtatttcttgactataacagatgatttttttttgacaccaacagatgattcgttggttgacagtagtaccaacacagatgcaagtaaaacatgaatctgaattctgaagttgtccgttcaaaaaaaaaaaaaagaattctgaagttgtcgaggaaggagacaaaaaagtgtaagtttacggagtttgataactgggccattggaccgttcgaaaaagataagtgggccattggtatgaggcccagcagataggcataaggcgaggccagcccatggggcagtattcctttctttcaacttttggcagagtccatgcttagtggctaagctaaagcagaggaggacgacagacaaactcaagtgaagactggagatttctttctttctttcattcctttcctcctgcgagtgcgagtgcgatccggggcaaggcaaatccgattccgagctcagaggcatcaggcgtcgagttcgtcgatcgatcgctgcagagaagcagagagagatcgagagagatgtgggtggagattctgtgcgggctgttggcgtacaagatcatccgccgcgtcttcttcgccgactccgacgaccccgcgcacctcgccgacctcgattccgcccactccgacctctgcttcgccctcgcctccaggttccgtctcccgccccctcccctaatcctcccccgatgccctaaatcccctatctccctccctccaggctcgagaagctctactccgcccgctgcttcgtcggcctccgcatccccgaccccgacgccggcgagcgccagcatgtcgacctcgtcctccttaccaacaggtacgtccttcctttcgtccccccgtcttccgccccattagtacctctaccctacatcccctgcttattacagatttcttcaattctatgtacggatttgtaccacctctctactgcacctcacaagttcacaacactagaatcgaccaatccacactggccttcactgtaatttgcataccgcactacaattcatggatcattaatgtgtgcgtttgtatcatccatgttcaattacttgtggggatattgctttgtgcaaccaacttctcaccttctttcctcaacagggaggtcatggtagtggctatccacaacatttctggttttgttgaggtcgataaggatggcaactggacttgccccagtgataagaagaacaagcatggtgttatcccaaacccggtatgtcatttatttccttcactgcctcattatgacccattgccattgcctcttgcagtaaggcaccatgtatattgcaactcttgttttcattcggtgctatactcttgggtgaaaaaacaaaaaacaaaggcaacatacataattaggctccgtttgacattttggtagattatggtcatcttgcttggtgcaacttcttttagacatttcagcgttcggcaaatttcttttctctcgatctttgttgcagatgataactattatgttccgaaaatttggaatagttgtgagaaacataacagttgatggcatatttttctaaccttaagtttatataattaaaaggaactgtaccgattataaatttccatttccacagcaacttcaaagtaagttataatgatgctaactgtcattggtcagtgaggcttacaacaaactctaacctgtgtacagattctgtcttgtgacgaaaactcttcatgttgaattcttctgtcagtaaactttatgctgcttagtcccttactcccttgctattattgtcttccaaaccataaacatatgtgcatatcaggtcggaatctgatttgggattttgagtgtttgagcgtgcacagttgatagcccttctcatgttgagcattttgttttgctaattgtttcttacattttgttctgtaggtactgcaagtcaatagactggctgccaatcttcaatcgtacttggagaagaggggagcaaaactgcctgatggtcatataactggaaagattgtactgccaaatcccaactgcaggttagttcttcatattgagctatgttctttgtgatcgtacttgcagaatttttctttctgttttttgtttgtctttttattttttaagttttaactatctaacaagtgctccaccaggccttcctatgccatcactcttcaaccagaagttatcttgtacgatcaatggaaagatcttaaagcagattccaaaggtggactttcaacatggattaaaggtgcattcagtggaagcaaaggtgacatgcaagattcgttactccaaaatctacatttcattctcagcacgtcgcctatgtgggacaggtaaagaacatggccatgaacacttaaagcgaacagccaagaagcaatctaaaatttattccgataatcgaatcgcagcctatcacagaacatccgttacctgttagttctgcacaaagatgtagaggctgaggtcaaacttttatagttgatatttccttgtgtaggttggaactcaaaggggacaggaatattcttggtgaattcattgaattcaaaggcaggcacgatgatattcaggccttgaaatgtctgaagagatcaaaagtttgccgattcatagtccagaaatcaactctgtttggaggttttggtaacttttctgcactgtaccttcttgttattctgtttgcgaagcactcctgtgaacgtacatgggtcgaataatactctaaggttgtcagaaaaatgcatttgtttcctggaagctatgctagtacaaaatgaaataagaaatgagaatagatcaactgatatgcacggaaattgcttattgatgtcttgcactaattcatatttgtaaaataaaaggtgatgtcttgcactaattcatatttgtaaaataaaaggtaaattatataattcagtagcagtagatgattctgttgtcataaataaatgagataattagcttgattgacttgctacatttaccttacctggtcgttttgttattgcattgcaggtcggtcaagagtgcaaatattgtattcaccacgagattatcgtgctgaaggaacttcatcctctgaatggaaagagatatcagtgaaacaatatacagaaattctttttcagccattgcactcgaaaaaagttaagaagttcaagctgtcaagtgttgcttctgtgacactgagtgcctagtgagttgaaattttatccacggggtacttcctgttgcagtagtatatagagtaccttcctggcttctgtatgtgctcctcagttaaagtttgtcttgttgtttctgtacaccaacctgtacttactttaagatgtcagttagcatgaaattagaaaaaaatgaatgatttgaatatgcctcttaatcgttgatatttagtttcatatctgtcactggaagcggagtccctatcccttcacagtattgctggtagggattgtcggtctagtttattttgttctttcttcatctatgcgctaaagatgtgagtggtcattttctcttctccggacccacctcattgattcacaagatggacctggaacatttccttgctggccatgtgcttttagtctatgaattcgtatgcatcaagaaaatcgtgtacaaattgtcaaggagttgtgttgttttgggactaagggcagaaagataagagaaatcgtgaactgtaatacatattgtcaacgagtgatgttgtgttgcgactcaagagagggcagagagataggagggacgtttacaatgctatctgtatctgactgactagggtctccgtcagatgtcaaacatgattttattattattatttcccatggtttttgtttaaaggttggtgatcttgacctctttggatagggtatttgatgtttgtcaaagttgtggttaaaccatgataatggatggatacattaaaactgatgtgcaactatatctttctcgtcccttcaacatgactacatcacaaaatggctttgcatagagagttaacacagctgcaaatatattttcctagtgtttgatcacctagggattttgtttgttggtatataagtaatcattgaaatgatcttaccctctgtaagaatggaatacatgtggcagcttggccatgtacaacatgtacatttgaccaaaccaaatttccctccctttagaggagaaagaataaaagaaatagaagaagatacaagaggagtagtacatgtctagttgcacgtgtgatatataaaataaaggaaggcaaatcccctagtttaatttaatttatgtccccgtatacgccactggtgaagtccagcatgagtttgttgagcttctttgtgtggatcctctgtgggatcaccttgagctcatcactgcaatttgcaaacaaataaaaaggtccatattaatcaattgatactaattcatattaattaattaattaatctaatctaaatgacgaagaagaggaagacgatgaaggaacctcggcggcgcagggggtcgcggcgcggcggcggaggagatgagcatctgggcgagcttggcggcgtcctccgggcggcagatggcgttgttgaagcagaggtagcgtccgtaggcggtggggcactcgtaggcggcgatgtgggcgtcggcgaggaagtcgacgtcgacggtgacgaggacgccgtggtcgtacatgtcgggtgcacccttgaggtaagggtggccggcggtgaggccggggccggtgagcaggccggcgttgatggccaccatgtctactcctctgtccattgccagggcccacgccgtcctctccgatagcgtcttggccagagcgtgccacagctgcaattgatttaaacacaatgtcactctcactcactgtgcaattcttcttcttcctaacacaattcatcaataagctataatccgctacttggatggctgtcaatttcatgatccaatgaacaagtaaattattaaaggagtctgatactacctctttttttttaagagacaatccattatatgccactgagtttgtcatagctctacgatttgccactgactttgtcacgttctataatataccatcgacttttacttaacttctatgatttaccattgccgtccagttagtctccgttagtactgtacaattttgtccaaatgaccaaaata

SEQ ID NO: 5762 - DNA, 32372 bp, Oryza sativa
cttacattgtgaaacggaggaagtagtacatagggagtactactgctgcagctgcaaaaataccagccgaacacaaaagtgtttctacctagaatttttgtagatatgctctcacctccctccgcccgtcgcctctttcgccattgcagcagccggcgcgcgtgaatccatgcagctagcaacggtgtgagatcccgtacggcgcagggatggcgatggcacgaatccagcaaggagatggcagccacgtttgcgtatggagaacccaactgctggttgaatcctcgcatactaatactagtggtattcataaacttcaagtcttattactactccatgacttaaaacagatcgagattcgagcagtacccaaatccatggggctcaaatctgatttgagggagttgggcatggcagcaactagtagttggattctaccacattcaatccaactatagccaaagttcaatccatgcccttctaccgcgaaaccagatatagaggatcccttgttccgtgaaaccagatatagagtgtccctcaattattaaaactagatcaatttaggttcctaggcggttgtgatggtggttttgtcatgcgtgacgtcaatgttggcatttcaattagaataaataaataaatgaaatatgcagaccttacatatcattggcatcttcttcctctgccctctctctctctcatatcctcttatttctctctccatcggtgggggatgggcatgagataaagcgttctccgtcaacgggagcaccatgccggagcatgctctcgatgacagccatgacgttgaccagggcaaggaacaacgagcgtgcggatagcctactggagcccattgagctcaccattttgatcaccaatgccgcccaagccacactgcccgccggatcgggaggcatatttggtaatgctgcaccccttcaccaccgggttgcactcgtcccatgctccttcaccaccaggagtgccttgagcaagaagggggtggaggagggtgttgtgattcagtcagcggcgtatgccgcacaaagaaggctgcatgttcacagcctaggaggacctagtgtcccagaccatcgagcgaaggaaggcgactatggtcttatacacctcgatggttgtcgttgtgccgcccacgacgagaaggctacaagaaggcaccggtgctagtgagaggtggtaaaaagggctcttgcaagtgggggacattgtaacaaccggccctctagaacctcgtagcgcaacacatccgacgggtgggcacacttacacataccacctcacttattctttcatccttgcttcatgtaaaagggttaacccgagagtgatatggttggagtgtcatgcctttataaattggtttcacccttgctaaactagtattgtggtactaaacatacgcacacaactctcatgggctacataggtcacgtcctaattagcgtatgacatgccatgacatgtgcctcacgcgccatatgcccacacattgattcatacgcacaatcacgagggtcggctacgcagacagttctcatgggccacataggccacatcctaattggcgtatgacataacatgtgcctcacacagagcccacacgtgtcatgcgccatgagcccgcacattgattcgtacgcgcaaccacgagggtcagctctgataccatttgtaacaacccaccctccaaaaccgcagagcccaatgggtcggcccacttacatatatcatcccacttacactttcgtcctcgcttcgtgtaaaagagttaactcgggagtgatatggttggagggttaggctcttataagttagttctacccatgctaaactagcactgtgatactaaacatgcgcatgcagctatcatgggccatacatgccacattctaattggcccgggatgtcacaaacatccacaatgatgtgctagagcgtgtcctggacagtcgcacaccgcaccaggagcttgagcttgactagagtacaccgtcgtgcaaacctgcttctccgcatgccaccaccctcgctaatgtagtgagcctgaactccgccaatgatgatgtcaatgctcgtagatccaacaagggcgcatgggatgagacgcgcggaggcacgtagggtgatgagataactatcgttgcccgcgtgcatccaaatccccatgtcgttccgccaccgctgacagcggcggtcgagcttgggcacaaccacccttctcattgcctgtggtagcgcacggggacttggtagtgtccattggacttcaccatcttcttgctccatggggggggggtgcgttgtcaccttcatgtccatcgctgcggccgtgcaactccccatccttcctcctcactcccgcctttcgatcttgctcgtcgatgggcacgagcaggatctccggcggcgcgggcggcagcggcatcgtgttcaccatcgccaactgtggctagggagggagaggagggaaggggaagaccacatagcttgcgcccgccgttctttgagctcgttgcgctccatcactgcccacctttagtagtgagaaagcggaagtggcggtggccgatcggtgagggagcatgaggagggagggggaatgttgggagagagaggggaaagaaggtgccgcccgccaggggagatagagaggtgagagtgaagtgggggaagtaggacccactgacaagcattttgtttatttttttaattttgcttataatgacacttcaacaccgcacgagacaagggctaagtcaaaacaactaaccatgtaggtatccaccaaccaatccaaaccgtttttggatcttgtctgcactagttttaggatttgagagacgtgttatatctggtactgtggtaccaggacgtgattcaaactctacgtcaagacaagggatcctaagtgaacttattccttgatttgcaggtgggattgggaagaggatattttcctttccagtgggttaggttgggcagcggaatgataataggcttttggcccatattccattccactttttaaaaaaattcctcatgcatttgggctgttaaatttctgtccttttcttttgtgagggtaagagagacttattaattgaacataaggagcattacaatcttcaagcaatagacgttgataccgtccagagtcgactccagctagccaaagagcactactacggcagcgtatagcatgctgagctagctcatgtgatacctttgtttattattttgttcttctgtttaccttggcgatacagactccaccaaataatatgtgaccaaaattacaagactgatccatactagtgccagaagaaaccgaatttgcaatttgtgtggaaatcctgtccttagcttattaggtgaaggaagtaccaactagcaaggagcaagtaattgtcagggagtgtgatcctgaagaagacaaggacaagagaagggagccaagtattgagaaggcagaagaagcaggaagacaagctgaagacttgggccgtcatccagctcgtctgaggaggcccaataccaaggtccaaggcccagactgggttgcgtgagtcacttgctcgcctgtgagctggcgtgatgttggtgttagttaaatactgttctgtaaactgaattaagacattgaattggcaactggaggcgtaggcggcggcggctcgatcctgttggatctgagaggaaactatcatagtgttgccaaattatgtgtgtgcttgagtgaatccttgtgagccctaacaatctggtatcagagcccttccgtgctgcatttcctcttgatttggctgtaaatttttctccagagcgaggtgggatttggctgcttcggcggtgagaaatccacaaaagtttcggctccctcaatctggttggctaaattcggagagcatgtgagggattacggtccaaaactagccatggatctagacgccaagtttgatctcttgttcaagaccattgctgacaacgagaagaagaggatggaggcggaggagcgtaccagggcggactacttggagttgaagaagacggtcgagggccgcataccggcgatggagaagaaggtggaagaactaggtgagtcgctgcagtccttgagcaccaaggtcgagcagctggaaggcaacacgatgcggcaagtcaagtttgaaccattctctgctgcaagtgcttcgggtgttcaaggaggagctaaggaggagcagttcggaggtgttgcgggaatgtttactcctaatggtacgcctgagaaattttccccttcccctattcctttcaattgcgattcggcatcacccacttttggtaacggaatggggacaatgaatctaagtagtgctattcctcctatgacttgccctcaatttactggtgataacccccaaatgtggaagtcaaactgtgaacaatattttgatgtctatggaatattgccagttcactgggttaagattgcaacactcaatttttctggtaatgctgccttttggtttcaatctgttagaaatcagatgagtgggatttcttgggtgtctttgtgtgatttggtatgctccagattttttaaggataggcagcaagctcttatcagacaatggttccatattaagcaagagggcagtgtttcagagtatgtggaaaaatttgatagtctgatgcatcagttgctagcttattacaactccctgttgcctgtttactttgtgactaagtttattgaagggcttagaagtgacatcagaatggtagttttggttcaaaggccacaagatttggattcaacctgctcagtcgcattacttcaggaagaggctatggaaggtgttaagttccagggctacaagagaccaaacaattcagttatgattagaaacaactcaccagccccgatagttggacaggcctccacaccccagaaaatcttctctcctcaaattactgaagatagaaggggcactgaagctgcaagagcaagagatgacagactgtcagctctgaaatcctatcgcaggtctaaagggctctgtttcacctgtggtgaaaaatggggtaaggatcataaatgtgccacagcagtgcaattacatgttgtgcaggagcttcttgatattttacactcaaaatctcctacataaattgaatcttctggtggagaacaagaaattgatgaagtgggagatttgatgtctatttctcaacaggcagtttgggggactgaatcctctcgttctatcagactcatcggctgggtgcagggtactgaattattgatgctgatagactctggcagtactcattcctttatggatgaaacagttggttctaagatggtgggtgtttctccactcaggaagcccttgtctgtgcaactagctgatggtgggtccttgttatgttcccatgagattgctaattgtaagtggtggatgcaagggcattctttctctagtaatttcagactcttgaacttgggtggctatgatatcatattgggcatggactggttggagcaattcagtcctatgcaggtggattggtcacagaaatggatggaaattcaagttaacaaccagcctgtcaggttgcaaggtataacttcccagactaacagttgcaatgctatctctgctgaacaatgcttgggtatggctagaaaggggtctattctgtatttggtccaattgacatcttctgtttcagaaatctgtgacactatgcctgaagcagtacataatttacttctcaagttccaggatgttttttcagaacctactgaactccctcctaagcgatattgtgaccatagtattcctcttgtacctgtggcaacacctgttaatttgaggccataccgctttaatcctgctcttaaggatgagattgaaaagcaaatttctgatatgttgaaatctggagttatccagcctagccacagtgctttctcatccccagctctgttggtcaagaagaaggatggtacttggagacttgtcattgactatagaaaattaaatgccattaccatcaagggtacttatcccatgccaatcattgatgagcttttagatgaattatctcaggctaagtggttttctaagttagacctacgagatgggtatcaccaaattagaatggcccctggtgaggagtataagacggctttccaaactcatactggacactatgaatacatagtaatgtcttttgggctgacgggagctccggctacctttcaaagtgcaatgaatgatactctgaaaacagttctttgatgatatcttgatctacagccctgattttgagtcccatctggatcatattcaccaagtactagccttactgtctgaacatcaatggaaggttaaattgagcaagtgctcatttgctcaacaacaacatacttatcttggccacaccatcagtgctaccggtgtccatactgatcagagcaagatccaggaagtgttaaactagccagtaccaaccactatcaagaaattaaggggtttcttgggattggccggttactatcgaaaatttgtgaagggatttggtctcattagtaagccccttacaaatcttttgaggaaggatgttccttttgtgtggaccactgcaactgactcagcttttaaccagcttaagtaggctctggtgactgccccggtcctagccttgcctgatttcaagaaggtcttcattgtggaaactgatgcttctgaagctggtattggggctatgttatcacaagacaatcatcctatcgctttcattagtaaggccttgggtccaagaacaaaaggcttgtctacttatgagaaggagtgcatggcaatcctcatggcagttgatcaatggaggtcttatttgcagttgggggagtttattatccttattgatcatcatagtcttatgcacctttctgaccaaaggttacacacaccctggcaacataaagctttcactaaactccttggcctcaattataaaatttgttacagaaaaggtaccagtaatgctgcagctgatgctctctctcgcaagtttcaggatgataacagtgaattgtatcacatttccagctccaccccactctggttgcaagaagtaacaaaagggtatgctcaggatcccttttcccttcaattcctcactgaattatctgtctgtccaacttccaggaagcatttttctctctctgctgggttactgaaatataagggcagagtttggattggtaacaatgataatttacagcttcaactcatgtctgcactgcatgacagtcccattgggggacactctggctttctagttacttataggaaaatcaaacaactgtttgcttggccaaacatgaagaaaatggtaaaaacctttgttcaccagtgccaagtttgtctccaggccaaacctgatagagcaaagtaccctggcctccttaaacctctccctgttcctgaaggagcttggcaaactatatccttggatttcaatgaaggattgcccaggtctgagcattctgattgcatcttggttgttgtagacaaattctctaagtacagtcacttccttcccttagctcacccatttttagctctatctgttgctaagctgttcatgaaaaatatctttaagttacatggtttgcccctggttatcattttttttagagataaggtttttactagccaactttgggaacacttgtttgagggagctggcaccaagttacatttcagttctgcatatcatcctcaatccgatggtcaaaccgaaagggttaaccaatgcctggaaatatacttgcgttgttttgttcattcagttccttccaaatgggctgcatggttgcatctcgctgagtattggtataacacatcctatcactctgccattcatgctactccatttgaggtcctttatggtcatcccccaaaccattttggcattggtatttcagactgttctattcctgagatggatacatggttcaaggaaaagaagttgatgcaacaacttgtacagcaacaccttcaccgcgctcagcagcaaatgaaacactttgccgacaagaaaagaagtttcagaacttttgctattggtgattgggtatacttgaaacttcagccgtatatacagacttctgtggctgtcagagctaatcacaaattatcattcaagtattttgggccttttcaagtgatttagcgtgtgggcagtgtggcttatagactttaattaccacctcatagttctatccacccagtgttccatgtgtcccaattgaagtccgctgttggattctctggtcttgttcaatccaaactgcccactgatacttctacattgcagtttcccttgcatattttggacaggcgtttggctaagaaaggtaattcaactgtcactcaagtgctaactcaatggtctgattctctcccagaggaagccacttgggaagatatggaggatctgcgttcccgttttccagctgcattggcttggggacaagccaattttcaaggggaagggcttgtcaggaagtgtgatcctgaagaagacaaggacaagagaagggagccaagtattgagaaggcaaaagaagcaggaagacaagctgaagacttggggctgtcgttcagctcgtctgaggaggcccaataccaaggtccaaggcccagactgggttgcgtgagtcacttgctcgcatgtgagctggcgtgatgttggtgttagttaaatactgttgaattgaattaagacattgaattggcaattggaggcgtaggcggcagcggctcgatcctgttggatctgagaggaaactatcatagtgttgccaaattgtgtgtgtgcttgagtgaatccttgtgagccctaacagtaatacaatgttcacaagttgggaatatgcgtgttttcatagttttggtctgctgatggatctcggtaggatgtacgtaattctagcagagatctggtttaaaagctgaaagattttttcctgttgcccctaggggttgtattttctcctgctctattcaataaaaaggcactctagtgctattttccgttaaaaaaagatttttgttaagaaactgcagaaggtaatgcatggattcagccctttatttggtttattttttatttggtttatatacatgctcaacgaatcaagtggaataataatacaagaatggttgattggaataatacaaggcagtgttgggtggatgagggagacgatcagtgcgagtgcgggacggcgagtctcttgacggtataattcttggcaaaggcggcgtacaccacaaagttgatggcgctgatccccgtccagagccagaaatagtagtccagatggccgtcgttgaggtcggcggggagccagcccttgttcgaggtggtggtgacgacggcgacgatggagacgacgagggagttgacgtagtagcccagcgagagcgccaggaaggagaaggccgagcagaggctccgcatcgacacgggggcctccgagtagaagaattccagctgagcgatgccgcagaagacgtcggagcaggccaggatgacgaactgcggcagctgccacgcgatgctcaggttgccgccgtccctgacgctgcgcagccgccacgtctccagcacggccgccaccgccagcgccggcaccgccagcaaccgccccacgcccatccgctgcagctgcgtcagccccgcggggttcccggtgtagcgcctggcgatcgggacgaccaccgtgtcctggaacaccacccagatcatcatgaagatgacctcggcggagttgagggatgccgccgggacagagaaggatccgatcttggtgttcatggcattcccctgctgcacgaaggtggtggccgtctgacccaaggaagccgcgtacagcacgctggtcacccatatcggcagcatccgcagcagaatcttcacttcctccacctgcgttaccgaacactgcagccaccctccacccccaccctcatccttatttatctcttccacctcctcaaaaaccactgccgccttatctaaccacctgaaatgaaacaaatataagtctatatccaaaagtaaccttttacacaaattaagattatcaaaattcaggacaagtgacacagccccctgtcgatcatcccatccattactgttgttcggtttatctcactccttagttcagtcggcttttgccttatgaatgggtagtgttgttgttttttttttgtacaatctatctactgcggcgatacactgggacgtcgtccccccttgaactgtgtttttaatcttataaataaagtgatgagttctcgaaagaaaaaaaattcaagacaactacaactatatcagctattttttagaggaagaagaacaagaactacctaaggccagcttatatatatgttcgccttgaattgcaaagcgtatataaagattaagtcacagaagtacctgaaaccatcagtatgtgctagtttgactgattgtccattgcttaaatcagcatcatccccttcatacaggagtgcgttatcggcaggaacctccagttttctcttcttaaaagaggcaacaaaaaccattacaacactcttgagtgggcttccactgggaagctggaccttgtacactggtgttcctgccaaaaaggcaactgtggcaacaacaaggcatattgaggagatgccgaatccgagagaccaagcaacattttgctgtatccaaacgacgacagtgcccgaaatgaacactccaaggttgatagcaatgaagaacaagctaaagaaagattgcttctttttactctcttcgaggtttgaatcgttgtactggtcagctccaaaggggagtaatgctgatttgacacccccggtgccaaccgaaataaggtagagcgcggtgaagaagacaaaatactgaaaccctgttgcaggaggacatgagctcccattgcatggagcaggttgtagtgatgggatgacagcagaggcggtaattacaagcaacccctgtttgtttgtggacatatataactcagatagtacatacttatatggcatgagcacaacacatgcaaatgcaaatgagaggaattactactagatagctagctagtattaaacgatgcacaaaacgatactagtacatggcggatgcacttacaataagatagaaaactgtagagatggcaatggtcttgtactttccccagtatgtatcagccaagaaggctccaagcaccggtgtaagaaaagtggttccgttccatgtatcaacattggctgcgttagaggcggtagttccatggaggacggttccaagataaacgaccaagttgagggagatgccagcataggcaatgctctccaagaattcaaaggctacaatgaatgaagatgtatgaagtatttatattaggatacaactatggagtccgtgattagatttaaaaaaatgccaaattggcagatttaactagacagttgttctgcaatcacaagacaagtattctgacaagtgtggaaaggcgttatattcatttttcataggagtatatggttaattaattatgtatgtgtagatagatccatgcgactggtggatcgaggaggaagataaattaattaagaagggggtgggggctggggttaccctacccaagataagagcaggagccttccagttgaaggggggcttggtatagtgctgattggatgcggaagcctgcaagcagagggagggaggaagacagtgagtactgatcgatacagggcggtgagaaattgagaatgctcaatttaatccaatccaatccaatccaatgggaaattaatcccttccctcccctccctttctaccgtggagttggagtatatactagtactgccgatcatatggaagcaaagaaaagcttaattaggaaggatttagaattggggatatatattagtagtagaaagagagaacctggtggtggagcagcggcagttgggcatctccgctctccatgcccatcttcttcttcttcttcttcttcttcttcttgctcctctcctcacctcctcctcgatctcggatcttctaccactggaatggaatggtgtaatggtggcgaacaagaccccaactcctagtagttgtatttgtcggcttgcatcgtcacggtctctgtcacctcattaacttgctccctacaccctataatataagcatttctagactctaatacgatctatattattttgaccaatagtatatactataaaaacgagatgttttaagtaaaaaaactgtagtttgtttaataataaatttagtaacatcaattttacatgattgaactttttttattttttctattaatagtcaaagttaaaaatgtttgatttattagtgtgataaaaatacttatattttgggacggatagagtagtaaattaatactactccctccgtcccaaaataagtgcagttttgtactattcatgttcaacgtttgactgtccgtcttatttgaaaattttttatgattagtatttttattgctattagataataaaacatgaatagtactttatgtgtgactaaatgtttttaattttttcataaatttttcaaataagacggacggtcaaacgttgaacataaatagtgcaaaactatggaggtagtagcatacaaatacaatactccacggaaaattgatgactactccactgccacttgcaacctgtgagctgctgttttgacctcgtggggatttttattttctttttcaattatttatacatatatttataagggaaaaggattggtgacccacgacagccacgagaaagcgacacagactgatgggcttaactgggcccacgtcactaggccggatatcaattgggctggatgcaatatgggccttcatctctctcgtcgctcgatccctcttggactcctccccttctcgaacaaaccctaacaacaacagacaagagagaggcattgcacgatgcggcggtggtgcgccgccgccggcctcggcctcggccgccgcctcctctcctcctctgtctccgcccctgcccaccgccctcttccggcgcacctcatccccagccccaggccattgcccttctcctcccgccaccacctcttgactcctcctctgggtctccatccctcctccccaccgccgatgcaatggcagacgcagcaggtgcgccacttcgccgccaaggacagatcgcgcgcgccacggacgcccaccacctccaaggtcaagaagtacaagatcaagcccccctcgtacgcatccctccttccactcctctcttccatcattcaatcactattatcaacttctcacttactacttttttactactagctccatgaagtttcgattcagagtcatgaatgacggccaggtccgcaggtggagagccggcaagcgccacaatgctcacctcaaggtacaccatcttccatcttcttccccccatgcctttcctgctaggcctaggaccttatcatctctctgttgcttgtacgtatccaattgttttcctagtgaaacctaatttttcgatttaataatgatgtatcatgatttttcagtttattactgttatatcatggatgatgaattccctgctctttgttactatctttttttgcaaaaccgcatatgtctcatcgtggaaacatggatttccctgccattttctctctctctctctctcaatatgtagttcaccatgatccaacgccaatctattggttccgtgcccaagagagagagagagagatatgaatatggaccaattcggtaaaccttttagatgtcccgtaacttcagtctccagaaaatcataatgaccatcttctcttctcccccatgcctttcctgccactttaacttctctcttgaatgcctgttgcttgtaccagtgttcagtaccaaactttcgatttatgctgtctaaatggaaattttgatttgttactgttatatgttggatggtgaactctctgctctgttatctttgcaaaaccacatatgtctcatcatgaaaacatggttgccctgccattttctcttcctcgatatgattagttttaccatagtccaacgccaatctattggttccacgcccgagagagagagagagatgaatatagtggaccgattcggtaaacctttcagttgtcctgtaacttcggtctccaaaaagttgtaacaaaatctgacaacaccacttgagctacccttcctcctcctatacgctacacagaatcgaatcaaactcatttccacatagccaattgcagaactcattaaacattttccaaagttcattgatgcatccatgtctttcttatatgatcaaagttactcatagccactttaacttctcatttctactcactatgttatttagctggtactgccggccagtgcacaccgagtttgtatgtgatgctattgtttatgttgttgcagtcgaaggaagcgaaaagaagacttcggaagcctgcattagtgcacttagcttatgcaaaagtgataaagaagctcaacttctgcagctaggaaatcaggacagacatgatggagtttggcatgcgagacagattgatgagtactgagtgccaactactgcattcctcacactgatttgaaatgttatttttttcccaattgttgtttgatgcattctcatctggttttgttttctgcacaatctggctgataaagcccacccgtcttgtgctatgtacaatattcagcataatagtgggataactgctgctggtgaagaaattggtcttgcacacacatcgattctacttaacgtcttcatccaagcttcaggccaacttttaacatggcaatatttctctgagagtttagatatggacactctggtcacacaaaggcatagttgttgttttctcagattgcggccagtagattttctgctcgagggtgaatgccgttgatcatcgccaggcgattttgagtttctgaattcagttactgatgatgatgatgactacatcatgcacacataaacctaaagataagagcatagcggacacgatgtgccttgttgatcatcagttccagggagtgtttgagacggaattggtcgagaaaatcaacaagacgctatatatttcctacattgtccagtctcatcagctagcaccctagcagcaacagggattgcattgtggtaacaagattcttcttgtcgtttgagctttttatcttagctttcggacctcaggttttcctttcagcctgtgcccatctctcttttccttcttttcaattttttttcttcccttcttttgtggggtttacagtgtcctttggactgaatatcgccatctcattcattacgaaatgcagattgggacactgcgaagtgatggagatatatagagatccagattcaggcacacgtcgttgttaataatcgatttagcttgtttgctagttaccctatgcatatcactctccattcagtagaatgttgaatcaagacattgatcgagaacaaccaagctggtaacagcgtcagcgtgaaattacatatcaaactgacctttaatttcggcatgcagcttgctcactatcattagttggctctatagcatcgatagtttttttttctcgaaatattttttgcctcaattttcctcattatcatatagcagcaaaaggcttttttttttgtttcagtaaaaataacagggtaataggatcatactactactccctcaattagtcactagaagaaaatgggttttggacttttcaaagttaatacgactatttaatttcttttgtataaatccaaggttttataatatgaaatctattgctcggataaacttggctacaaatattttaatatgtccaaaatcgacacatcattttcataataatggatagagaatcggtttctatatctataaatggatatacacaaccaaagattacacaaatacatacactccacatctcataatcgagattaaaaaaacaaaccaccaaaaagaaaagacaaaaacactaacttcatgtttttcctcatcacttcaaacatcggatgtggagctagcatgtctttctacctgcacactctctcgttgacactgtagcaaccgtaaaaacttcatttgctctgccatgagcaaaggaaggggccaggactagtccgcccagctgccttgacatcaccaagcaccagcctcataccagacggacaatcaatgccccccttagcatgagcacatccatcgccgctatgtcgttgttgtcgtaaaataccacctccgctaagctaccgcagcttatctcaccaaaagtcatcgccacatcgcacaaaagcgatcatgctacccctctgctgtcaccgtagaatctcacatcagacaagtcacggaagcttatctcgctagagaatcatcgcatccacgctgtcatcaccacaaaccacaacctccgtcgagctgcagtagcttatctcgctggagagctgccgccacaacaccattgtcatcacaaaccacaaccttcgccgagctaacatcacagcatatcttgtttggagagtcgccactatcgagtcgtcttcacccctaacctctgccaccacccttggcattgctcctagcgcgccgctgagctgatcagccaccaccatcaccaccaagcaagccaaccgctactactgccagcaccaccaccaacaccgccatcgccacctaggccccaagcactgccacttcgtatgccgctagtagctaccaccgtcgacccttccacctctcagaatgcccccaccacctccgttgtcactgccatcatgcctccatacccaccacgacctgtgctagctagggcctacgtcaacgccgccgttcgcctctaacgcggctttgccccgtctcggccgacgagacaaggaggaacgggagggaaggagggagaggaagccttatagtcaaattaacttctcgaaggattgaataacaagaactaagcctactagatgaggggtgaatggtaggaacaccaaaaaccaaatctattttgcaaaattaaaaagttaccctcaaatttaatgaagatcaggtctgaccgacgtgtgtgtttcgatttgactgggtagatgccgctggtttggccgacgatgctcttttgatctggctgccttgctcaccgctacaacctcctgacgccaccggtctatagacgtggataccgccgatttgaccaccaccgcaccaccagttggaccgccgctttgccgtcgatgtgaccgttgagatccaaataaaaacatatcaaagaaactcttgaaagtagatcaactttattgcattaatatatgtttataaattgcatctaaaacactcctccctctcaactcacgaactaggcccgaagcaaatagtaactttcctctcccaaaacgttgatatccttctagtctcaaccagtcttctatttatacccataacattactgcccctagccacgaatccaactagaactagcactcctaatcaacataggaaacctatcaaaccaggcaaacaatgtcaccatacaactccacactccaatcttctcaaacttggactccgttttaaatttgacctatctttccataggcacaactctacgtgtatgtcatatgaaaaccttcacctccacatgcattgttctctagcctgaacatcccattgtctagcgtgataagtcccaatccatcaccagctacattcccatggcctcaactaacacctacacatgaagaacaaaaaatttcatatttgagtataagttcgcaccaacttgattcacatcagcacacaatagtatcacatacgaataaaaaccatctagaactcatatacatgaaacaatctataaattccacaaaaacaatccaaaaccgactccctcctggagtctgccggttcgaccgtcgggcactccagttagactgcacgaacaccaccggtttgactggactcctagagccgacaaaaaccgtccacaataaaaaaaactattcactgtattttaaataaatactttactttgataattgttcatcaccaagattaatcatcacatgattgtgcaatgtggaggcattctaaacgatattccttttgtgacgggagggagtaacattttaactaacaattgtggcgtgctctgtaacaagtaattaagcacgtacgctagcttacattaggctatatatagatggtaaagtagctagctagctactagtagcttacaagaaagtgtggctagtcgaacaagccgaagctgtgaggatagtcttgatgaaacaagaggtggtgcttggtgtcaataatggtacacagctgatggtggtcgggctgcagcagggagggggagatgatcacgtcctcctgcttgaggtgagtggtcgtaagacgatcgtggccagtctgactctgatgatgaactggagtactgtcttggaggcgtatgttggatgagttggaggaggaggggcgggtggagccggcgagggcgttgcggtgggttggccatggatggttgtggtcggaggtgtaggtgacgacgagcattgtggggtcggcgcggctgcgctccacctgcttccgggcggagcaacctttggagctgctgcagcggtagtacccgcgagggtagggcgaccccttgatgggcttctgcccgtacttcctccacgcccacaggtccgacggcaccacctcgccgccgccgccgccactcgcccccgccgggatgcacaccaccttcttcgtctggctcttcctgtatatatatatatacatccttacagctagctaggtactactccagtataagaagttaaagaatacctacgtaccttcgcttgatgggcggaacgacataatgagcaccagcaaataactcctcgccgtcgccggtggtgtcctcctcaatcgtcgtcctcgtcctcgacgctccctgctgctgcacctgcactactggtggtggtggcaacagcgcatggagaaggtcgcaagctgcagaagcatccaccatgctctgctgctgctgctcagcgtgttggctcactgctgcaagctggtcttctcctcctcctcctcctcctcctaagaggtgcacatacggcggcgatgcagcctgatggcgaggcgccgtctgcagctgaaggctggccctcaccacatccgagaggtccccttggtcggccgacgactgccaaaacaagctgtcacacatggtcgatcgacgctatatatctcgctagcaagagatctccatattaattccagaggagattaatcaggccggccggacagggattatatgtatatagtattgaagaagaagacgacgacgacgacgacttaactagagtatattgtggccaccatgccatgcccttgcatgcatatatgaatatataccagcacaacggaaagaagacgaaggaactaacacaccccacatccccatcgatcgatcgatcgaagctagatagtgcgatatatagctagcaagagataggtaatagctagtcttgtcatacatcaacaacaaccgatgatgatgatgatgagtactagtgtcactcacctacagctatactagagttactccatcatccattcatctctccttttaggctttatgtatatatatttccatttcctttcactaccaccctgttaattttactttgatgcatagttattgttttgattgatctttgagtgggtcggcgggcacggacgggactgattgatggatatatctgtcagacagacagaccctaaatagattgatcaacaattgttgatgggtgcatggccatggcgatctcaggtatcaatccattcacccatccattcatatacatatactgtatctcccccaattaattcatccgatcctcactgtcgatgtgctatctatcttgtgtacttttccatatgcatgattaggcagctttcatcaacagcaagaggcatatccatgcatgccctccagataaaaagctatactccatagtacctttaattcgacggacggcatggttctttttacatgagaaattcatcatatatctgatgattatgcaagcaattgcaagtacagctagctagattaattaaactgtgtgcatgtagttcatcgacaatcatatcgaacgattacaatgtcatccgctaattgtaattaatacttggaatttagtggggattgtccgggcccacatgtcatccgctgctactatatcaacagtattgcataggatgtgcatcccttggacttaagtagtactgaatatatatcctatctttatatatagttggtacccattaagaagcatttacttctataaagccacataatcaacaattttaagccatcagatcatattagtataaagataacaaccgctgaaccaagaagctacttattcattcaattcaatcatttattagttatccatctattcacctccctttgctccacctcatagtcacacgtagcactgctacatattttatgcataacaccatgttttccggatataatatgtggttattgtttaatatgtatgttttattttattatgcatgataaggttgcatataattattaggtatagttacctgaatccattttcagaaaaaacttgagtggggtagagagatgcaaactgtttaactacaacgatacccatattgcgcatgaagataatattcatatattataacaatacacaatgacacttgaaaaaacaaaacatgaatggtattgtaataacataaggcatatataaatccacattatcatatattttatatatacatagagttgcacttaaccatttaaaactatgattttgtttgacgataaatctataaaacccatggcaaagacgcggggcgggctgccaactagtatatatgtatgcctgacccatgattcttgtgtagatatctgtaaaaattattaatcaaacaaaatgcattttggagctgccacactgctagctagagtagctagagttggattctcgtttccaaggattagacgacaaggtagaatgaatgaatggacaaggatcgattaaattaagctagcagctagcaaccccatgagttaaaactcagagcatatgtagtatgtgcagtagatcagcaagtgcatggactgtggtataaccggccgtatatgtttagtataacctgccgatgtttggatggtggtttagggttgggcgacggaccatggaggcaggggttgtaggggttccgagcgaaagcttagcccaagtcattgggccaacaatgatcatacttttgggcgtgttaaccctccagaggacactgttgaggtacccctcctctcttagcaaagagctctgggtgtaaaccttgtctagttttttggacggacgacgacggcgtctttcggtgtcgcgaccctcttgagggcataatttttacctcttgagggcgtaatttttagagtcttcgttccgtggtggtggtgatcggtctcgcatagcgatagccaattcggtgcccggcttccctctctgtagcatgtgtttaggtggttggcacatgatccggggcgtgtgctctggtgtacatccttgcttgatagccaactgtcaatgtaaaacttttcttgtaacattttcttcctatcttaataatattggatggtctccttcggctattccagcaaaaaccagccgtatatacccagagattaataattaggctgcaatactagcactctcttcttttacatggaaacaaattcaatagtccacatccatagttttttttttagaaatgcttttcttaatatatactgccaattataattcaaatggagtccattcaattcactgccgcacatcgttacagatgagagcagtttggtcgaacctaattaatgcatccaaggcatggaatggaggagtaactaaaaacattactcgcagagaactggtggtactgatcgatcgagtgtgattttctttcctctgcatgcagtgcaggctagtaactgatcaattcaagtgtgtgtgtgtttgtgtataatattcctaattagatataacaatcatcactagtgcactacagtagtcgtatggcgacttgcatcaagaatggaaggaacagaaagttgtttgattctccactgcatatattactataatgatatggcctggcgatcatacacagtatcatattattggtcgatctgtagctagctgtacataacatggttgcctagtgagctgcatatgttgtacttaacccccaaacaaatacaaagaagatgaatataagcacaaattaatagtgcgtcgcgagtgtctgtgttgtactgtgtaattctaaaaaaaaagtagtgatgtaagagcatcttaaaattttactcctaaaaatcttggattagctagtatcgtcccaaaaaaattgggcccaaatatcacctcctactccaagaatgcccctaaatttgatttccaccaactttaaaatatgccatatcatctcaagtaggttctgcttcgaccgtttatgtctttttatttttccggtaagagagggatcgatgctaggcgctgctaaccaatcgcacgctagcggctcactatgctgtgcaacaggacgatctcgtgcatgccttgcagttgcgacagcggacagcgtgggcatcagcaagtctacaaggcgcgtcgaggagggcagacagggctcggccatctcgcggcagggcactacagagtaacacatgaggtttcttggttgtctcgacgacgccctagacggaggggtagcgacgccttggacggaatggatgccgcacactagtcggagcagaggcgagcttgtcgatgcctttctgagcactgcccctgtgacggagggtcaccaacaccaggagcgctcggcaggatgcgacaactctagattgtcacgagaggagaagaaaaggtgcgagcggcaaaatcctcccatgatttcatcaatggttttgggtgtcagtaaatattgggaccgtctttggatatctctttaagacatggttttagattagattcctataatttatcttttagaactggtattagggagctcttggagatttctaataatctactactttatctgtttcacaatgtaaatcattctagtattttccacattcatattgattttaatgaacctaaatatatatgtctagattcattaatttcaatataaatgtgggaatgatataatgatttacattgtgaaacggagggagtacttgtactggagtagtatactaagtgatttggattaagttttggcagcgcctaaaactcggcccatcccagaaatgggctcccaggtgaatgaggagcccatacagatgaagtctggtgggtggttggcccatccatgttcctcttcttcctcctccgactccgacccgcagccgcaggaacccaagaggagatcggaagaaagagagagagattgaggaggaggaggaggaggagccatggctgcggtggtgcgtggcgtgttgaacggcatccgggagaagggcctctccaacttcctccgccatgcccgcgacgaaggctacttgtaagctacctataacccctctcctcctccatctatgctacgcagggcgccgatccggatctccatgcgtcccgtccgctacctgtttctcctctttaattaggccccgatccatactagtttcctctccccttcgattcagcaccgaatcccctcgattagggttgttgcttcatgccgcccagcccaaccgattggccaatggctatccgaccctcgcttttcttttcgctgcatttctcgataccatctgcttgctccatcaaactgaatatcgcttttgtatcatttgcagcaaatgccttctggatggaaacctcttgtaagttcccccttcttactagctctccgtttattctttttttttacacatatctggatgtgtctgtttgtctccccacaggtcgccgcagcctaatgtagtaattatcatcctctcttttcaggcaaactaaaatccacaatatcggcgccacacttgtaggagtagacaagttcggcaacaaatattatgaaaaactacatgacactcagtatggtgagtgaggtttctcgcatacgctacattttattctattatgcaattttaattcatttcaatcatggaatgtactagagtagcatcaattatcttctcacaacaagacatgctatgctatcctgttttgcttttttttttttttgccatcttgttttcttttcttccacttctgagatttgtaactttgctcataagtgatcaccctgggcttgattggtatgcatgtctttgtagtaatgtaacgtttcttactttctgtctcctccaaagagaggtgctttctacaaaactaaatactggtaaccctgcaggaaggcacaggtgggtagaatatgcagagaaagggcgctacaatgcatcccaagtgccccctgaatggcatggatggctgcaccacatcaccgacagcactggggacgaggcaagttttcttctttgtgttggctgtgtttcctagctttggtcctccgacataactataggttatggtaatgctttatcgtatgccactgacttaggaatttggatcttggaaaaaaaatgtcttgccctcaaaaccaaacaagtagacacaaatttggcatcaaaagtgaaacaaccgaatgtccagacaagtcaaggaaagcttatctgaaaagggcaaatcttggttattgcttcccatggctaaatgagcaaacatgcatgtttagttaagttagcaaacaggggagcctttagaatttactgcagtctgtatatgatgaaaactctggtggtgcttgttacttgtactgtccagtgtgatgcttagaaatgttattaccttttaggcgttttcttatgtaatattcagcggtgaattcacctcccgggcagctgcctaggcttaacgccattgaaccatttagcctagtgataaaacaacaccgatttgattagattccctggcaagttaattagttgtaggtgccaggtagcaagctgcaggcctgtttggctgtgtcccacagcatgaaggtagcaaccggtggcccaaggtcatccttgcctaatttagttaccttcagttaatcatgttgatgtggcccacagtctactcagccagcatgtatcccatagcccaggaaaggcatacaaaaggaatatttttatcttatatttcttgcagagttgttatgatgctatgatgtagtataaatttgagtaaatttcacaaaactacagatttaaggccaagtatcacataacttcatatttaatatcgacgttatcacaaaactacagaatttagaggtcaaatcattagcactaccattatattggagctataaacattgtagttttatgattgaattggcactaaacctgtaattttgataaatttgctacttaatctatagttttgtgaccatatatctaaatctatagttttgtgataaactgataaatttaaaactaaatatgtagttttgtgaaatttactctataaattttcatttatctttttttatctcgcgtctccgaagagacttcatttacttttttattaggcttatctactttttatctactagaaaatctgctggaatttatatactcattggatcataaatttataacaaaattgtgactccgatagaaatttgagcttatagacatgtttgatcatactggttttcattagggttgagcaccacccaggcttccaaaaattgctggctttgccactggtaatagttgctgggaatgtgggtgggtgttgtggttggatgggaaaggtgattctgacatacttgggtatgttgtggcagctactggagcagaatgctaaagcgtacatcgtggatcacaaggagaacttctccggcgagggtgaggaactgatctaccactccaaggggcatgctctaaacccaggacaaagggactggacgaggtaccagccgtgggaaccaaagaaagaagaggcaacctaattaaggcactgatccagtgtgtcatttgatttggtgtctaaaacaacagtcagccggctcggtgggctgaatctgaataatgttgtcttgaggattgtttacctgagaatggaagaacatgatggagttttaattcccatatgatatgtttgtttatttttgatggagcggagcgtcgtccccattgaatggacgagggttgaatgctggtttgctgaaatgaaatattgtcgattgtctggatttgtgatgtgatagaacgtcggtatcgtccgtccttgactgggctggtagctgctggatctggatgtgagagagggctactggctacgtggttggcttcgtctcggtggaatgaaattggggcggaagcggctgccacgactcattgtgtagtgtctgcatgtgttgtttgtgaatattttctgctggctactcctaataataagatattttgattgaatatgacgtatcctagtaatttggaccggcttcatatttagattcattatatgtgtcgcattcaactaaaattttttatatttatggacaaatggagtagctccctactgctaatatttgctgaaggctcacccccaacaaaaaaaaaaataaagaagggaaagggaaagaaagactgctgctgagtttgtgacagcagcaatgtctgtcaaagtttcacaaaggaaagataaagaaagactgctaagacggttgctaaagtttcggcacgtaggaaggaaaggaaaagaaagactgttaagaaggcggctggtttgattgaccatgtgccgttcataggagtagtccatgttatgtagccaaatgactcgtatagttagcttggaggactgagctttgtgggtgggttggttggttggttatacaaagacgctacgagtccgggaataagggggcaactaggaagttcctcttcctcctccgagaacgagaacccacacctccataacttcaatttccaagttatatatatataaaaaaggcaatggcggacgatcctctctccaactccaccaccaacaacaaggtacttgtcgatcttgcttctaccaattccaattactactactccatcggctcggcagattgatttgattgtttgcttcttcttttttctgattgatttcagagggcagaggggatccagctccagcacggcgactgcgagagcgagagcactgcgcccttgctgctcgcgccacacgagtcctaccgcctctccgccgcaatcctcccgtgggttcctcttctcctcctccttcttcctcctcttcttccttggtcggtaataaggctggcaccttcttctgcagcttcctatttccagctttgggcggccttctctatggctacgacatcggagcaacgtctggtgctaccatatcgctcaaggtctctattactatactccactattcatcgattttgttaataatagaactatatattacttgagcgattacccatcattttgctttgcagtcatccaccttcagtggcaccacatggtacaacttgtcatcgctgcaaaccggccttgtcgtaatgcccttaccctctcctccatttgtttctctttttttttccttgtacactaccacaatttcatttcttcttcccaattctcgttatgcttatgcaggtcagtggctcactctatggtgctctcatcggttccatcttggcattcaacattgccgattttctaggtctaatacccccacccacctcctctcttttcttttaacattgccctagtcttctgttttcgcttatgcttatctcttaccacaggacggcgcagagagcttattctttcttctgtctcatatttgattggagctcttctcacagcagcagcacctaacttccctatcatggtggttggccgctttttctatggcataggaataggattggtaatcaaccacaattatcttattcatgccatacttgacactgcaaaacacatacaaacaccacacggtgtttatgacgcttacgctaactctttgctttcgtcaggctatgcatgctgctccaatgtacattgcagagactgctccaagtcagataagaggcatgctcatttctctcaaggaattctttattgttcttgggatgcttgtaagttcacattacatgacctgcccttttccccctctcttcctttctctctcagactacttagtcatttacttacgtttctcttttgcagcttggctacattgcaggcagtctctttgtcgaagtggtttctggttggcgctacatgtatgccaccagtacaccattatgtctcatcatgggaattgggatgtgctggttacctgcttcacctaggtggcttctgttatgtgccatacaagggaagaggaatattatggagtcaaaagaaaatgctacccgttgcttatgtcgattgaggggtcaagcttctcctgatttggtttcggaacaagttgatttgattctggatgaactgtcatacgttgatcaagagaggcaagcaggcttcagtgagatctttcagggaaaatgcctcaaagcaatgataatcggatgtggcttggtgttctttcagcaggtggtctcttaagtcatcatatagccatactcgtatgttccatgatgtaaagatgaaactgacggtgtgtttcttatgcacttgctgtatgaatctgtcaggttactggtcaaccaagtgtgctatattatgctgcgacaatccttcaggtactgatgcttttctgtatgaattacgtatttcagctatgtccttttgtggtgctatggttggctctcaaaaaatggaagcccctacatgttataagatgttaccccgtattgctcaagaatataaaaaataatgttattcttgtaaggtcaagtggggctcacgggacctccagacaccatgctttcatcgctttagttcctgtatttttcatagttgtcgtttttctttcatgcagagtgctggattctctggtgcatctgatgctactcgtgtatcagttcttcttggcttactgaaggtatatagtacttcttaatattagttcacatataacacacgctgatattttcaaactttaagctgttccatatttgccattcccctatgaatgaacatgaactagcaacaaattactacaatagtacaaactgatacacccataagagcaataacctgtaccactatttgtcttgatattattcgatacgacaacactaacgaaaaaaaggacacagctagcactcaggcattgagacggcagcaccaaatacctgatgacatgaccatcttgggaggatccccttttcctttttatgtgctgcatctcctctcctcttcatctaaaattaatttgtgcatccataaaagtgaagcttgtttgtttcaagtgttttgagtctccactagaatatcttaccatcccagcaaaaaaaaagagagagaatatcatcaccatgtaagccagagaaaaaacaacatcctttgtcacaaaaatactaacaccaccatgcaacatgcaagggctcatgatgcaacaatgagcaattactaattgtaaaaactatgaagtttcgcgcaacaaatcgatagacctactgccacaaataccaatttaacaaaacagtgagctagtgagctacatgtcctagctgcatcaattcagtgcaacaaatcaacattattgcagatacagttggttttggtgcaagaaataaagaaacatgaacatctacaacaaataactcttgtgactaattttgggaagacaagttgcaacaaataaatactctctgcatcatttcaactgatgttgtgtttcttttgtagttgattatgactggtgtggcagttcttgtggttgacagacttgggagaagaccattactgattggaggtgttagtgggattgtaagtctagcctcaacatatgcactcttatctaaatatgataaaagcagtcatgagcttcttcaataaatatcaattcaatcattcacatgctcgttttctctgttcaatgtgatacacaactgatatctcaatagaactgtatctccttattttctgaaaaaaagtacttaatcgtatattttcatgttcagttgtatgtttctgtggaacaaagtagcatcgaaatttgtagggatgagttgactataggtgctataggcatagttttcacatgatggtttgttcgtatttctgaaaaatgcagtgatgttcttttgagtgaaataatacaataatcttcaaggagattttgctgcctcactcaacttatctgttaattggtttaatgtgcaggctgtttccttgtttttgttatcttcgtactacaccttattgaaggatgctccttatgtggctgtaatagcacttctactctatgttggctgctaccaggtactcacagccagtttacccttgtttggcatgaatgaaaaaaaatagaaattttatgtagcaaagtttcagttgatattctgcccgtgtatatatatttggctatctgtctaatgataagttattctgcagctgtcattcggtccaattggctggcttatgatttcggaagttttcccattaaggctgcgagggcgtgggttgagtattgctgttcttgtgaattttgcctccaatgcactagtcacttttgctttctccccattggaggtatgtctcaagttggtttgtgcaatggagtgtacatgacatgccagccaagaagaggctatgtatgagtgtactgactgctcttatatatgtgactgtggtgtaggatttgattggaactgggatcttcttctctgcgtttggggtgattcaagtggcgtctcttgttttcatattcttcatcgtgcccgagacgaaagggctcaccttgaaagaaattgaagccagcctgtagatccagctgccctgcggctgctggcacgtaggagaactgcttattattcagagatgttgcaagctgttggactgactgactgactatctttgtggtgtggtaaggtaacacagtgagatccattgagagtgagttatgttgctttcggtcgttgctttggttggagaaagagtatagttcaaacatatatgtccatactgggttgttgttcataatacatgagcacatcattttttttccttgagaacgatatatgtgtgattaatgctgtacagcaggagcagttggcttatgccatgttattgggcacctgctgaatatttggcatgatctaaaaataataatgtcttcgtcccagaataattacatttcatggaggttaaagaaaaattagcggcacacacaaatgaccacaataaccttatttaatgattacactgtatgtatgtagactttattaaaaatgcaatctttttaggatataatttaaatggtagaaatacaattagtgttatagaaccaaggaactaggtgtaaaagatagtgtagtgctaacctgtagctctagtttatgttttagagtaataaataaatttgtgaagaagggaatgcgaatgctacttccttcgtctaaaaaaacctgagactacatgaatctgaacagaagtgaagtatgtactagaatacgtcacatccaaatatccagtactatgttattttttatgggatggagagagtaggtctgaacatgagtctgacctgtgaattcagtttgttggatacagttgtggaacatgtgagatgaaagaatgagagatgagaaggaagacgtggcagcatgtatgtgttgcgtagagttgttgcacatgtatggctaggctaattaccgttccctccaagtccaaggaatacatgtgatgtgccaactgcctttttgtgtccgttgcgtgcttatttgacttaactgatcgaatcgatgatgaatggatggatcgtgcatgtgaatgatacttacttctctctgtttcaaaataaaacaatttaaaattaaacgaatatgatagatctttatctcgattcattatattaaggccgtgttcttctcggctagccgggttaaagtgatgtgtttgggaaggg

SEQ ID NO: 5763 - DNA, 30840 bp, Oryza sativa
ccttgtatacaaatgtctatagcagaggcgtttggtgcataatccagagtgtgtagtaggtgttggacagatgaagttgagtggtactgtagtgttgttgttctcttcccttgggttttgtctgtaacgtcgagagggagagatgttgacgctggctgaaagcacaacacaagcagagtgatattatactactactagtaatttacttattagtacctgtgtagtattatctatccattgttggtgtgtgtttatctgtcctcccaagttgtggccagcaatcccaatcccagaaattgaatgaatagtcttctagtggccggcgagggaagggagtttactccagatagcgagagaggctagtgtttgagggaggggaaggggatgagaggaggaaaacgaagcaaatcgtacgtatggaacagtgacggcagttgggcctggcaggaagaggccgtcccccgtgcagtgcagtgcattattgaatgatgatttgcgccttctccttgcccccgtcgctgccgacctccaccggtcgccgcccgcacgcatcgatattggaattggagtagtatatatgatcgagctaggccttcctcccggctagttgtcattaaactctacaacgtacgtatctctcctctcctcctgctcccgagcattccgtccccatggctgttgacgatctaaaccaccacctcatcgccgtcggagtcggagaagaagccgccaccgcccattgtgggctgcgcaccgtgagcaatttcttctttaattaactcactctgtgatcgatcagatcacctgcattaattcgttcatctatctatctatctatcacatacgcgtagtaagtaagaagtatgatttgaaataatagatggcgcatgcagcttgtgcggaatatggcgcagctggtggtgtcgctgggcatattggtcgccgccgacaagttggtggagcaggccttcgcagccgcctccatcaagttccccagcgccctcttcgccatgttctgcgtcttcgccctcctcctcttcctacctccttcgctcgccaacggattcatggctttcttcgaccccgccaccgtcttcatccacaggtggctgcccctcttcttcgtcccctccctcgtcgtcctgccgcttgccgtcagggacgtctcgcctgcttctgccctcaagatcctcttcatcacatgtaataattaactactgtaactaacactactcttcttaatttataattcgttccacgtacgtacagatgatcgacatgactctgctctgctcatgaattttcttcttttaatattaataatttactagttggtggctggtttgcttcactggtggtggctggttacacggcgctgagtgtgagaaggatagtgaagacacagcttataccagctgagcccatgaagagaccgtctcctttcgggccgcttgaattctgggcctgggctgctgtctttgttgcttcctttgctgttgcgtatgtttcccccactgcgcttggtaccaccgcaacaacatgccttcctttcttgcttgcttccactgttttcggttacatccttggttcccggtactactccattttatatttactctctctttattcttgactttaaacataaccttttgttcattaacctcatctcaaaatttagtgcaaatatatgagtcatacataaagtacctataataattaataaaacattgcaccgtgtttctaaattaaaaataaaaaaaaacttctatatctatcttgatagcgattaaaatcccgcactattgaaaaagaaaactactactacctactactacttgagaaaacttcaacatcaactctaagatcaaaattttaaaattcaaattttagcgtgcaacctagtttactccattatattaatttctctaacgttcaatataattctcacaggttaccatctggtgtcaagaaagtgctacacccaatcatctgttgtgcactttctgcagatttggcggcagtagcatatgggtatctctcccggtctggagtggatgcagtgctaggttctaggcttaacccccaaccctgatcgatactcctataatcaaattgcatcaatcgcaaagtcgtgctccctgatcagttttatcctatatatataatgctctcaaatatatatgtatgtatggttgtccaggtgattacctcacagagtctccgtcaaatccaggagctggtgacatcctcatgggatttcttgggtctgtcatcatatcgtttgcattttcaatgttcaatcagagaaaggtaggtacccttctctcagttagtagtattactagtagttagcatatggttatatatgttgtgacatgatcatattcgaagctctctgtttaatttgttgcgagacgagtgtgcctagctgttggctagctaattaaccatgcatccaaccaaggagtaattaattaatgtttttgtgttggataatataatatttcagcttgtaaggaggcatgcagcggaaattttcacatcaatcgctgtggcatcaacattctcgttatattcaactgccatcctaggacgagtggtagagctagagccaatattgaccatatcaatattgcccaggtgtataaccgtggcattagctttgagggtagtttctctctttgaaggtttgtccctcctcgatctgtattagctcctccgtccttgcttcttttgtcactatgaaatgaaatcatcgatatttcaaccattattaacttttagacgatttatctatgattaatgaaaactatatagttgtatttatatcgtaacatgcattactaatatggtgtctgtactttaagtatgtatatatatgtgtgtatttttttttaaaaaaaagacatattatcaaagttaaaaagtgaatagctagtatccaacgacagattaataatgaaatgcatatagattaatattcatctataataatggtgtgttgggtgggcaggtgtaaatacttcagtaaccgcagcggtggttgtcctcacggggctgatcggcgcaaattttgcgcaagcagtgatggacaagcttcgcctcaaagaccccatcgcacgaggaatagggacagcttccaggtaggatcacaatataagagcaacggtaataatacagccgatttattggctataagctcagcgtacccatataatagttagctctttacaattaatatatggctcacttatctttctcatagaattttttggttcttatgttcgaaccggctgtaagtttatagcccgtttctcctctcttctctcctccacctcagcatttagccagcttatagcttactattatacttgctctaaatgtgggttttcacgtccaacatttgacgtgcctcaaagtagtatggagtggattacatggctactacgaccaaatatacgaagatctggtaaaaggagaaattgctaggcgtgtgtttgctttgtgtgacgatggatgtttattgtttaattgcataatacctctctgtttcaggctataagacgttttgattttgatcaaagttaaactgttttaaatttaactaagtttatagacaaatatagtaatatttataacactaaattagttttatcaaattaataattgaatatatttttataataaaattgtcttgggttaaaaatgttgttactttttttttataaacttggtcaaatttaaataagtttgactttaaccaaatttaaaatgtcttgtaacatgaaacagagggaaacggagggagcagtaattgataaataagagggtgatgttaggcgtgcaatctgatccatacatacatgcagtgcccatggactgggaacggcagcggtgtcagccaaggagcctgaagcgttgcccttctgcgccatcgcctacgccctaacgggggtcgtcgcctcgttattttgctctcttccggcgatcaggcacagcttagtcttcatagctggcgatgcctctgcctcacaaacacaacacttttcttactagtattatttggatatatatttgtttgtctgtcactattcatgaaaaacagacccagtacagattgatattgtgattaataatcctacgaccgaataaatactgtatatacagagacacgtatatatggtaggagtaacatggaagggagaactatttgtatatgtaattaatttttgtaagggaggacctggacttggtggaatgaagcagctgattgcagttaaagcgaatgcagcatcatcaaaatcaaattaagcagacaagagtcaacacaagtcaaagtgattttattattattagcagagcagagcagatcaagaaagcagagagaggtgccacactcttgtattcaccgacaactcactctgggcatgggcatggcggattcacatctggatggggtgccggcgatgaggaagacgacggtctccagctccagcagcctcaacatcgccttcctactctccatggttgccaccaacctgctgtccctctaccacctctccacccgcgcatccaccgcaccgccgctcctcttgccggcggcgcaccaggcccaggcccaggacgagcagctcctccgccagctgaccgccatccgcgccaccgtctcccaactcaaccacctccgctcctccacgcccccgcctccgccgccgccaccggagctcctcctctactcccgcctggcgcccctcgcctccgcctgctcagcccacccggacctcctccaccgattcatgtcctacacgcccttctccccctgccccgacgacgccctctccctcgccgagcccctcctcctccgcggctgccacccgctgcccaggcgaaggtgcttctcatcatcttcgatctcgtcttctcacaacctgaataatctgcccaccgatcccttctccccgctcccggactccgccgtccgctggcctccgggggccaaatgcacctccttctcctgcctcccgccctcgctcggcttcgacctcgcgcgcacggaggccgcgcgcttcctgcgggcggaggggcccctcgacctcacggtgccgcagctgctgcgcctggcatcgctcagccgcgcggggcccatccggctggggctggacgtgggcggcgggacggggacgctggcggcgcgcctcaagcgggcggccaacgccaccgtgctcaccaccactatgaacctcggggcgccctactcggaggcggcggcggcgcgcggggtggtgccgctgcacgcgccgctgcagcagcgcttcccggtgggggacgccaccatggacctggtgcgggcggggcacgccgtgaaccgctggatcccggaggcggcgctggagttcctgtggtacgacgcggacagggtgctgcgcccccgcggcctgctctgggtcgaccacttctggtgccgccgccctgacctcgccgccgtctaccaacccatgctgcgccgcctcggctacaagaccctcaagtgggccgtcgccgacaagaccacacccacgcccacggcgccacccggagccaagcatgaccacgtctacctcaccgccctgctgcagaagccctgatcgattcattgccattgccattgtaggtgggatcctggaacaaggctgtcactgaggtgatcaatttaattgtgcaataagctcaaagaggaatgccaatgccaaggctcaacaatgaggatgatgcactgatttgatttgggggtcttttttttaccaaggactgtacgtaacttctctgtggaatcatcattttataaggaaagcctcgcatctgcaaaagaatgcaaatccccttctcactcaaatttgctttgaaagttgacatcttcctgtggcttatgcttcggaataacatcttgatgaaggacaacttcatcaggagagggtggaaagaaaaattagagaggtcaactctacaccgcagatgagatagtgccgcatttttgtttacaaaatgcacactgcctcgatttgtttcgagtgtagcaccttcaattttaggagtgagctcataatattcctcacttgtttgggaaaggaggatatgaggaatttgattgctctaggagtaactgatgtggtgtggtcgattttgataggaaattgctatgcatacagctcaattgtccgactcatgtacgactaaatttgatcaacggttgtaaatggctgcaggcgcatatgaacatactttcatttgattgatctgtggttgtatatctctagttgtacatgagttgtataactaggttctacttatagcagtactcatttggagaacttggaatgaagcttcgttgctggattccctcgcactctcagagatcatcaatggaaagctgcatgtttatatgttaggttctgctacagtaaggaaccagcgagtcttccatcacaacaaaattcccaacgacaacttgggcgcgggcggaagtgaaaagactcgtgaaaatgttaacctagttcctgtgaaactccttttctttttcttctcacactccttgtaaatacttttagtgccactataaacagtgaaattgacattgtcttgtgctggttcgtttagggaaaaaaaattccccttgttcaagacatggaagcacgaaaatcttgctgactttcgttgtgtcgaaagattcagagtctattttaactcgaagagctgatttcaagtctatttgtcaggagttaaaacttccaaatttaactcgaagagctaagttcggaatagagttgtagactagtttaaaccggcttcactactctagttcattttataagagcagtttaacctactccgctatctttttaggttgagttaaaaccgtttggctctgctacagttttgaaatggttggcgcttatgttggcgtgatcctgatgatttgcacacggcaggtattaaattgcgataatgattatcgccgggcgacgggtggagggggtgtgtgtgtgcagaaatcgggcgctccccccacccccgcgcacgcgcgcatgctaggggcgcgtgcgcgtgcactccccttggcccaccatgtgtccacaaataaactctattgcaacaaatcacccacatattttggaaaccctctattaagggaattcgtttcattttttgtttcacaacaaatgtttcacctagtgtactcacaatgtttcactatatatagatctaatgttgcagtgaacgaaacattcttttgcaacaaatcgcccacatattttggaaaccctctattaaagaaattcgttttattttttgttccaccaaaaatgttttacctagtgtattcacaatgtttcactatgaatagatctaatgttgtagtgaactgaaacattcttttgctatctgctgaaacattgtttttatataaggtaaaacaacactcaatttaaacgattgaaacatttccgatatacttagcgaaacaattccgatatacttggtgaaacatcgtgcaacatttaaaaaaaatcaataataagctaatttttttcctcggaatatatctatgtgtggtcttgttttgaagatttaattgcaacaaattaaatggtgtaatcggatcatgatttggataaataatttaagagaaaaattagtttaaatttgttttacacgtatgcgtggcgctgacgtcatcgtccgatttttgccaatccgggcgcccgaccggaaatcgcgtccattgaattgggctgggttatgctgggctggacaaacagtacagtagcgctctgagtggtgggccgtgtggcgtggtctttctatgttggtttgctgggctgtgacgagacgtggcccgtggctaggctagtcgtccgacgccggcgtttgagcgagccttcgctgccgccgccgccgccgacgacgacgacttgcctgcaccaacaataccacgctcttgctttgcaatgcgatccccttgtaatctccccctcgctgcctcctgcttctatgctccacgccacgcgcacgcggacgccgcgcctctctgctgccgccgccgccgccgccttcttcaccaccaggcccaggtcccacccaccgccgccgccgccgcgcctctctccaaggctcgtcgacgccaccgtctcccgatgtccctccgacgccctcgccatcaccttcttcctctggtgcgcccgctgccccgcctacttccaccctccctcctccttcgaccgcctcctccccgctgccgcccgcctcgcctcccgcctccgcaccgcccccgccatccttcaccagctccgcgccctcggctgccccatccgcccccacaccttcctcctcttgctcaggctctactggcgcgggggcatctacccgctcgtgctccagctgttcgaccaaatgcccctctggggcttccaccccaacgccttcgctcgcaacgtcgtccttgacgtcctcctcaggacgcgccaccaccactccgcgctctgcttcctacgggacaatccctcgcccaactaccttacctacgccatcctcctcacccacctttgcaggtccgggaactggccaggggtgcgggcctgcttcttagccatgctgcaccagggttttctccccagcgccgcctctctcaatgcggtttttgcctgctgcactaaacttgctgccacgtccgagctactgcagcttctgggcttcacacttgtatcgggatatcagctcacttcggccatgtggacatgtctcatcgctcgtttgtgccgcgagggaaaactagatgaggctatcaggatgctggcaaagatgctggcttctggttctcctcccacagttgtcacctacacgccgatcgtcagagctctctatcgtgctggaaggcatgacattgccactgagcttttcgcatccatgtcatccaccaattgcagcccagatcttgttctccataatgttctcatggactgcatgaccaaggataagagatatgatgcagccctaggcgtttacttaaatcttcacgagagccagatgaagccagatgcatacactttatctactttagtccgcgcgttgcatttgtcacggaatgtaagccttcttcctaggttatttctggactcagctgatatcccttatgatctcgtggcctgcaattctgtgctgaatgctctgcgcaaatctggatttccatctcaagccgtgcagttcttcatcaatatgattaagtgtgacatcaggcctgacagctacagttatgttggtcttttggacagtctgtgccagttgggaaggattgaccatgcaatcaatgtctaccacagtattgtttcaagtgatcctgattcaaacgcttatgttcatgctgcaatcctctgtggccttgttaaaaagggccacaaccgtatggcgctaatgattttgaatgaggctgtacgtcaaaattatgctctcgacgctgtgtgctacactgttgttctacatggccttctacaagctcatttgattgaagaggcttgcatgttgtttgacaaaatgaagcgttcaggaatggcttccaacacttgcacatacaacataatgcttcgtggactttgtagaaccagggatacacatgcactcaagtggtttttaagagaaatggaatgttctgatgtggagatggatagtatctcatacaatattctggttgtgttcttaatcaagttgcagcatattagttcagccactgctttggtaagagaaatggttaatctaggcatggaacttagtgccaaaacttcctcattgatttctcagtccatgggccatgagtatgttctggaggatgctaacattgctgaaaatgatcattccgactcaactaatgatctgcttgcatgctcagcttcatagtcaattttcaactaaacagccatgctgcttctgtacatcttcagtttggtggtgcataattaaatacagatacacactattaaaggttggtgaaatcttcaatgatttatctccctccattgcctatctaacaaatacctaccatggccactgaaaggctgctcaattacatgccccccgccattatgttggtatatactttctctttccctgtgatatcaccacttagtacattcttatttaaaaagaaggatttgattgcaagaaagaaacaagatccctcctattgcattcatcttatctttgctatagaacattggtcacaattctcactcagtgctgagacacacagaaatgcaaaaaaaatctgcaagtaataaattaaaaagaaagacttacctgctttttgtgtcctgccacataggctcagctagggctgaactaatgggttattgtttttctccaaaatttacattgtgatttaagatgatttaaacattattatggaggcaagcttagggctcaagctctatctgctctaggcttgcctccgtccatggtttgacctgaacagcctgtaaactacatctttatgaatttatgttttgtaacttgaccattttttatcatttggcgggagttcaaagttttgttccacatgtcaaaaagaatgaacactagcaatcagctccaaggcttgacactgctatacgtgctgaatggttttctttcagtaaaaaacaatcttatttgtgttagagagaataaacagatgatttcaataacctttcaaataattcaggaaatcatctccgatatagaaggaaaatatacaaacttcagtactgaacctcgtatatgtatactgataacaaaagctcagatggaattcgtatttaacaaaccctttgattatctacattagggggttgtcaaatgattggagcagagtttgtgtggagatggtgtctgtaaggatgattatttatgtagatcaaacatttacatgtctaatattcaaacaaccaaaaattgcatatgggatttttttttattttgccttgtatgtttttttcatttgtccataccaactgttttagtcaatagagcttgtcagagtaagtatctgacttatggatttagtgtcaactcagtggagaactgaggatatatgatacttatggtaaattgattagtaaggaattttttccttattgttgaaattagttttgctgtaggaatattctaaatggcatacagtggaaccatagaggactcggtggcttaacttgatcttcctgcgattttgaagtagccatagagcttgcgatgaacatgcaaatacttaactggcatcactttaacgacgataagttcaagtaatatgaattgatgttcttggctttataatttgttgctgaccaactgtttctttgcattatcttttctctgaatatatttattctgtacttctataactgcttctgatattgtctgcagcaagctgaaattgctttatcagagttgatccaatcctctccggaggaggctctacatgactacatccttggagtaaatctctggtcaagatcactttacttgaccataagaaaagaatgtcaaacttttcgttccagcttgctttattgaagttatgcaggtccttgcacctgatccaccttttagtgatgaaatatttaaggtatctaacctgatccacctttgacacggatgattgggtattactgatttcttcgactgtttccattactgacatactgatacctgatgaccatttttgaacaggatttctgaaatattaataatgtttgaactttagcaattatatttagtggcagaaaatttgaacaaggaccacactctcattacactttttaactcctttttctcaggagagatgtttaggctctttatcagcacatttgcacaccttgctgaaacaaacagtccatatcttccaagaagatcttgctattggaaaatgtgctgcactcaggtattctgtaattacgtactctctgcttgcttagagtgaccagatatccggttggaggcagttcccctgatttgggggcttgtatctcatctttattttggtcaagaaaaccaactagttttaatggaattttttaagagattatctgacatatctgcagagtaagagtttttgcacgtgatgcagcaaaagcctgttacatggccgtgacatcaggaaatgaaaaaaaagatattcttagtaaggctgcttctttttatctgttcttttgttcagagttctatattggcatcttcatgctgaagttttgatttatttggcagcatcacttgaagagaggttattggattttgatgtcaaagttagaatgcaagctggttttgcatcctgcaatttagggccaaatcaaatctaagatcagttccttctgagctgatattgcaggcagcagagaagccacaaactgttgttatttctcgctactgcaggttctatacagtgcctcacttaaacttttgttttatgtatctctgactgtcagaaagaatctaatgcttatattgctggacctataccgagattactgtaagaaatgctcaaaaggaactgccacgttaacactcactatgaacaaatccctgctaaacttataggtctttgtttcgataaggattgaatcttaaggtttcttctttctaattttgtacattgattatgccatcaattcaactcatgatttctgacctcttctttatggcagggtacaaaacctaagccgttgcggtcaactaactcccgcatcggggaagaagatggcgagggagtgaatgggggagaagaagggcctacccgggaagctccgccaaccaccgactacccgatctgccaccaacggccaccgccggtcctgctactcggccacaccgagcattgccgtgtcgatccccacctctgccgcctcgatccgccattgccacgttgatccccacctccgcccgccttcttagcggtgtcgccgaagagagagagaggggagaggtggcgtcgccggagaaagggaaggtggcgtcaccggagaaagggaaggggaggcggaggaagacggggaggagggacggggtgagcctttatatatgtttgtgatttttggggggcgtactacaaatattggacttatatatgaatagaaaatctgaggatttaaatggaaaatgtaatcgactgacaggtgctgaaatgcaaaaataagatagagctgtggcttatgtaacaagtgtgatttcatcccacttggcatctcctttttcatgagggtatagcttccatcggccatggtcttagtttactttgttcctcaacctttttgacaaaaatagaagaaatattgtcaaacgtgtggtttctttttacagacttaataggaacaggttccaagttccgagcttggatactctagtaacattatattgccgattctctagtaacaatgtattacacctgtgttgatgtcaagtgtcttttctttctcccttttctaggaatgccattcaaatgacaatgagctctaaacaattttagaaaaaaaaatcacaaacaagcaaaaatagtgatctcactcactgtgaagaagcagatctggactggggtgaagtgcagtttgctccatgaagcaaacagactgtgggtgatatgatcatgttccctaggctgcggtagctcgatcgaccagctagcatatgaatgaatcctaagcaagcagatagcagagagacaggtagtctggattgggtgtgtggaatgagaatatatgtatatcaggggaaagagaaggatcctcctagctgtgagttggcttgtgcagaaggaggcttgattgcaatccagagcaaggagatggtgatggcgacgaggccagaccagacgtagacgatggtgggtgtccttcccctcctgcccatgaggcccttggcgaaggggtagagatgcgcgaggacccagaagctgaagaagactccaccgagaagcttgctccactgcgggatggtgctgtagatggtgcggctgaagccgacggcgatggcgacgaggttgatcattatgatggtgagcggcggtatcatgagggacgtccacttgaccgcgtagagctcggcgaactcgtcgtcgacgtcgtcgccgagctgcttggaggtgagggtgaaggagatctcgatgccggcgatgaccttgagaaggccctgcaggacggcggcgaggtgggcgctggttccgccgatgagccagaactgctcgttccgccaccactcctccagcgcgatgccggaccacttgatctccagcatggccaggaggcagagcgtgatggtgatgatgagcaggtaggtgaggaaggtgacgttgagcgtctgcacgatgaactgccccgagaagagggagagcgccgggaggaagcagtagacgatgaggaagacggaggtgaaggggtagatgccaacgttgaggtaagcgatgcgctggagaacctgcaaatgcaatggataattgtttgtttggcggcagcggaagaagaagaagaagaaaaataatcgatcgaatagcaagctaggtaccttcatctttgaggaagcgaagagtgcgttgttgcgtgagaagaagatctcgacggagccagtggcccatcggaggacctggtggaggcggtcggtgaggttgatgggggcggtgccgcggaaggcgtcgcggtgggtgacgcagtagacggacttccacccccggttgtgcatgcggtagccggtgaccacgtcctccgtcaccgacccgtatatccaacccaccctcgtcccccactccgtcttctcctcgtaccagcacgacaccacgctgatcgcctccgccacgatcgacgcgtccagcgtctcccgcgggatcgtcagcgcccccggcggccgcccgttcttcaccgacgggtggtccgccagcggccgtccctggaactccgccaccgggatggagtcgatcaggaagctcgagttgccgaacttcttggggaagctcgccatgttcatcgcgccgtccatgtccatgcggagggccatcgtctcctcctcctcctcctggggctggggctgggatcttgttcggcggcgacgtggcaggcagcaggaccacggggtggtgtggtccttggacctgggcgggtcgaagccgtagagcgcgatgcggcggaagaggcagccagttccgacatagacggggccctggaggccatcgagggcgcgcatgttgacgtcgaagaagacggtgttgtggttggcgtagcggtcggaggggtcgatgccctcgaagcgctgcgggaactggacgtagcagaggcggtcgccgccgcggtccatcatgaagcacatcccctcccggaacgccttggagttgtacacgtagtggtcgcagtccaggttgaggatgaacggcccgttggacatgatcgccgacgcccgcaccagcgcgttcatggcgcccgccttcttgttgtggtcgtaccccggccgcttctcccgcgacacgtacaccagcatcggcagccgggtgtccacgcccgacaaatccaccctcttttccatgtcgccgccgctgctgctgggactgggactgggaggctttagcatcacctgtatgatccccgcgtggtcgcccctcgcgtgctccggcgacgcctgcagccacgtccccggccagtgcgtgccgtccgccatccacgtcgccttggggatctttatcggctccagctgctgctcgtcgccgccggccttcatcttctcccgctgcaggttcatggcctggatctcctcgcgggcgtggtacgcgtcggagcggcggcggatggcgtcggggaggccattgacgcggaccttgaactcgtcgtactcccgcttcacccgccgcctgtccttgacgaagtcgcccttcaccttgttcttgaacgggtccctcttgaggttgaagtagctgtcggggttcctcggctcgatctcgtgcttccggcagaatggcacccacaggttggcgaagctcgccgcctccgccatggcctcgaacgtcagcagcgccccgccgtcgtcggacacgtagcacgccaacttgtcgacggggtagtcggcggccaggatggagaggatggtgttggccgtcaccagcacgggctccttctccgggtcggcggtggagacgaagatgtcgatcccggggaggtcggacttgccggtggggttgctcggcgtgggcgtctcgaacttgtccttgagcacgctcaggtcggtggcgcggttgatggggcacagcttgggcagctggtccagcacccacgacaaggcgaaccacagctcgcacacgatggacatcccccacagccagatggcgtcctcgttctggtgcttgatgcgccacatcaggaacaaccccagcgccaccagccggatcaggaccagcagcctgtacgggctgatcaccgccgcctggatccggagcttgcgggtcagcggccgccatggcttgctcatcagctccttggggtgccccgccacgccgtcgtcctcgggccagattgcgttgccgtagccgtaggtgcccttggtctcgaagagccagcggttgtggtcgaactcgccgggcgcccccccgttctgcttcaccagcgacagccgcctctccatcttggggccatgcccgtgcccgtgcggcagcgacagcgccctgttgatggcgtcgtggttggacgccgacaccacctcctcccactccgcgtgcttgtacggctccttgcaccccgggcacacgccgccgccgcccttgacggcgtcggtgaagcagtccacgcagatcttgaagtcgcactcgcaggggaggatgtcggcgccgcgcccgttgcgcatgatcttggacccgcacccctgcaccatgcacgccgacaccgtcgccctcgccgacgacgcctgcttctccatcacgtgcgcgcgtgtcacgctgttgaacccgccggtgaagagcgagctggacacgtactgctgctcgtcgccggcggcagggtccatgggctggttgtccggcgtcatggggatgtggacgtggtagtcctggaagtccacgctgctgatctccgagtcaaggtcgtcgcgggagtagctgatgaatcgccccgagtccgtccgccgaccgaacaccaccgtgggcgccgccgacgatggcgccgtcggcggcttaccgccgttcttgaggatgcccttcgacgccatgatcgaacacctagctcccctgctctgctatgtttctctcttctcttgtgttggtatggtattggtaacaacaacaagaagagagtatagctagctagcttgtctcgccgccgatcaacgtgatgcagctagctagctagaaaatatgaataggaatgaattgaatcaagcatcagcaattcaggcatcaagcatattttgggtggctttgacccgaccccagtaatggcgatccaaaatcatcagtcctaataataggaaaaatgtgactctgcttcttaaatggaaatggaaacaaattagatgcaggcgggttgaaaacttgcagtaatttactggccgaattggtacattcctattttgcatgcaacattataatagccccctgagaatcgatcgaggattactaacattacatacagtatcaagctagtttaatttgtagtggcaattgatcgaccaaaacatgaacaaatcaggtgaagaagaagaagaatcaatcgatacctgttggtcctcttcaggtggggcaatgcattgcaggtggacgagtttaatttgggtagtctgagagagagaaacagcagataggtccaagaaagaaagaattcagtggaagccgcagtgcaagagaagaggagagatgtcgaaagaaatcagagggcgtagtgttatttgaaggtccaaaggcagcaagcgtgtgttggtgctcccttcatggcctccctcctgctcgatcgtttgcttccttaattcttcttagttgttccatcatcggttgagtttagttggtggcgcgcacgatgggattatcggtctcgctcgtgtcgattgccactgcaagcaaagccatgcagatttcttggaaattgctgctgttttccccccatcgtgaatggattcgtggtcagtcagacttcatactcacacacaacaacacaaggaatccaaatcaagatcgtcgtgctcgcgactacctccctcccggtcggtcttgaaatgtctgtctgtcaaaaaccaaaataatgccacgcgacgcaatccaacctccctattgtatactactgtatttgtatgacaacatgcgcagatacatgcatacaagcatttgatgccaaattatcttctgaccaatcaatcaataaactagtgtcccttcaagggggcgggagatgacttttttgtgaaagttcgaggtcaggcatgacatgtgtctccctctctctactctttcaaaccatttccaaataaatttcttatccttcttcgctgctataaataagtttagttagtccaaaacaaacagtaaatccagccgctcgaccctgtcaacttgattactacttcagtggtggtgttattggttttcgactttcttcagacgaccttccagaggtcaactccatccaaaatccaacccatggatggatattaacaagctgatgggttcactgattgtgctcatcatgccatagcattactagactgactccgcatgttccctcttaacttgcatgcacgatcaatcttgctttcagctagctaatttatccaggttttttataaagacaaaggacctaccttattctggatatatatctgatacaacagttcagacaaaaggttataacctgacaaatcaatagttgtatataaaccagattactcagttattcctgataccaatcttatatgtattcgcaaaaatcagcacctagtcatgccaatataaaagcctcaggatcaagaggacttttacggtacattctactgctagtatatactagcagtatatacaagggtaattttggtattaggtaagagtctgaaaagggctttttggtcatttaaattagagaattaatttcagccggattaattttccttcgttagtttttcctggggatgtcgtcatctgtttcttctcgtcacatctcgcgtctccggcgtcgctgcccctggtgcacatcgctcccgcgccgatgcctctcgcgtctccggcgtcgctgcccctggcgcacatcgctcccgcgccgatgcctccgtaccgattcctccggcgccgagagaagccgaacctccacgcgcccggtgtctccctcgccccggcgccttgcctccagccctagcctattctctcccgcatccgacctcccacagcttgtgctttgcccaaaccacggcggtgagagtgcactcgtcgagccggcagcctccccacgcctcccatctccgtcctggttgccctgcctgccctgcagccactggagtgctcctggtaagaagctgacctaaatttggtactattgtattgattaatttatgcaatggttgttttgttctgcaatttttgttgtgcttaaccttaatgtcgatatgaaaatttactatctcattatgaaaaagaggtgagattttatcttgttgattgactttgttttggacgatctgccttagaacactaggttgtatttgatgagacaagtaggatgaaaatctgcattctgcaactagaatcgcattaatcctaggtatatagctagatgagtgtgctatgtaaaattaatgtagcagaggtgcaaattttgcaacttaaatttggtttaaattaaggtattatccatatatgtaataaagctggttccatcgaacgtttatatcacaggttatcataaatcatttgttttaatatttgccaacagtctatcaagcctttattactttgtaatttgcaggatgtttttcgcaaagttgtatcacttttatcattattcttacatgcaattttcgaattgtgttgtgatctgtgtgtgaaaaatctcatctttgtagatacttgatttatgtgaagacttgcaaatttgtaaagatttttgttagtgatgtatgaaacgcaagatgttaacctatattttaattatgctgatatggttcttctctttgtgtatttttactgtgtattaacagtgttgcacaatggacgaggacgaagttagcttggaggagatggaggagtataacatggttgctagtaagctttttagaagcgaggaagatggttacaagttttacaatgaatatgcaaggtgtaaaggttttagcattagaagggacaaagtgaagcgatttagtggtaccgagctagtgttctggaggcgattttattgctcatgtgaaggttacaggacgttgaagaactttgagagaaccaataggaaaagggagccacgtgcgttgacccgctgtgggtgtaaggcaatgcttgaaattgagctcaatggagagacaggaatgtggtttgtatcaggttttgaagctagacattcacatagacttgctaaccttgacctggtagctttcttaagatctcatcgtgaggtaaatgatgctcaaaaagctgaggccgtggagcttggagttggcgggcttcgaacatgtcaaataatggaagtaatggagaataataatggtgggtatgataaggttgggttcgtaacgcgagacttgtacaatttttttgcccggtacaagaagaagagaattgaaggtagggacgctgatctcgtggtgaaccatctgatggctcagcaagaacaagacccagattttttctttagatacagtatagatgaaaagggtcgtctgaggaatttattttgggccgacagtcaatcccagcttgactatgaagcattcagtgacgtggtaatatttgatagtacataccgtgtgaaccggtacaatcttccatttgttccttttgttggagctaaccatcatcgaagtacagttatttttgggtgtggtatattgtcaaatgagtctgtttcttcatatgtttggctgctgcaaactcttttggaggcaatgcaccaaaaacatccgaaatcattgatcactgatggggatgcatcaatggcgaaggcaattaggaaggttatgcccaatactgatcatagattgtgtagttggcacattgaggagaacatgaaacgtcacctccgtcggcaaaagcttgcagattttaagaaattcctttatgatgctatggatgttgatgactttgagagatgttgggttgagtataaagcgaagtatggattcaatgaaaataacttatggataagcatgatgtacgagcactattttggaccagctaacgtgaatgagttattatgtactagattgttgacgacatcacacttgctatagaatgctccaaatcctcacaaatccaaaaagataaggtaatcattttattcatctctacgtactttgaattatacatcacaacacatggtttaatatccattaaatatgatatttcatcatagaatgtccaagacattacaagagacagcgaggagagcaaacaatcagaatcatgcatccctactgataaggtaatcaaataattcatctgtacttacattcaattatacatcactacgcaaggtttaatatccattacatatgatatttcatcgtaggatgtccaagacataacgagtgacagcaagaagagcaaacaatcagagtcatgcatccatactgataaggtaatcgtttcatttaattgtacttgcattaattatacatcacaacgcatggtttaatatccattaaaaatgtcatttcatcatagaatgtccaagacataccaagtgacagcgacataaaaacatcagaaaaacgcgtcgacagcacaacacatgccacttcacacaaggtagtcaaaaaattatacttttgttactatttatttgaattacaacagcatatgtctcaaaacttaacaaacacatattatgcaggataggccagaaactgagtcactgacccgaaaactaatcatgctgatagaagagcaaggaaaggagatgaaggagatgaagcagaatcaacagtccatgcataaccaaattcaatcactcaccaacataatagctgcattcaaagaggaaaagacaataccaacttccaagaactctaagccaaatgtttgcaaaagtttcgacaaagaaacacatataattaaaaaaaaggtaagacaacatcttacttcttcagtgtctgtcaaatttaatactaattatttttaaaatgccaattgaatagcagaaaccaaacccaccaactcaaacgcccgtcattgccaagtcactttcaggatcaacatgaagattgcgtaaatcaacaattaaatcaaattctgatttcatctacaatttaggggctacaaagaagaaaccaaagaatgcgcaagcaaagaatttaatatccaatggtaaaagtcctataattatcatcacatcctactctgcttaatttttgtgttgcagttcacttacagatttaacttcaatggcagagttcaagtgcaccgcagaagatgaggaaaccattaaaagtataatgagtgcaccagaatcacaactagtggtgcatatcgatgatgtctcaatttcccaaaaaacaatgcaaattctgactaatccagtgactgaatcaagtacgagctatttggatgatcacgtaagtttactaacccgtgaaactattctctcatgcaactactagcacaatcataacctgccattttcctctacttttaaataatcgatgcatacgttacttgtctacgtgagaaagatatgaaggaaggtacagggactagggcagaaggtacggtgttcctagagaaaccgttaataacaaggttgctacaaagagatggcgaacactatgtttccaaagacatcatcgatcgggcaatggctaaagcaacggcaaatagatatctaaagcatgatatggtaatatttatgccacaatactatcaaattttcagcaagtttatactactaatatatcctacaaatgatttctttgtacagattttcctccccatgaacataaaagaaaaacatcggtacctggcagtcatacacgccaaacgccgcatcatccaagtgcttgactccatggcgaattcatccacacaacgcaaggaactaagaaaagttgtaagtattctacttagaaataaaccaaaaaggacatgaacataccgcagtaatgacgttttctcacaaaacagctagaaggattacaacaatattttcagctgttggaaccagaagaaaagcacatagcaacacaatggcctgaccatcatattacttcctgggaagtcacggtcatacagaatttgccattacaaggagatctgtatgttatgcagccactacaataatagtttttttcactacctaaatgtatgttatcacttctctaatataattcaattcttccagcgtctcatgtgggctctttgtactaaaaaacatggagcactggcaaggcaataggttgtcgaaggaatacacgcatgtaagatgcactaaatatttttgcatcttctttacaagtcctcaattgattgtttctatctaacaaatacctttatgaattttgcaggaagatataaaatattttagaaggaagttagctgcaattttggggggtgctcagaagaaggataaaaagataaactaatggatgttacaccttccaagatactagtcgaaatcaatgactttgttctaattcctttaatataaggagttagtattttcaatagtctgtccagagcaattgagcgtgtaccattttgtgcaacatactctagtatcagcggtgttattttagactaatcaaaactccacaaacaattacacaactgcaagttcaataataaatttaaacctttctatttggaatgttctgaaattctcaaaaaaaatgtacctctgttgtgctgcagctatgacattgctttcttccatcggcagcttcggtatagggcctgttcacgctgtgacatagctagagccagagccatagcatgcaacaagagggtctgcctcgcgacagccatggcctgctgctgctgcggcatgctgccctgccgctgccacctaccgccggccggctgcccctgccgatgcggcagtcaaggtccccagcaggcctcgccctcccgtagacccagcagccggcgacctcccgtagacccagcagccggcgccgatttggggatttttttggaagagatagggttttcggtggccggaaaatacacgagaggaggaaaggagagaaatcgaatcgatttcgatggcggcggcgccgattttggctcccggtggcggcagcgactgtggctgtcgacggcgagggcggcgccgacagaagacagcggtggcggtcgcccatgcgagccgagcggattcggtttgagtcgatgcggtgaaatgtgaaacggatctgactaagtgagctcgtgttaatttacaaaaataccccccatgaaaaaagataaaaagacaaatataccctattcaatttatactgcagtataattaggagggaaatcagataaatttacaccgtcaaatcaaatatactggtagtatatactagcagtagaatgtaccataaaaaaactcagcatcaaacccttcaccgagcgtacagcaagtaatgaaacctctgacactgatagtagtcatgagccaaaatctgactggcttgacacagtaagggggactgctacatctatctattcctgtacagcaagaaactagtcatgcccaagacattaaaccaaacaaaatccctgggatacattcaagcaagatgggcatatcacacaaatccatatcaagtgtctccctgcggccctgctgtatctggatctggtggtcagaaactgatgaaatcgtccttttgttccttcctgtcctgctgagatgaggtgccgcccttcttgccaaatatcatgtcgtcaagatcctgaagcaactcatcagcaccagaacctgctcgcttccctacagtgccatctttagtgcggggggagttctctggctccacggtgactggaatcatggctggctctgcctcaggctctgcaacaacaggttccttgagttctttatacttggagagaaccttctcaagttcatcgtggacactcaatgcctcaaagagctgagcctcgttgtcaccagccgtctcaatgattctctggatggtgcgctgacactgttggcattgctgaaccagggtggtagtcaggtcatcctgcatgcatttgaggtgcaaccagaagtttagaacactaacacgataacagaacactagcaattttatttattggatggaaggcctataaaattaacatatggtagagtaatgttatccagtaactgtaagttaacttcagatattgctacaaaccaaaacttagatgtatatatataatttaccaaactcagatgaccatttatcaaggggaaaaaagagagagagcaggctcaccttgagagcctctttttgtggagaagaagaaagcaccgtggaaagaagttcaacgctattacgagccacctcaaaagcttcattgacttgcacagcaggaacaacgtggactggcgcaaaactttcatctggaatttcttgatacccttcctgtgctgcagcagaatatggttcagctgaaggtgctgaacggggaggagtaaatattggtgccagactctcatcatcacgcccaggaaagcgaattccccttgatcttaagctctgcgaagaatattgaatgtaaactgaataagcctggctaacagaaacccacagtaatagtgtccagatgtaacgattacttcagcctttcagacacaactatgtatgtggtcaacgaatgaagtccgatcgacatacatcagatttctttatcgaatatataaaagcagcaagtttatatgaataatccaccaaatgcgtaaggagaataatagttgcatttgttcttggtagatcgttcataagcattattgtttcaggttaaagtgcactaaattgatgtaagcagaaatcattacttgttatgtaccttgtaagtctcttcatacaccggaaggtagcggagctcatctcctgactctccccatgcttcaataagcataagtgccttgtttctgttgttgactacagtctgtggatcatcgatcagttttaccatctcatcaaggacccgctcagcagcaatctcagagaaagccttctcgcagtttttcacaacggtctcaaggaggacaagagcaagatattgcactcgtggattcttcaacatgatgcgtctcttgatggcacggatcagctcaatgctgttgacatttccagtgttaaccatatcacatatctcaagattggtggcccaatcaggagcatccatggtctccagcgtggcctcatcgactatcttgtccgccatgttctggccttggaagaattctttcatcttgaaactcatgttactgacaccagctgacatcttccggctaacttctgccccacttaccttgagccgctcacccaaggcattgaccttatccatcagattgtcacccatgttgatgtcaatggagggagggctttatctgcagcagcatagagaggccgcatcaagatgaggtaatgaagaagaaaatatttgtctcgtgtgctactagagctatgacaaggctagccaacacaagagaaacatgcaagtagatgaacaaagtgaagaatatgaattccgatctattaacccccaaaaaaaggaatatagtgtgtaattcatagatgagccttgaaataatagacatgatctttgtgtaatactacagcacacatacaactagaaagagtgtactgtgtctgtgtggtctgcccaaatacagagatacaagatgtgggcagcggagcgattttctttgagagaatacagtagatgatacaggtgcacccaagaaattactcctactcgtcaagacatggcatgaactcaagtatcgtagagatggttaaacaaagaaaaggagaagtggaaatttggggatagggttttaggcttagcatcatatgggggcatggattaagcggtaattagtaacctggatcgaacattcgaacccgggggcaacagtaattaattaatctcgaacgagtctatctatgtctctcctcgtaggaggagatggagatggagatggagatgaggcgcgatggatgagatgatcggcaaagaaagagcgcgactaacctggcgtccgccgcgcttcttcgccggcgcaagcgcaacccgcgagcgctgttccactttcccttcgctttggtcccaactccaacgcaagaggacgacgactagtagtcgatggattccttcttctgtatttcccccttgcctagtcttctttgctttcctcgcatctatctaaaagttactggtataagtaggagtattatcgattttggattttatggaaaccctcacgttctctaatacttcagttattattatcaactagaaaaaatacccgtgcattacaacacgggtgaaatatattttaatcttactattattatatggtttagttaagataaaatttattgtgagagtttgcttagatatatatatttttataaaatcatgagctgcagttaggaatccgatcgtctcaggttagcatgcgagttttttaaacatatttcttatatgatttcttatgtattactaaaagtgaacgatcttaataaccgactcaagtacggatatgtatttccaaaaacaaacgaacttaaaaacctactgtgatacacggatgacataccaaaatactagcaaaaacatcttcaatttttataatagtagagataagataaaattccaatagtaatcatacggagggcaatgccacatcttattagggttttcctttcttaaaacctcaccaatatgcatagggatttttgccttgttttttaatcaaattccatcaaagacaccaaaagagtttttccttggatagatcattatcgtaatcatcaaataatctgaattccacatttcgcaaatattttatttatgtctaatgtgacagattaacttccccgcaaaaaaaaatgttacagattaactgtaagattaataaatatgactgaggtttggggttttcattctaaatttagccctaacactaacagttttcttaatataataaatataaatctacaataacaatgtagtagtaacacatttcgagagtcctaatagctgtcgtgtgcatatgtgagtattttacatactaaaaggattttatttttcacatctcgcacatacacaaaatagcgaacgagtatagtacgattattacaacatctgagttgattacatggttattacatactcctgtactccgtatataacaccacccttagccttagaaaatcccatttttcagaactcagagttcagctaaaaaactctttgaattcagagcttgcggtcgcagggacggacgggttcaaagccaatgactcgcttgtttgacagtaatggcctttggcctggattctcaacttcacacgctttctattgctcaatctatttttcagcacccagcttacaagtcccattcatttattactccttttgttatttctcctgtcaccctcgcatatcaacattttcactgttctacacagcccatctttgtcataatatattgatcatcactaaggtgccaacagtgttaacaaccaatttcgcaatagtagttttagatcactgaactagtaatttatccccagaaacaacataaatgaataacttaaagacagcagctctattttatcaacatccaagcaccatattggcgtcaggaagttcagaaacgagtaacatcatcagaatatcagtcagacatgttgcgcccgagtataacttcgaggcaacaaactaagagactatcataacactttgaccattgtatctccaaacctggagatcaaaatcgaatatatatacatggaacaaaaggaaaacaggaaaaaaattaaccgcaaaaaacaaaatcccacatgttgggcttcttctgttaacaagcatgcaccccatagacaacatgccagattgagtgcccaggccgcgttgctgtgcagttctgacccaaagaatactcatatgacgcaataatatttgtgtgcaaacaatgaacgaacgcatcatgtgtggctgggattcagctgggtaaaatcatcatactaggcctgtcaacaatcacagggattttatcagttattgctacatataactcaagtgtgtaccaaatgataccgtgaagagccacctgaccagggccttcaataactcacaagatttgcatgacagtaacagcctccccttcatgattagtatgggttaggataccgaagtttaaaaggttctgccaggaaaaattgcaatgtcggcagcagttcatctgctgtgtcgaaaagaaatgaaggtaacttcattgagaaatccagacctgaaaaataaaaggagtagcacatttgttatgtcattcatcagatagttcctgttgttgagcaaatcacctttggaacagtacatcacaggaggcagtaaatgaggaaaaaaaacatgaaaaaaggtaatttcttgcggctataatgcttgcttcataataataattaataaactacaaaaccagatgtatcgtacagaaacaaggaatcaccatgtgcaaagattttttaagtcaaagtgtattgtgcattatgtggcgcaaccacatgcaatgatgcaaggtatgctctagcatggtaccagctatatctatgttcagctgattttattttaaatgtaagttgtactccatccgaaactcatccaccatgtaacaaaaccaatgaactatacacatgcatgtaaccaataaatactaagattgcttcttaggttccagtcaacaatttaatttaacacagagattacaaataggtcttagacttttggaaaaaccaaaaaatgaaataggtcttagacttttggatggagagagtatatagcaagcttctatagaaattattatgatgtctgctgtatatgctgatcaactagaacctggctccatgaaatcaaaacacggtaaggaagtagaagagttaaggctttaatgaactcaaaacccagtaaacggaacatagtaggtgccaccatgcgtcagtgcaacaaagaaaaaatagaagggaaagaagctcaggtcagtacagaacaaaactgagaaagcggagtttcatcgccatggttgtgagagtgagatggcactgtccgatgaatctgctcctcgacctctaaagatagcagatttgagcgcattatactgatcaacgactgagttgtacaatgactctgagaatttctctctgcactgtaaaaacaagaagaaccaaagacattcaacttcacaaataaaaaaaggaaggcttaaacagatgaggcaatatcaataagtaacactatcagtgagcaagtctgaaagttcaaagttctgtaaactgtttacaaaataagaaaggttcttagcctaaaccctggagacaaggggcctacaagagtaacagcaatgagaattttcaaatccaactaccaatctcaagctagcatgggtgaatatcatatgcaaaagtggaatataaactgagctgcacaatgatgaa

SEQ ID NO: 5764 - DNA, 58381 bp, Oryza sativa
agctgatcctgtgtatgcgtgcaggaggagtggagagtctagatgctgtcgctgcatgtgtttgtttgtttgtctatttgggcacgtagacgaagtgggagctacgtgggctggagcgcggctacgcatcggcgagcttcgaccttggcatccgcgggtcgctctacaccgatagaagagtgcgcgactaagactgatgggagaaaagagtgcgcggccggccggtgaccctttcccccgcacgcgtcacgacctgcgacccctcctaggcgcgtcggttggccactccgcccccacgtgctgctgtaaggtgagagaagaggtagaggaaagagagaggtggagaggtaaggaagaatatagatggaggaggttgctgacaggtgggaggtggggcacacaagctgattcagtcaacggggtcaaaactgccacgtcgacgaaaccacctttctaaccgctgaaagaggcgatttgcactggtttttaaagatgggggagtcgctatacccggttttatgattgagggaagttatttaactagagcaagagttgagggaagcagtatggacttattctacttagaaaagagccacatatagcccccagcccaactaactaatccctagctcggtagctcccgaccccggcggccgccggcgctcctgtctccggcaggtagcaggccgcaggtggaagcgcgcggcgctggcggcggtgagcaggcaagcagcggagtacgggacggcgtgtccgcgcgacttcgcgagcgcgagcagcagcagcagcaggccagcagtcagcagaggccagcgcgagcaggagggagctgagcaggttgcagacaggcggcccgcggccggccgccggcgccagcgacgccacgggaggtcgggtgcgtgcatactgcctgcagtctgcagcagaccagcagcaggccggcggctgcaacctgccaatctgcaaaacaactaaacaaggtatgcttatcacttatcagtttatgcaaatatgcaattgtgattacctaagtggaaatttggaatggctcaatccattagcaatttagcacagtttcatcttgtgaagttgtgatgtatttctcattatttctctatttctatatgaaacttctttagaatacaacataatactatggtattataatattgtatgagacatgatgtgtttatgccgacgtttccctcaatttttcattcctggattcacccctgcttttcaagatgcattcatttggccatttaggcccagatagtctaagttaaatcaacagaacatggctcagatcagttacaggccaagttttcactacccaataaacaaggccagtttaacttacatagccattttactacagatcttcatagcatactatgtcacatacaataaaattactaaattcttggacttcctcatcagtttcccatttttaagttttaacaatgcaaaagtgccttactgtcatgcggtgagtctccttgattcaatatacgcatcacatacttgataggtgtatactggcagcaaaacttttagctatttactccaagagctgatgataaaccaacaatggtcatggaattttagctctcttcttcagattcttccacttatcctactccaaccacagcacgtagatcgatgcggtggcactaccttctatgtgtgttaggctcccatctttttgccaaatatggaaaatacgtcatatggcgtattagcaaaataataataatttgtaggtaaaacatatatatatatatatatatatgttcttagcgacttaaacgacaatcttcgacgaaaaaaaacttcaaaaccaagttttaaaatttaaattttggcatcggttgatgctgaatagagtaaacgatgggcgcgagggagagatggctgcgccgccgccgtgcacggatgggaggcggccatggtgtgattcgaaccggattctagcaggaggaagacgaaatgggccgatacgaaatttcggcaataataaaagggggtggctatcaagctaggaaagtggatgggtttggagacaaggaattttatacaggttcatgccttcttattcaagaagtaataccctactcctgtccggggatgattccgccgagtgtgttattgattgtatgattgggagaaaaagaatcgtcccgagaggaacccggacccctccttatataggggaaggggtccgtattacaaagtacagtccatatcctaacggaatatgggattacagataaaatacaatcgtaaccgactaggatcccgggtattttcttgacatacaagtttagaatctaacccaagtcctcataaagatattctatctatatttggtaccatatatccaactggaatataacctccatgtagatatggggtaaccataatctccacagtggcccccgagaccttcgcagttgaccaaaataatctccaaaaaacaataatccaagtgcttcaattcaacttgctccggcttgccgagtgctaaaagactgtgaagggcgaaaataaaacatggtgcatcgagtagatgcacctaattaggtgtagccctcgactatgtgattagttgaaaaactaaacatatagtcaagaaccgagtgattttatatcgaagcatgcatggtactcaataaaatacccagccgactgcttctcacttgaatatatcaaggataaaaaatatgaaaagggccgaatgataaacactcaaaaggtctaaaaatagatatatttggtaggaatccgagtaagaaactcttaaaatgatcctaggccataacccttaccataatcaaaataagcatataacatgctaggagaatgactactaataaaccagtcatctcaaattaacccaacagcttttgcagcctaaaaaagcttacaaaaatggtataacacctctctgtcgggcaccttttcatgtgcatcataataattccaaagaattattaaatcgcgttaaaaagaattttaacagcatcgggccgcatcattgtgagcacatattgccaaagcaaaaagcgcctaagtccctagggatcacaacgggccacgctgaaaacataattgggctgaagtactgtacaggcccaggcccattagtactcccgataccctaaaaataccgaagtccaaacgtcgtttcgtcttccccgccgagactctcgccattccccactccatgctacagtacagaaccgcgccgacgaagctagggttcatcaatctgctccaacccaccctcaaaaacttcacaaaatttctccccgcgtccaccgctccgattccccattcctctccagccatatctcggaccaaatttaaccatccagttcacattcatggcggaagaaagagaaagcttcgagagtcagtgggcgccctccgatgtgacagaagataatctgaaggagatggtggcgcacggcgttctcccagcgaaggagattatcgggtggcgaccggcgtccggcgaagcattcccgaccccggacacacacgaaatcatggtatttgctcatttcttctatggcggattttctcttccaaccttaagattcttccgggggattctgaacttctacaggattagcttgcatcacttgaatccaaactccatagtgcatattgccaatttcatccatgcctgcgaagcttttctgggcattaggcctcatttcgccttgttccgccgcatcttcttcctcaagccccagccaaacaaaagcaaaccatgcgtcgttgcgggagctggtttccaactcagaggaaccttgagccaaaaatatttctccatgcccttcaaaacctcaaacaaaggctggcatgcaaactggttctatgttcagaatcctgagcccgcagtccccgagtactgctgtcttcctccggtttaccaggatacatggaactcattgcctatgggagatgaagctgctcaagcagtagaactgatggagaggatgataaagctgaaagaatagggccttcaaggagaacagatcacccggcactttaccaagtgtcggttagctccaatcaaagaaagatctcgcacagccttcgaatttgacggcaagcatgacccaaaccgtgaagatccggattctcttgacttcaaggtcatgaaggaaaggatgtataagatcttctcaaacgccatcgttgtcagctactcacacttgctgccagtcgtaccgttcaatgcattcaatcctcctccaccggtgcgtattcatatacttcaacctttctcaaaatatgatcttgttttcttgttgaatcatttaacaatgaaggatattacacccaggaatttgctttgatgaagtcggatcccccaatcgctcaacgccgatctccccgccaccaaactgggcaagggagcggaagaccaagaattcggtatgaaactcaaccaagtgcttctgatccagtcggccagtcagattctcgaaagaggaagctggttctaagtgacgacgaagccgatgataccaccaggaggcctgtagaccgagagacgaccaagaaactaccaaaacaggctactccaaggaagaaaacatccagtcgtcctgtgccaaagatcaggaagtcttctaggtgcaactcatataacgatctctcttgtattgatgcgcacccattgcggcaataatactgataatcaaatttgcaggaaaccatctgatatagacccgtctgggaaagactctgacccaactaacatggacacaagtttttccaaagaaaccgggccaacagcagagaatcgtccgagtgacaaacaaccggcaaccgataatgtagaacccagcaacgagcccccgactgggaaccagtcgactgaagctgaagtcggtgctaaccaggagcccccgactggaaaccagtcggatgcagggccaagccaaaagattcccgaggttgaagctcaaacgaacagtcctctcgggaaggatgctgacaatgaatcagaaaccaggtctcctgtgaagacaccaaagtctactcgtccccgaccgggaatcatcacaggtagacacgctatctgaaatcgttttgatccaacagactttatttggctgcttcatcttcattcatggatacactagggccaataattggtgatgaagaagaaatcctccggatacaagcagctgaggattcactccctccgattctggtcaagtggtgggatgacaacatgcagcctcaagggatcgtgataaataagcaaaaagaggacgaggagctatgtctactgaagaaggcactaggtcaggcaacccgcattgtaaatgtaagccctctggtacctgatctcaaccatcttgtttgccatttaattcatgcgctaattaaactgttttgtagaggatttgtaacaccctgaaaattctcccaacgaaatcaaaacaccaaaaatacagattttcaaaaactttttaagtaataaattgcatcatgccgattttattcgcctatttcattggattttgatctcggaatttattaatcgcgaataatgaataactaactaggaataaaccttaaaaatcaagctggctaaataaataattaaaatataaattaaaataaagattaggtgggattggaaataaataaaatattatcgcgaccatattagcaataattaaattttagtacgatggaatgagaattaaccctaattaaaaattcaaataaattatataaacaaaatatgagtgatattaaattagggtgaatttttagttagtataaaacaaatatggagtaaacttcatttatgcaaaagttagaatttataggactatatttaaatagaaaatgggctaaaatcgggataaataggaaaagttactgttcattgcgtcataggtgttcgatcgtggtccccctggccccgcccccttccctgccgcgtgcgccgcgtcgcccgcccgtcgcgcgcgccgccgccgctgccgcgccgtcaccgtcgcgtcgccgtcggcctcgcgccttgtgccgccgcgcgcccgtcccctcgcgcctgcgccccgccgcgcggcgtcccctcgccggtcaccctgcgccgctgccgcgccgcccattccatcgcgccgagccctatgccgccgcgcgcgtcgcgtcgccccgcctgtcacgccgctcgctcgccacctgccgcgtcgccgacccatcgccgcgcgccgtcaccatcgccgcgtcgagccccacgccacccgtcgcgtcgcccttctcgagccccgcaccgtcgcccgtcgcatcgctgctccgagccccgcgccgccatcgcgtcgccgccctcgcgtcgccgtcgtcccgccctgagcgccgccgtcgcggtcgcatttaccgccgcccgcccttccccttctccttctcccctctctacaaaaaccccccctctctccattttcccccaccccatctcacccttcctcccctcttccctctccactgcgccgccgctctcgtgccgccgcgccgccgctcccgtgccgctgcgccgccgctcccgtgccgccgcgcgccgttcccgtgccgccgtgcgccaccgtcgctgccgccgtcgtcgccgccgctgccgccggtgagccgccctccttccccctcgtgtccaccgccgccgccgctcgggtgggtgagagccgagagagagagggagaggaaaacagaggccggcagagagaaagagagaaagagagaaaagaaagaaaaagagagagagagaaaagaaggaaaaagaaagaaaaagagaagagagaatggagaaaaagaaaaggaaaaataaatagaaaattaggaagaaattaaggaggttaatagtttaagaaaatctaaaataattagaatttaattatagattaattatggtcatagaattgcaaaatttaatataaattatagattattcttggtaatttctacaagaaatcaattcgcggtactagtttaaatgtaattaagaactaaacgattagatgaattcttatagactattatagattattttgggtaatctctataagtaattgattcatggtagaaattcggacttaatcactaggaattttagacgtatattatatttagtcgtttagtcctagactaaaattaaatcgtataatattataagataatttttggattccgtccgatatttagcttgcaatagaaatttccaacctattatatggatataacgctcgggtagattaaattaaaaacttatgataacaaaatatttatacccacaaaatagtttaggatatataaatcgaaattgggtttgccctagtacgcgaatagtaaagttaatataaaagaatcgactttcgtgtttgacttccatttggatttatttggatttttattttgaattctaatcgaatccaaatcaattttcgcacgtaactatagagcccgagggagttgcggatccaagtgaaggccaagacccccaagaccttgagcaaggcaagtcatcactattccttgaacatgttgatcccaattgagaaattattttgtttataaataaaattgcatgcaatgatgaatatcctacttgtgattatgccatgccttgattattgtttatcccttattccttcgtaaccatgtttacgtatgagtccctagtcaattatgacaattgcttagaaatgctattctaggatcatgcatactcatatttatcaaatgctaaatgcttgggcaattacctttgggaaggtaattgagatgcggcatgtggagacatgagcgccacattgccatgaaattgataacatgatttgtgaaaggaaaataaagcgaaaacaactgttttcgactggggcggacggatgatttgggtggtatctggaaaaggctagtagcgtccccagtcaattaaggaccgagccatgaagttaagcttgaaacgacccccgtacaaccgtacttctcaaatgggtatagacctagcggattagatagccgagcggaggcagtatccctgcatagatggttcacccctgagtgaggcaggtgcgctacgatgggacagccgttgaggtagggccgagaagcgtgccctacatcggtgtcgccattggtaggactgccatgagtatgtgagagagagaacttaacttgaaccataatttaatatgtgtgtgagacttctctttcccgggagcgccagaactcctctcactgctagaaacatggacgcctagagtgcatgaggatttaagttcatggagcgggtactgccaatgcgaggttatcgaaaagctttgccgtgacgcgtctcatgtgttgggacgaggctcatgtgttgggcagtcgcggagtgcgggtaaagtgtacatccactgcagtgtgagtaaaccaaatctattcgaatagccgtgctcgcggttattgagcaccgggacatgtattacacttggctagactctaaattcttaacctgtgtgggatgggatattgcatgatgatttttatgctgatggagccacttcctgagaggagggaaggtggacgtcctcagaaaaccatgacgactcaatggcgggaagctatccttgggatcacaatggatggtggacagaaccgtcgttgtttaatgtgaacactggtattaaaacttgatcagtctatgctaggtcttaggtttgtgaaaagaattacaaaactggcttagcgcaaaagagccatagccatcctttgaaataccccttttcatctgcattgttgctgtggtggcttgctgagtacggttggtactcacccttgcaaatataaaattaatcagaagcgggagatgaagcttcggaggatccctatgcctactaccaggagggagatgaagacgatgacgctcagtaggtcttagtacggtcgttgcctgtggcaatggcatgccgctgccttatctatttctgtttttggatgtattccggaccgctcggtccgattatttaagacaatgcctgcgggcttatgatgtaataattagcactagactctcgtgtatgtgcttttggtatttcagctatgaactcgtgtgtaccagactacttgatccagggaaatggtactgtttacacgaatgattcctgttataaaaacgggggtccacaggattcatcttaggaacgaagccaaaacgacaaccttagagaggttagtccctcatctcggaaccctcgaaaccaccaggaatcaactgcacgaagcgaaagaacttgccaggaagaatgaacatgatctgagggatcggatcgctgagctcaaggaatcaaattttgaactgagtggctcatcaaaaggtacgcacaaactctgctcaactgactcatactgttatctttgcaatcttgattaaccgtaatcaatgaagtgcaagctgccaagatatctcagttggagaagcagattcaaattctggaaaatgacaaggcagaactggcaagacaaagagacctggctttaaaggaagttgaaggtatcaacaatcaatacctcaaaagccattatcctccatatgttgacttattaatgtgaatctgttgatgcagaccgcaagatcaaatctcaagctcaattcgacgtccttgttggcaagatcaaaaaacttgaaggagcccgggatgaggttgctaacgctgctgccccaattgttcaagcaatgttctttaataacaacggcccgagtgcacttgatgcttctgaaattttcgataagctgagagttgctccggatacatatttcaagaacatcaaataagctggaagtatgggagcaagtctggcgttggcgatgaccaaatctctttatccaagggttgatatagatgccattgatggctttgcagacgggacgagcgaagaagctgctcttgacctcatcagcgatgcgcaaaaagccgctgacaagattgctgctgatgtagttgagagattccaggacaccgatcttcgaccgactggtcctgataattctgatgatgaaaagactgactgactaatgtaccaatgattttgatgattaatgatgatggaggcacaatttgtacaatactgatgaatttatgcggtgcttgatatcttaacttagttcctgatttcttaaaagtttttgtcaaaccttgttgagcctaaaacctgcaaaagttgttaaaaaactttcagtcctcattgactaagccaagaaatcaaacaaggcaatgatacatcaagtaaacaaattgaattgataaaaatcacactccattattattatagtagccccctgactgaaaacttcaaagaaaaacttaaagttagcagtcaaagaggaaagatacaaacgaaatgcctaagcgtaaaatcggcgaaggtgttcaatattccaagaattgttgatgagagtaccgtcttcgcgcttgagtcggtaagaacccggccgagtgacttcagcaattatgaacggtccttcccataagggagataatttatgccgatcctgtgttgtttgaattttcctcagaaccaggtcaccgactaaaaaggcttgtgatcgaacattccgattatgataacggcacaacccttgcaaatatcgagtcgactgaattagagctgcttctcgggattcttctagtcggttgatgtcgtctactcggccctcttcatagccctcctcgttgaagttccgaaatagtagtgattcaaattccacttcactcggcaacattgcttctgcgccgtaaaccaaaaagaacggcgactggccggtagcccgactaggagtagtgcgtaaagtcaaagtacggacggcagctgatctacccacttaccagcatagggacgtagtcggtcaaaaacgcgtgctttgatcccttgaagtatcatgccgttagcgcgctcgacttgtccgttactcatagggtgtgccacggaggcgtaacaaatgccgaagtcttcacaaaagtctttaaatgctccgccagtgaattgagtgccattatcagtgatgatccgattaggtaccccaaaccgatgcacaatgttgatgaaaaaatctctagctttatctgctgtgatcgtgatgaccggtttagcctcaatccacttggagaatttgtcgatagccacaaagagatgcgtgtaaccgccgactgcccttttaaacgggccgaccatgtcaagcccccagaccgcaaatggccaggacaacgggatggtttgcaactcttgggctggcaaatgagtttgtctggcaaaaaattgacaaccttcgcatgtccgctcaatcttgtccgcttcggacacagttgtaggccagaaaaaaccttgccagtaagctttgccgacaatagtccgtgcagcagcatgattaccacaaataccagaatgtatatccttcagcaattgtctcccttcctccaaagatacacagcgctgcagtattcctgacggacttttcttatacagttcagcttcatgaataatgtaaagtctgctgcgtctggaaatccgctcggcttcatttttgtcttgagggagttcttgtttgctcaaaaattttataaacggttctctccagtcagcttcaatcatgcttacgccttgagcatccatggcttcgactgtctcttttctaggcacggtcggttcataaagatgttcgacgaacacaactgaaggagctgcttcccgttttgaaccaaaattggccagtctatcggctgcctcattgttatgtcgaaggacatgggtgagctcgagtccatcgaatttatcttccagcttgcgtacctcttgtcggtaagcggtcatattatcatctagacatgaccactctttcatgacttgattaacaaccaactgagaatctccacggacgattaatcggcgaatgcctaaagagattgcaatccttaatccatggagtagcgcctcgtattccgccacgttatgggacgcagaaaaatgtttccacaatacatagctcaatctttctccagtcggggaaatcaagacgaccccagctccagtgcctgtgagcctcttcgacccatcaaaatgcatagtccaatactccatcttttcctctggcatgtcttcttggcactcggtccactcggcaaggaaatcagctaaagcttgtgatttgatcgaagttcgtggcttgaacgatatatccaaagacatcaactctaaggcccaattcgcaatccgtccatttgcttcgcgattgtgaagtatatctccgagtggaaacgatgtgtccaccgtgaccgagttactttgaaagtagtgagataatttcctgacggtaattaagacaccatataataacttttgaacctgaggatatcttgtcttggagtcggctaaaacttcgctaacgaaataaattggacgttggacttttttaatatggccttcctcttcatgctcgacaaccaggaccgtactcacaacttgggaggttgccgacacatttaacagtagcggctcttgtggatgtggcgaggccaaaactggtggagtggtgagaagtttcttgaagtcttcaaaggctttctgtgcttcgggtccccactagaaattgtcagtcttcttcagcaacttgaagaagggcatcccccgctcgccgagtcgtgagacgaaccggctgagtgccgccatgcaaccagtcagcttttggacgtctttttgggagcttggcggtttcatgttgaggatggcgttgattttcttcgggttgggctgtatgcctctttgagataccataaatccgagcaacttccctgacggtactccgaagatgcacttttccgggtttagtttcatcttgaaagcacgaatgcttgtaaaagtttcttctaaatccgcaatcaggtcatccttctgcttggtcttgacgactatatcatcaacataagcttcgacattgcgaccgatctgaattgaaaaacatctttgaatcatgcgctgataggttgctcctgcgttcttcaatccaaagggcattgtgatgtagcagtaggccccaaagggcgtaataaacgaggtcttcaagcagtcggattcttttagtcggatctgatgatatcccgagtaacagtccaagaagctgagtaactcgcagccggccgttgagtcaaccacctggtcaatgcgaggtaacccaaaagggtctttgggacaagatttgttgaggtcggtataatcgacacacatgcgccattgccccgtctttttccgaaccagaactgggttagccagccagtcgggatgaaggacttccttaataaagcctgctgctaacagcttggttaattcctccttgatcgcatcctttctgtcctgtgcaaaacggcggagtcgttgcttgatgggtttggcgtcttccttaacatgtaaagagtgctcaatcacctctctggggataccaggcatatcggatggtttccacacaaaaatatctttattatcctcaacatgatccgagaggtcgaacttaattgctatctctgaccaccgaagatattggggcgtgttaggctgaaccgcattgatctcccgttctgttagcttctgttttctcttagactcataagccaggggtccgccgaagatgtgattaagttctttgcgatgatcttgaaaaccagtcggggcatcgtcttcatcatctttcttctttgatgtgccttgatctccgtctgaaggtttacgtgcgttcttgacgtattgctccgcgaactgtttgtagacgaagcaatctttggccacgaggttggagttgggatgatgcgggcattgggagttcattatcttgtcgaaggtgttgacgcgggaacgttgtcggggaagatggagaggtggtcgccacaagttcttcgggcttacgcttgcgatccttgtggttgttacttccactccctcctgcggtcggcgtgtccttctttggcttccaagtggtgcccgactgtttggacgcggtaatagcatattcggctttggcatactcgtgggctttttcaaacatctgcttaaccgtcctgggaggtttacgcccgaacttgccgactaggtcctcgtggcgaatgcctttagtgaaggcggcgatgatgatgtcgtcggtgatgtcggagatcttgttgcgttgttcggagaagcgtcggatgtaatctcgaagggattctccagacttctgaacgacattgtagagatcaaactgtgtgccagggcgttcaaaggtgccctggaagttggcgatgaagtgatcacgaagttccgcccatgatccgattgtgccacggggtagtccgtggagccaggatcgggcggagttcgctagggccacaggtagatagtttgccatggccttgctgtctcctcctgctgcgcggattgcgagtccgtagacggtgagccaagactccggattagtggtgccgtcatacttctcgattccagtcggcttaaagccggctggccaatccactcgacgcaggtcattagtgaaggcagctactccatccacgtcgtcgtcgtagcgatttggtgaatggcggtgacctcgtgctgcacggcgctggttgatcgtgtcgcgaaggtcgacgggacgctggtgaggtggagagcgaggccgttcgactcggcgctccctgtgacgttcgggaggcgagtgaatagatcgttcgtcatgacccctgctcctgcgactagatcctgtgccgatgatgctgaggcttggctgatgataatcatgagatcggaggtgagggactcggctatcagtcggggtgcgggtgcttgcggagttggctggaaccgaggcagcgatcatggtcttcgtctggttcaagatgttgacaacatgatcaacttggttgagtgcgtcttccttgaggagggtgtcgaggagagtgattgctgcaaccgcgttctgctgggggtgcgaaagaccgctgttccatcgacgtcttgttgcccaatgagctctctcgctcggcgcccagattccaaggcgcgttgccgtcgatcttcagcctcctttgcaatccgttcgtgatcttgttgctcgcgctgtagtcgttctcgctcctgtcgctgtcgctcttcctccagtcggcgacgttcagcttcttgccgtgcgcgatcttggtccgcttctcgggcttggcgctgttcctccgtttcgttgtcagccatgaatacgccgaagaagaggagcgtgtaattatcctcatagctgtcgtcgaagttgtcgaggtcgccgtggtcatagtggtagccgaaatcgtcgtagtcgaggatctcggttggtcgagaactgacgccgggggagctaaggtaaccatccaactcttccgtcgagactgtcccaagaggttggagtataacgccaacctctctagatctagattggatcggggccgaagccggagctcgcctagatcttcgagtgggagatgtcttggcagtgaagacagcggccaaatcatcaggaagtttcatcaggattgagggataggacccgtcgtcttgatctggtcgcggaagagtagattggatctcgtccgagtggtttgaagccgactcgggagagatgctcttggagtaggcctcggccgagttcggaataccgaatggcacggggacctggtctctccccgactggttcgggtccgagtcaaggagagagatcttgccgaagtcgttggtgatgaagttgaggctgccgaaccggaacgcctgcccgggagggaaggcgaagtcgtcgatgccagaaacgaaacccatcgcacttagtcggcgagaacttgacgctacccctacctggcgcgccaactatcgaaacaagatttcgacaataataaaagggggtggctatcaagctaggaaagtggatgggtttggagacaaggaattttatacaggttcaggccttcttattcaagaagtaataccctactcctgtccggggatgattccgccgagtgtgttattgattgtatgattgggagaaaaagaatcgtcccgagaggaacccggacccctccttatataggggaaggggtccgtattacagagtacagtctatatcctaacggaatatgggattacagataaaatacaatcgtaaccgactaggatcccgggtattttcttgacatacaagtttagaatctaacccgagtcctcataaagatattctatctatatttggtaccatatatccagctggaatataaccgccatgtagatatggggtaaccataatctccacagtaaaacttatatatatgtgttcttagcgacttaaacgacaatcttcgacgaaaaaaaacttcagaaccaagttttaaaatttaaattttggcatcggttgatgctgaatagagtaaacgatgggcgcgagggagagatggctgcgccgccgccgtgcacggacgggaggcggccatggtgtgattcgaaccggattctagcaggaggaagacgaaatgggccgatacgaaatttgggcttggatgtgtgggagctgaaagtcacttatgctatcagccatggcccataccactagctggcacgctgcaggctgctgcgtcactgaaattccccacccacgcatcgcaccgcacgtcgccggcggcgggttgccctccccttctccgtccccgtctctggccatcctccccatccatccgccgtgctgctgcctgctatagcgcccctaggccggcagcccgccaaacgctgccccagctgggcagccacgcaaccagccgtctagcccactccgctcccagcgatagggccggagccggtcacctacacctccctctcgctcttatcctttgcatacttcgttctgcatctcgtctgatcgatcttctcctttgtcatctttcttacagttgcaagttgcttcttcaatggcaggttcggaggatttgagcggtttggcagcttcacttggagagttacacgtggaatcatctgttagatggatctccctccccttgagcccaacggctcaagggggccttgacccgcgccctgatcgggggcgcccagcccaatggctggtgggcccccgtcacactgtgccatataaagaggggtggaggacgggacggcataacgacacaaggaacgaggttcgtcgccgccgccactccaccccataaaccctaaccgatcgagggggcgcagccagtgacgggaagtccaccgccgcgccacgcctcgtcgtcgacaccgtcgctgctgcaaccgcatcaccgccatcggaaccgagcacatcgtcgccgccgtccacgtcaagcccgcgacgacaacgacgatggccggccggacttcctcttcctcaacaacgactggtcacaaccctaaatcctctcactccctctttgttcattcatctattgttgttcatccattgcaaatagaaccacccgactagatctaaacctaggtgatccaatagacaaccctatcaatggtatcagagccatcctagcgtttagtttggttcggggatagacatccacagagaagaaagaaatccaaagagaaaagcaaacgatccaacggatcaaaaagatcgaaaccctaaccctaatcttacctcgtcgccggccgtcgatgacgccggccacggagggggggaggggcaaagaggcaccgccgaggagccactcgacggccgcgcgcgcacccgcgggtgcacgcgcgcgccggcgagggggcccgcggcggcgccgccatctccgtttttcggccgccgctctctctcacacggtgggggctagagacggtggagggagcggagaagagaaaaggaagagggcgcaagggccgctggcagcggcgacgccgctccgctcggccgctccgcccggcggcgcgctagagaaaaagtgggcgagcggcagcgcgaggtcgccggccatggcgcggcggcgcaagggtcgccggcgtagatgacgccactcggcgcggccgcacccgcccgcaagagagaagaggctagggtttcggccggccggcggctggggtcgggtttttgtccctccgatcttagcgcccggccgtccgatcgaaaccctagcgatcggacggccgacggcggccgggccgaaagcggcccaagtggggagcgcgcggcggcggctttcccggcccaggcccaggttgcggcctgggggaggggagggggcgctcgcccgtgcgcaaggtggccatggaccgaccggcaaaggccggaaaagttcaatttaggtccctcggggccgaaagaaaaagaaaagaagagtttaataataggtcctctcagaagctttttcaattatgtataattattgtgattatttctaagcaatttgaaccaacgtgaaaattgtttagagaatagataaatgtgagaaatgcttctgaacatgtattttgtatattttcatgcaaattacaatagaattttgaattgtttttgcatgttttacctctgtttaaatttgaaccaacgggagaattttacagagagtaaataacagagttttgttattgtttatacgaattgtatatagatcttccgctgcaaatagatgaaattgatgaaaattagtgtttctaaaattaaatttcgaaccaacgggagattttaattttaggaacattaattatgtgctatgatgttgtaatttttctgaccaacgttgataattgcaatgttatagttatggctttatgtgttatgtctattttctgcccaacggtgatgtagacttaatacataataattttaatgttaattttgttctcacaatacatgattatctcaggtggctactccttgatgggttacattaaagatattccgaccctgaaaggagataactacgaagaatggaaaagagaactcgaccttgcctttatcttgggagaggtggactgggtgttgactaccccatgtcctatagaacctgctgaaattttcagaggtgaaaaagagtcagatgctgaatggcaaaagagagagagggacaatgcttccctcatcatgtcgtatgacattgagcatgcgaaatggtcttcagccaacaagaattgtttggctgcggtaaagaacacgattgagccaaccatattgggctcaatcccagagtatgacactgtctctaaatacctcgaaagtataaagagccagtttactggttcttcaaagttttatgcgacacagctgataaagcagctttttacagagaggtaccatggaggtggtgtaaaagaccacattcttaggatgagcaacatggcttccaaattgaagcaaaaagatttgggcatctcagatgactttctggtccatctggttttgtcctcattgccaaagaactttgacaaccttgttgtcaactacaaaataagtacagagaattggaatattgaagagctcatctctaattgtgtgcaagaggaggaaagacacaaagagaccaatggtgactccattaaccttgtcaaagataacaaggaaaagagccacaggtcaccctcctcaaaagaaaaacagcctcagcatctgcctcagaaacaacagtttacagttgagacaagatcagtgtctacactgcaagaagacaagacattccaagaaagatcatcctgacttcctgacagtgatcatggcaaagaaaggtgagaacattattacatttgtaaagaatctcattatgattggttattctagatccacatggtggatttattctggagcaactattcatgtgtgtaattgtttaaagggattccgttcaatgaggactacgcaaagaagtgaaagatccattagagttgctaatggagttgaagcaaaagttgaagctgttggagattttcgcctagaactcgcgaatggcttcacacttttacttccagatgtttttatgtccattctttgcaaagaaacttgataataagtgtatccaaattggattctgatagatatgaaatggcaaatgtgaactatggtataataatgaatgtattggtcttgtgttgcaagatcagctttatttgttatctctttctgagaatgtgaatgttgtgtcctcgttgacaaaagaaaagaaaagcgaacttctgatgtctcatcgaaattatggcactgttgtttatgccatatttcgagggggagaattgagagactggttaagaatgtagttcttcctccattggagttctcagttttagaacgatgcatacaatgtatagaatgcatcggtgcccaaaacaccgtatgagctatgaatcctccgtgtgtggggaagtcctgcaaaggataaagtatttaacccaaaacagtaagctgccattttattggttattctgaaagatcaaagggtcatcgtttctactgtctaaacagttatacaaagtttgtagaaacgagacacgccgtcttcttggaagacgaaatgattagggggagctcggtaatttgagaaattgatcttgaggagaggcgggtgtctgtacccgctccgtcgactcaggaacctttcttctctctacctgctaatgttgtgccagcaatgcatgccgttgcggtaccaacacctgttgttatctctcctgtggcaacaatgaatgaaagtgaggaatctgttctacaggattcaacagaaattattgccacatcagaggaggagctgcaacagcctcaaacagataatgtgccagaataggaggcccctagaaggcctgaaagagtcgcatatggaggatgatcccatctcatatgaagaggccatgagaagccatgaaagatgaaatgaaatcaatgaaattaaatgatgtctgggatttagaagaaattcctaaaggagccaaaacagtaggctgtaaatgggtctacaaaaccaaatatgactccagagggaatatagaaaagtttaaagtgcgacttgtggcaaaagttttcacgcaaagagaaggcattgattacaatgagacttttctccagtctcttgtaaagattcctttatgattataatggcactagtggcacattatgatttggaattacatcagatggatgtaaaaatggaatttctaaatggtgatttgaagaaaaaaagtatacatggcacaaccgaaaggtttcgtcatgaaatgaaacgaaaatatgggatgccgtataaagagatccatttatgggttaaagcaaagcttcgagacaatgctacttgaagtttgatggaacaataaagaaatttgggttttcaagagaatgtagaggacaactgtattgattcaaagttaagaatgggagactcattttcctaattctgtatgtagatgacgttctactggctagtagtgatgtcaatctactgcaggaaataaagaaattcttgtcctcaaactttgacatgaaagacctcggtgaggcttcatatgttttgggcatagagattcaccgaaatagaacaaagtatgcattgggattttctcaaaaggcatatatatagaaaaggtgttgaagaaattcaatatgtacatatgcagtgctacacctgctcctatagtcaaaggcgaaaagtatggggcatcacaatgtcctagaaatcagtatgagctcaatgaaatgaaaataaagccatatgcgtcaactgtaggaagcctacagtacgctcaagtgtgcacacgacctgacttggcatttgttaccgggttatttggcagattgcaaagtaatccaggcctagagcactggaattagtaaagattatttgcaaagaacaaaagcctcatgctgtcttacagaaaatcagaatcgctccacatagtggggtattcgaattctgactttgcaaaagataatacaaagttaacatcgggggatacatgtttaccctggcagtaggagctatttcatggaaaagctcaaaacatactaccactgcagggtctaccatgtatgccgagtttatagcatgccatgaggctacggggcaggtgaactggctaatgaagttcatacccggttttaaaggtggttgatagtattgagaaaccactaaagttatactgcgataaagaacccacagtaatgtactctcacaacaattagtcaagtggtgctgccaaacacattgacataaagtactatgttgtgaaagacaaagtccgggatcaaacaatcagtctcgagcacataagaacagaaaggatgctcgcggatccgctcatgaaaggcctacctcccaacatgttcaaggaacatgtagcatgcatgggttttaagggaagccttatgaatcctggactatagggcccaaaagttaaagtatctgtttctgaatagagatgtgtatagtggctgtcgaatccatcggtaattaaccgtgacgatgaaacatgctctatatgtaaatctgtgatggaatagaaaaagctaaaggaaatagtgagatcaagggggagaatgttagatggatctccctccccttgagcccaacggctcaagggggccttgacccgcgccctgatcgggggcgcccagcccaatggctggtgggcccccgtcacactgtgccatataaagaggggtggaggacgggacggcataacgacacaaggaacgaggttcgtcgccgccgccactccaccccataaaccctaaccgatcgagggggcgcagccagtgacgggaagtccaccgccgcgccacgcctcgtcgtcgacaccgtcgctgctgcaaccgcatcaccgccatcggaaccgagcacatcgtcgccgccgtccacgtcaagcccgcgacgacaacgacgatggccggccggacttcctcttcctcaacaacgactggtcacaaccctaaatcctctcactccctctttgttcattcatctattgttgttcatccattgcaaatagaaccacccgactagatctaaacctaggtgatccaatagacaaccctatcatcatcagcttcgaaggacagtgaaatctctcagcctgattcgtgtcactgcacatgttatcttagcctacttgttagttgtcattgcttgggatgtacacactagaattgcatcctgctatcatgtagctctgtttatatatttgaactgcttacaaagcaacctgtgatcaaatgatggttgtgcttgttgataatacaaagcaaaggtactacaataagttgatttgcgtgtgttttgttcaggcaattcggttgatgatgatgctattgctgatgatgatgtatgggatgatgtttcggattctcctggtcatggatccacattagacagagagtgggttcacaggcagaaccagtttcataaggtataaacctaaggcagcaatttgattatgggaactttgccctattcctaaaggaatctgtgaaattgttatgttccatttaaatcatctttactgcaatatatttctttagttatgatttgtgaaacttgtgtttggaccagaatgtgtaaagtaatctttccatttttcctttagatgggatacagggatggtatagcagaaggacagaaggacatcgcccaagaggggttcaatgttgggtttgggcaatctgtgcatgttggctataagtggggtcttgttcgtgggattaccaggttaaaatggatatttgccattccaagtatagttcttgtacgcagccgcttgtagcatccttattgattctgttttctgtttattgtccttaaaacagtgcattagctagtctccctgacagcttgaaagaaaaattgttgcccaatgtccagtgcagaggacaactccaagaactgaataattctgtgcaagaaatttcagcagaagacgcacttcagatgtttcatgagagcattcttcagagtagccattcatcagaggaaccagatgcaacattatagagagctacagattccagtaggttgcaaagcctctcaaaggatcttgtgattttgttgcatgaatgctcagatgtgaaagttagcgaagaactgagaggaggttcataaacaagttggcggaattgtgagcactaccaaccctatgtctggcctagttgctacttgcgtcgaatttcagtttgctgaacatcgaggaagatggtgattcaggggtgttgttggagatggaagcgattcaattccttgatctcacaaccatgatttgctgtttcgaactcaaaaggcttaagcctcaaagaccaagaaattaataagaatgtaattgtaaatcttgtaactaagatttcactgatcatataagcctttccttttcctgctagatataaccggtttcgtatctgtaactcgcagcatgcacacacacacacacacgcatttcattagaactttggcagctgctaagatgataacttcctgaatatcttctgcagaaagtctggtgtatgacagttgcattgtaactttgcatcttctggttccaggaagtgtactcacttttttatcaattgagaaggttcgagccactcctgaatgtttgctactgccctacttatgtaatgttgaatgttgatatgatgaatggcccttggtaatttcagtttgacagctcatgtcagtaagtggcccgcttctattacatgtggttggtgcgattggtgcatcaagctcagcacctcttttcgacatgtaccaggttggtgagaacatcaacacttctatccgttgcatgttgtgagtgttggttttcaatattaatgtcattcattcatgaatattcatgattgatctggttggagcgttcattgatattttatacagtacagttatcttgaatctgaactatgattgatctggtctcttggcttggttgctcctgactcctgaattgaatgaaatactcctgacatcccaatcggttgattggcacttctgacggtacatgttattctgaatagattcagtttattggattggaggttctttttttacccaatcctgtcgttaaatctacatcagaacctatagcaacagagtttttccttccctatttcttgttacatgacatgtattcaggttacatgctcgcatatcaattctgatttcttgttcccagcaagtttggcaccgtcttattgtcaacacgcttgcacagagactggcagactgctgtcacatatccaattctgatttctggttcccagcaagttcaggcccatcactctcctagcggtattctgaaaagctacttaaacttgccatcacttatcagtcaagttagatcacagctcagaacttattaagatggcgaaagatatgcatcttctgttagtgattacaggagatataggagagattgaatggataataatagttctgtacccatagataatcaagacatgctattgtagggagaacaaatgctgtcaataagagttttattgatctttgcccaaggaatacatcccaacactcttgccacttcgcaagtctcgtacacttacacattaatctatcttatatttttattaaaaaatcataattatttagttgatatacaagaaattggtgtacgtctacttaagagattagaatccatttaagagattagaatccatcctcgatgtcatggccatattttttttttgcttgtaacgataagaagatgaagatgacgtaggctgcctgtttattatcaaccaacatatcagctaacgagaaacatcggttattttgtagtatacacaaaacgtgttcactatcatgcacacgctgctgatgcacactcttttttaattatatgggctctccatacatatatgtgtgtatataaaaagtgtacgtacgagtagtatgtagtacgtagaaatcttaattagtctatggatggatggatggatgattggatggaatcaggagtgcatcatctgattattattattgtcgtcgtcgtcgtcgttggccggatgggttccggcagggtgcatctccgtctcgtgtagctggcggtagcgcttctcagcctcgggcatggcgcccatgatggcgcggaggcggaggttgacgtcgtcgaggcggtcgtacacagcgtcgttggtgaacatgccggcgcagaccttggtgatggtggtccagctctcggccaccggcagaaggatgatgacgaccgagcccacagtcccccacgcgatcgccaccgcggcccacagcgtgaagtagccaaggctgtacctcctcgccggcagagacagcgcaggccacgccacgacgatgacggcggtgaagacgaggccccacctgacgatccaacgcttggcgtgcaccaggcgctcctccttgagctcgtcgtccagcgcggcatgcacgctctccaccgtggtgatcatctcccggctggtcccccagtcgtagtgctgcgggcgcagcaggctgcacgccgcgtgcaccgccccgcccaccaggatggacaccaggttgcccgccagcatcggcgcgttccgacctgtggtgtccaggttcacgcgcccgtactgcaccttggccaccgtgagccacacggccacgcccagcgcgcagccggacaccgcgccgcccatggcgcccaccgcgttggccttgctccacagcagcagcagggcgatggggatgactgcggatcccacaatgactcccatggccaggtacatccaccccagggacacccccgccacgttgagcaccacggcgaggacccccatgaagcagccgaagccgagcacgacggccctcgacacgcggagtatctgcttgccggaggcgcccgggttgaggtacgtccggtagatgtcgtaggtgcagagggaggagacggccaccagctcggcggagccggcggatgtgacggccatgaagagcatggtgagtagcaggacggagccggacttgcccatgagcgctgttgcggtggccgggggcaccaggcccttggctgcctcggcggcggtgagcgggaggtccagggcgagcgcgccgaggccgagcgaggtggccagcgagaagggaacggcgaaccacacgaggccgcccagcaggtagcccttgtgggtggaggatggccgggcggcgatggcgctcatccagtagccctgcagcaaattaaattacttgtaattaattgacgatccaagataattattagtactacgtacgtttgggtacgtacgttgtctacgaacaccgttccaaagttgccgacgatgttgatgatgccgaagacgagcccccccgagctgagcatggtgaggtaggagcccttgaagttgccggcgacggggccgcacgcctggccgttgcgcgagaggtcggcggagcagtcgcgcgcggcgctggcgacggccatgaggcgatcatacaccacacgcgggctcccgagtttggagctggaggtgtagacgaggaagacgaagacgacgagcaccgcgtgcacgacgacggagtggatgtagctggcgaggaaggtggccttgaggccgccggcgagtgtgtagacgacgacgccgagcgggatgaggaagctggcggcgtagacgttgactccggtgagggcgttgacgacggcggagccgccaaggaggagcatggcggtgacgatgacgttggtgaggaggcagaaggtgaggaagacgaggtgggcgggggtgccccatcgggcgcggacgatctcgcagacggtgtgggcgttgggggccttgcgcttgatctcgatggccatcacgccgaagaggagcacctggatggtggcgccgctggcgtaccagaatggcccgctcaccccgtactgccatgccacgttcgagctctgcaggatggtggcggcccaggtccactgcgacacgatcacgctggcgatcagacccgtcttcacgctgcgccccgccgtgttgaaccactccgacgtgtgctgcgacccgacgtaacgcttctcaagccacacctatatatatatgcatacgtacgtaggtagtagccacaaattaattaatcatatctctgcgatcgatcgatcgatcgatctcaagagaggagaggccgaaggatcggaggctaaccaggaaggaggtgaagagcgcgaagaaggcgccgaagccgagcacgacggcgtacccgacggcctgcgtgagcaccggccttccgccgaagtagctgccggcgcggctgcacaccccgttcaccaccgagtagtactccgccccgaaccccagctccgcaggagggcacacgccgctcgccatcgccagcttcaatccaatcgatcgatcctaattaaatggggaatttttactctaacagacggatagatggatatgtactgtactagctagcagatcagagatgtgtgcctagcctattaggcgcgtatttatacacgtataatgaccatatatgcgatgcaagcaaagatacactctccagtcatagatgcgatgcgatgcgagcttaatttggagtgattgggtagttgagcacggaatcttctcttcttttgacccagtcatccactagctagctatattccagctgcatgcgtacatcatagagtagtacagtatattatacacactcgtcgttttctctgatggcgaccagattatacaaaactccatttatttcgttttcgcaaagtccaacttagtttactcacttatatataacaccaaacaagggcgcttcacttgtcaacaacacgtactgcacgctatcagaatcgatagctacacttccgtcgattctctctgcttcctcctccgataggccaggtttaagggaaatggcactaattaacaagccactaggatccagttgtaacgataacaatccaaggtcaaaatcgcccgcacacaactcgctacataattagttgctccagttgcgcatgaatgccatgtccatgtttctgtttgtcaacgcacaccgcttgcacccattctatttgtggagcaaactctgttttttttaaaaaaaaagcgttctcacaagtcatcgaatatgcaatgtcaacggcttacattaagtatggcagaaaatctttttaatcccctctaaagacgcagccgcggcctctccacatctgcatcatcgtggaggctgcctaggccgcgggacggcgggaggcgtggccttcgcttctggtccgcacctctattggatggatggatccattctctctagtgaagtttgatgaaacgcatgaaaatttccttacttgtgtctctgttctttaaggataaagcgacaacgttgccgcaacaggaattgcaacggttaactgctacattattttttaacgcatctgcctgtaaacactatataaataatatattttttggcttcctaaaggaagtagcacaaatagttgatagttattgttaccttccctcacaatggatattgcaaaacaggatgtgagcttttattgcttattcattgctttaatcctataccgtggacaactaaaaagagattggatagacctgaaagccttttgtgtgtatgcggagtcctgcggaaagcgaacatgcccgtacctatagtctacctaggatcgatctaatcctaggggaatatgtgactcatagtggaattagttgaacattgaaattcaaactttggtaggcaacccgtatagtctattgtgtacgggcattgagtattgcctttaaaaaaagggtatatgagactgccaaataatcgttcgatgaggtttaatgggatttcagacactttatgctgctcattgatctagggtttcctttgtagtttcttaaggagatgtttgtagtaccttgagaatcaggatgggaatggctagggtcaatccacttataaattgaatcgatccttaaatttactctaatgaatctttagaatcactccaaaatgtaaacggatcaaaccattagaacttgcacaatcctagcaacaggcgtccaattagtaattccggagtgccgcagccatggcgatggttgcgcacatgacctccctagctccaagctgcgcactgctacactgtgggcctcacatgtattggacggagggagtgtattatccaatggatacaggtaacccattatgggccccacatgctttgtataataaatcgttcctataaaatccaataagtttttatagtgtgagcacgagttttaaaaaaattgtatgtccgagttttacctacatgtaatacgaattttttggtctattagtaatgcagatgatccatttgggtgttcatggataatctatcgatataatgaactcgtagtggattgaccttgttagaccatggatccataaactcagtggaaatggtttaggcacgattcatatcctaaccattcccatcctgacttggcatactccaaaaagccgttgaagtgaggcctaaaatcttgaaaatggaagttggagattttgatcaatggtgtctccatcatcgccaaccacagtaaacaactaatgttcttgattacatttcataatgttcactgtagatggtcgtatggaatttgacggaggctaagatgacatggtaacaagattacaagactatggcggtgtcttatgggcagttttatggatggggcaagcacaagggacaacaaaaaagcaacatgttaggaggtggtatggctacctgtgtggtagggtaagcaaggaaaaactaccaaagaggaataaataggcattataggaaatgtggacattcatgttggtgacttgtacaagtgatatgtatagaaggaggtgcacataaatcttgattggtggagactctggttagggtaccatatgatgcagaggtgaaggtccccatgtggcagatatggtagggtggcctagctactaggcttcccttcttgcttgtcctggtaggcctttgttgctgacggcgtcaaggcttgacacaacaccccaaaaggttggatcccttgcctctcagcagcctatttgcttaaccttgtctcctttgccctctcatgaatgcagcctctgagaccaaagccatgcacgaagtcaaccttagcatcatcgcccaccgccgcgccactccttgagcccattaaccactgtccatttcgttgccttcttgcatgtggcctcggcagccgaccccccatgcgttccatggaggaggaggaggaggaggaggaggaggagggataacatgagagacgaggggacgggcaggtggcgcaacatccctagcactcacaaggcacgaccaaggctgcaacgatgacaatttagtagtggtagcgtcaccggctcctatagatagaaccaaggataaaggtatgtcctctaattggtgcaacacaggcctagatggaaagaagaaaatggtagcaaaaggtaatgagcttatttaattggaattagttaggtggcccgcacaattgtgcgctagcacctatacaaaatgatctaactttttacacatggttttattaaaaaaatgttaaatagccatttagttgccttagtctttcaaaagatcgatcctatcatcattttttgtttttagttttatatttttaaaagtcacaccagccaccactctctactctttcgccacactttttttttctgttgcccgacctcccactgcttctaatcatcatccttgtgacctttaaaaattcaacctgatatgcacacactagttttttacatgcaatgaacagtagcttcttctctctctttgtatagggccaaatttgccttaatttctagcaccaaaatgttgaggtgtgtctcattcattagattctgcttcgatcagtataaattcattttggatgcaacaaatagtagctttcctattttgtagtttattaatttttcccaattttgcaattttcatatgattttcgaatgaaaatttacaccaaatttaagacgatactagtttggacctttcaagtgtgagcgtattttggctttacgccttcgtgtggagtaaacgccctttctgttgggcgggttcggctggatcttttgttcccccttttcctttcttctccggcagcggcggcggcgatgggggacggccgcgtcggaggtggaacgaatcggccggcatggctgcagcaatacgaactagtgggcaagattggcgaggggacctacggcctcgtcttcctcgctcgcctcaaacaatcgcatccccacgctgccgctggcgttggccgccgtggctctcccatcgccatcaagaagttcaagcagtccaaggagggcgacggtgtctcgcccaccgccatcagagagatcatggtaccttcctcagggagatccgctttccctactcctccctgccataccaaaccctaactaatcactagtcttctcctcttgcagcttctgcgtgagatcaaccacgagaatgttgtcaagctcgtcaatgttcacatcaaccacgccgacatgtccctctacctcgccttcgattacgccgagcacgatctctatgtaagcagcaacgcccatctccaatcttctctcttatctattggacagtagtaatcatttgtttactccagttaacagctaatgaacctatgaaacatatcacaggagattatcaggcatcacagagagaagcttaacctccccataaatccctacacagtcaaatctttgctctggcaactgctcaatggtctcaactatctccataggtatcgtttacttcttaagttatcatgatgagtgatatgtaaaaactggagcctaacctagcacatggaactttttttgctgggatcctagcttattctgattttgtctccaaaaagaaatctaaaaattgatttcccttcctcagtaactggattatccatcgagatctcaagccttctaatatactggtatgttgtcatatgctaccttttgatgtacaactctgtcaatcttgcttttcctggctcaccggattaggatgatgtgccccaataggtcatgggagaaggagaagaacatggaattataaagattgctgattttggactcgctaggatatatcaagctccattaaagccattaagtgataacggggttagtacatccatctgtgtgcccattagcatgtttgctgctgtcttgtgtttatttcaaggcatataagggcaaaaaatggtagttatttgtaaaactactgcttgtttcctcttttttgtgatgaaccttcatatgctcatctgttcctttccttttttgtggaagcatttaatgtgttatcaatacccacaagtatatggctaaccaataatttccaggttgttgttaccatctggtatcgggctccagagttgttacttggggcaaagcactacacaagtgctgttggtatccttgctggagattgaaatgatatctttcgaccatcttttttcgctttattcacttcagctatttccttaatcaactctagatatgtgggcagttggttgcatttttgctgaattgcttacactcaaaccactgttccaaggtgttgaagccaaagctactccaaacccgtttcaagtatgggcattcacactcaagtaattgctatcgttaccttgtattcagaatcaattactagatactagactaagactgcgacattttacgttttctatgtgatgcttaatttcaagtaaagatattatcactcttgcctggaaccttcctaaaagtaaataggcagttgataattgtatgttgttgcattttatatatcctgctgtattacattttgtagaatatccatgctatgtatgccattcatttgccatttatttttatctcacagttgatttgcccatgtcttgtagcttgatcaactagacaagatttttaaggtcttaggtatggatgactcatttctcattctgactatttgattgtgtactcttcctgagataatatatgctctaggataataatataattattctccaggtcatcctaccgttgagaaatggcctaccctcgctaatcttccatgctggcaaaacgatcaacaacacattcaagggcataagtagtatgtcatgcattgttaagctgcttttaaaaacctgtgaaaatagcatttatctttccttgaggaaatagtttctcccttgcagtgagaacacaggacttcataatattgttcacttgcctcagaagagtcctgcgtttgatcttctctcaaaaatgctcgagtatgtaactggccttttggcctgctataaatccaacataaccttggatgattatcatttcttacattcatcttttgtactactaaatgttgttttaataaccttatatattcctgtttcaggtatgatcctcgaaagcgtataacagctgcgcaagctttggaacatgagtaagtaactacatccctccatttattcattattccttttttgcctagttggatacttcttatgttctcagtgtacagcaagtgcgatctggagttctaattgcttccctgaatctagtttagcaaccatgcaagaaaaacagttatgctttatttgcacgaggttttgatacttggacgaggtcttgatggtcctcagttggagctgattttgtggggtgggctggagtggtggtggtagtggtgtggcttaaagggtgtaaaattgccaagaccatctgtttagagtggctaacggtcaatttttccttgtaaatatttgtgcatcctaaaccttatatattttactttaaaaatataaatatatgcaatccttagtttgattcgctatacttctaaatgttttcatctctagtggcttggatgaaggtttaatgctgaaaactcgaggaaatactactttcgttgtggtgctattgtttattactccctctgtttctttttgtaaggctataggccctctgtttctttttgtaaggctatagtcttccctcttcctctgtttctttttgaaaggcctagagttttttcaatcattttgcaaaatataaggcttgcatgttggtattgaatttttttttctttatgtgcccacaattattacatagtctctctcccacatttataagaagcatcttactaaccatctccacacctattcttgaggtattttagtatggtggcatggtcatttgaactcttctttctcttggttttccaccctccctaatcatttttgcccactcagaataagacttgtaattttaaatggagggagtatgatttactacagcaatccttctgaacaacccttttctgttgataggtactttcgaatggatcctctgcctggacggaagtaagttatgtgtaatcagggtcttaatatactttccctaacttgcaactcttaaacatttggctttacatttcctccacaaatgaagatgactaaaatctttctctggtcagtgcacttttaccatcgcaggctggagagaaaattgtgcaatatcctgtgcgtccagttgataccacaactgattttgaaggaacaacaagccttcaaccaactcaagcggtaatggatttctgtccctgtgccacctttttaccaagacttatcagtattacttagtattgggaagcgatatacagaatatgcattttctttggtcaattatctaagttctttatacagttggcaaaaatatcgtgctttagggcatattcaattggtcaaaacaagtcgatacatggttttcaatgccatcaaagatttggtccagtgtgatttaaggaacccaactccatgttggcacattttcttgcagaattgattcgggttgctttatgaggtgcatttttataatgttgtacatttgtatttcagccatcagggaacgcagctcctggcaaccagtctgtggtaccgagacccattccgaggcaaatgcaacaacccatggtcggtatgtcgagaatgggtggtacaaacatggcggcctttggtgcagctccgcaaggaggcatagctgggatgaatcctggtaatattccaatgcagaggggcgctggagcccaatctcatccgcatcaggtaaaaactgctgccttggaagtaaatgttgcttggaaaaaggcctgtgacaaatgcaacatttgattggcttttgatatgtgcaacagttgagaaggaaagctgatcaagggatggggatgcagaaccccggttatcctactcaacagaagaggcggttctgaccgactgaatttgtaattgtatatctatttggtgtgttacttgtgagcacgcttagcttttgcggtggttgctcctagtcgtacagtgagaattgtatctgttctgttgtaattgaacgccatcacaaccaacacctctactagttagttactagagtgactacgcagacagggccaggttgccgatgatgccatcaccaatggagacaggcatacccagccagagtttcgccaatactctgccccctgaacccaaccaatgaatgaattggcatcgtacgatctatttcacatccatgctctcataatgatacaaagccatttttcgtcagaagagaaatgcatcgagtgccctttcctactaaaggaaaaaaaatatacacacaactcttcgaatctgaaaattcacgaatacaactggttcaagagcaaccacaattatatcagtacagtagcagcttcatatatttacaaccactcccgcttccacgaaaagatgaactttcagtaagtaaaccaaccactcctcccaagtgcaagtgcatcactgtcacctgtctttcgtaacactacagttttgcctgaatcaaagctttactaaaaagcctcgcccagttcacgaccaatagctacaacaggagaggaggaaatcaaatggaaaagaaagcaagatgcaggcatcaagtcaatccacatagcgcaaggatcaactatcccttgttattcttcatgacgatgatgttgaagttatccgccctgaagctcgcatctcatccagagttgttgctaaccagtccaatccttcatagaggccatcgcctttgagagcacaggttccttggatatgccatatacggttgttcaggtcatatagaccaaggccctcgcatacttccatcggagtcattgcgcccctctacactagcagatacattacatgggtgagcaacaattcagtggcaaataataaagccattaagttatctagtgcagagtcatactattccaatggtttcataagtgaatgcacaatgccaacaaaatttagcatcatcataccataagcatggaaacatgccaacaattaattcatcatctgcaaactcaacaaaagatagaagtgcatcaaccatgaatggcagcaatctcacatagtgacatgggcgatgggaaacacaagttacatggatgtgaacttcaataacaaatgatttttttcatgtactacccagatgatgaatttacatatacaggaaacaattatatattggaaaaaggtaatatagtcatctgaacaagctagatgatgttaaagtagctgccataagaaatacaggttctggaaaaagaaaaagagacaagttgagcataccatgtcttgcttgttagcaaacaccaatagaacactattaagcataaaagggtcattaataatggcctgaaagacagattaccacacagtaagttagagcaacaaggcaacaaatgtcagtgcagaagcaaacacttgctgcctcataataaattatttatacatatatgtaaacctgaaattcagctctggctctcccaatcctctctctatccagggaatcaactacgtagatctgcgagtttacaaaagaagagaggaatttacaacgcaagaaaagtgtttctgaaaccaaaatgtgcgtgctaattaaataaagcaacgtggatctgtaacataaaaggtccttgtaggcaatcttgagcaaaagattattaggagctgtaatgctatttggcatagcaattgttgctcttggtgggattgatgtggtttttgataagcaagagaaataaagtcacaaagtgaattgcttgttcaaaggaggtacgttatgtgtaagaaatgtttccctatgccgctggataaaagaagaggggaaaaaaagagtgaccagagcatcggtgttgttgaagtagtgcctccataagggcctcaatttttcctggccaccaacatcccacacagtgaacaccacattcttgtattgaactttctccacgttgaagcctgcatgatgatgatgatgatgatgttaggttgggtttggatttggctcaaaacaaaataaaagattcgatgaggcggagggagggagggatgagagtgaacctacctatagtggggacggtggagagaacttcgccgatgtgcagcttatagagtatggtggtcttccccgcggcatctagcccaagcatcaccacctgccagccaaaaccaccatcatccatgatccgtccaaaacccaatctgagacgagacagacaagagtggaaaagcttggggtacccgcatctccttgttgccgaagaaggcgtcgaagagcttgcggaaggcctgccccatcccttcttcgccgatcgtagcggccggatctagaagcttccagaagattccgcggcgagcgaggaggaggaggcgggtactcggctggagcctggagcggagccaaagccaagggagccaggggggagacacgagagaggagacgacctacctgccctgccctgcccgtcgtggattccagatgccgagccgaataatctgggccgtccgatctgtgcggggcccacctctagttgagtgcattacctttcccttttttattcatttcatatactttgaaatcaactttctagtaatattcatccattgggcctagaggtagcaagtggcaacggcttgcaatttgtagtgtgtaaagtagtaccgtaaagcgctttgttacgtgaattacttaaaaaggtttttaatattttttcaacaattaagctagaagcaaaagagcaaaatgaaattaaggaaatgtcacagttcattaatactaatcgtgaaaaagacaaatgatatccatgctttgatgcagaatatattgataaatatatattaagtattatagatatgatagatatatatgttaaaatattgtggcttgtggaaaagatgtgaaggatgatgattgaatatgtttgcatttcggtttgtagaattcaataaatcatagatgaggttgtatgcttgaatgaggtttgatgtgtaattattgctagtggataatgatatggtatggttacatattaagttttagacttagtgggttgtaattttatatatggtatacatattaagttttagacttagtgggttgtaattttatatatggtatagattatatgactaatgtactactgacatgttaagaacatcaaaaattgataatgtgtatagtactgctgcaaattagtacacaagttatatgtgcatagtagtactgacatgataagaggtgcatcgtaatacttaattagtgtgttcaataattatttgtcgattttcttaaataaccattatttgttgactaaatatgtctttcaccatctttgtgcctttggaggttcatggcttgcaccaatttgattgatatcatttttttatttatatgggctttaatcccgtgactatgtaaccctttttaattggtaaatagagaatcgatcattgtacaatgcttagcaagtgatcggttaccccgtagcaacgagcgagggtatgtgatgaggatgttactagctcgggtatggttataaccatacttatattacacatcaacaatctaaaagtgcatatattttatataaggtttacttattatatgtttgaacaaatgttactatatcatgagttttatatcttctcatatgcagtaggaattgaaccctgtatacgaaaatataatcaaatattatcaaggaaagttttctccatagacttaatgtgacacccaaaagtttccactataaaataatatggcattgcataaatatagagcaaataaggtaacaaatatttattaaaatatgaagaaatctaacctagcttctcaaatcaacgaaaagatatagctcaatatttttctaataaaacagtaaaattatatttctaattttttatcaattaataataatagaactaattatacactttacttttctggagacttacaataagcaaaactacattcatatataactataaccagtatggaatggctttaaaaagacaaaaaaaagtcattaggcaaaagaaaaacagttctagagcattgggctagaaaaaaaaaatcccattcaactgatcacctcaaatatataattatgtacatctagaatagataaggctaaagattttatcctatatatgataaatatatatattttttccaattcccataagaaaatccgagttcgtttcaggaatgcttctgtccgattcctatttcgacagacagtgatctaaccgtattcgtttccatttttgattcgaagaaaaaaaatgggaatatgtttgtttgaaaaaatttatgcccgacacttttcattttcaaaagcaggtgaaattttccaaacagttttcatcactacccctaaccctcaaaatcgtagtcttggtgccaccagcccaccacgcgacgcgatggccgttgtcttgacttgctcgcgctcgctctccggcctcgaccctcctggcctggcctcccctcgtcaaggtcacttgctcgtcgccagcaagaggtacaatgcaggaggtgggggcttcatgccgttggatggatcccgcgattggtgcggtgttttcgacggtactgtatgttaccaatcatatacggggtaaagaaaatactactttttacattgcgtggtccccgccttccaccttcttttacagaaaatactgtactacttttgtggctggtgtgttccaggacatgccgtccctggtgttccccctttctcccccgcgcccctccgcccccaccccccgcttagcctcgccgacacggcggcgatggcgtccacgccgcagactaaccggaagctggctgttctacaccatgccatcggcgatggatgcacagcggcagatgaggttggtgtgtcgagcaacaagcccgctcaagaagagcttgcgagctcaatgtcctatacatatctcatcctgagttgcggctcgtcgtccggatctcccatggtcggattcgcgtaagcgtcctctgccccgtgctctttggatgattgcccttatcagctagctgtgtctcttttttttttctttgtccagtcttggtggtgagccgataggcgatagccctgttttttctttgttcagtggagattgcccgtatagctacttgatggagattgtggaacagcaagcagcgaatgtggggggcgtcgtgcagagtgatcttactggcgtgtgcgaacaacaaaaacatacctattctgaccaggagaattgctatgcagagaatgcgagtgagccgcctgagtccagcaatccttcgtggtgagtttgttgtttgtcatcattttgcgaaacagaaaatggtattgcgagttcgcgttctgcgtttcgtaaaactctttttttttttgccaaaacaaaatagtgatgcatattatgactatgttgtctcttcagattgggttgtttcttcggatcaggctgtagatgatgatatactgtcctttggatcaagctgacggaaggtttgtttttttgaatccgtctctgcattttgaagtttttttccggaacaccacttgtggaatggtaaaaaaaaaagagcatcttttttgcctgcagtgcttattggttgccaacattgaaagagagcactcctggcgccgcaatgctaattgatgagatggagctgaggcaagctgatgagcagcatccaggcgttcacgccccgcaaagtccagcagccgtgtccggtgtcacccgacgagctccggactgaccgcggcctgctcgagcgctgcgacaatctgctcggcagcatccttcccctgcccaaacactacgattttcattcgtactgtgagcggacgccggcgagccgagacgaaggaacaacacgagcttcttggaggtccttctccatccgttcattggcagacgctgagacgaggcaggagcacgcattcttcgtcgccgccacgcaagaactccagggcttttaaagtttcaattttttttagcaataatggtgaacgaatttgtccatggttgcttgtttttcccatacattttgttggacgaaagaaagaaacctacagcacatttgtttttgcacattctgattactgagatgttgtttaaaaattattgattataattaagaccaagcgagccaatttttgggatgaccaaaattgattcgaacttaaataaaatcttttttttatctgagcttatttgttattgggacatctaggagcacacctatatgtgtattgctctctgggcttggtacagtacctgcttcctctgctggcaaaggaagatagcaagatgaagttgagagagtgagacttcaaaccaaaagacctcgcttcttttttggatgtaacttcatttttaaattttatgatgtttttttttctctctcgaatacttttaaattgacgtgtgacgaaggtgttggtccaaggtaattaggtctccgtgcatttttttccatgtcttttttgctcctggttagccaagcgtggtgtcatgttagctgcaaattgtaaaaaatgtaaccgtcggagtaggagtcgagggagaccggactccgttgtgcttgttggaggggatgatggcgccattggaggggatgacaggtgtgtactgcgcgcgcatggccagcacacagcgcagtgagagcgccaactttatgctgaagagcataatgcctagaaactccaccttgaaccgtttcatcgagcagtttgcaaagctccagtttgatagagagagtgatgatgccaacgctgagaaggctaacaaacaggtattgtgtttaaatctaaaaaaaccttccttctcgattttgtaaaaattttgagcccacaatagttaacctgacaaaagaaatattgcatcgtgttgcagaagaggttgtggttgaagccaacgttccctgtagacggagaactaggggaatccacccagtacgttgtcaccggtcatgtggatggagttggtgctttgagggtaaggccgtgtttagttcacccctaactaccccaaacttctaaatttttatcacactatatcacatcacacataaacttccaacttttttttccaaatctttcaatttttcctaaactttcaactttttttttaggatctaaacacactaaggtacttcgatgcagcccgcaggaagtcatggtgcagagttgaatttgaggtacatgttgatatgtggagcagaagttttttttttttattttcaaccaatgtaatttatgaataaaaatgaaccacacaaatctataaggcatgtggcgcccattttcttccaatgctgatgtacattgcgtacaaacccagctgataccgtagacgggtgtctccccatgcttcggccgccccgcaagcgtgtcagcatccatcttagcttctggtcaaacattgctaattttggctcgacgttttgtggaatgctcagctccccctcgaacgcggcattgtccaggtaaaggatctaaagaaaaaaataaaacacggtggatgagtgatgaataacggtgcttgtttgtgttagcgattcatgacggcgccacgctgaacttacctgcaaaagcagtgagcatcccgccttgttcgccaccttatctttatgcttgatgtcgtgctgtgccttcggtgcaacgtcaataaggtggtcgatgacgtatttcgcccaattgtagttcttgatttcttccacattaaggagtgccccccagaagtcgttcgatccagatttgtgcgacatcttcggtgcaagaaacatgccgacaatccacacaacaaatgtggtcctaaaatggtcctgagcccaattgttcatggcgctgggaaatatcctcttaattacttcctcagcacccttcagtgcgttggactcgaagccaggagcactgatataatattgcacaaaagagtctttctccttttttgtgttgtgcggcattggacacacctccatgccctcaaatggaatgccaagcactctgttaacattcctaggactgattttcaactccaagtgtttcgatgaactcctgctggttgcccctcgagcttcccagccggctgtgttctgcaccggcaggtccgtgggtcccctgcgatggcaggatccccttacattgaatctgactcgagagcgtgtccagtgcctggagcccatgatacagttttagccctccgatccatcagtcatatgctgtggataggcaaaaagaaaaaaaatagtatgaattaaacacacagctacacaaatgcttatggattcacaggaaaaaaattgctaacgtgatggaaaaagaaacaaaaattaacaacaaagctacgcactgcttgtgcattttcacggaaaaaatacaaatgctaatgtgatgaaaaaagaaatgaacacatccatgcatgtgctggtactgtgcgtcgcggtatctgaatggactaatgtggcatcaggggatgggggtggaggggaaattcctgagtggtcttttacggtgcttggaaggtaccctaggtacctctttaacgaactgttatccaccgttaatcttcaaagggtaatttaggaacaaaaatttttattaacaagggtagcttagtaattacttaattctcaccccgtcgagtgcctaaccaatcggccatccacgatgtcatgcaggtggcgagcggctcacctcaatcgatcttcagaatatgtacgtagtgatcaaatagccaaattaggcgcagaaactagcaggggattggatgcgcagcgcagggcattgttgatttgtttttgctggcaaaatcgatcctcagaacctggaatacaactactggatgcatgaaggcctgacgacaaagaacgagcaaggaactagcagagcagacagcagcccggggattcgtgcggcggtggtgatggcgacctgctgctgcgtacctcagctgcgaccggcgggcgctacgggcgcgtgtgacggcggcggtgacggtatccggctgctgctttcgtacgctaggaccggagggcgtgtacagcggcggcgagcggcaggcttttacggcagcgacgacgaccaacaggtagttcatgtaggttcctctcgcacgcgttcttattcttcctctcttttttttcttcctcctgctgaaatgtttgtagcttctctcgcttttgcccttcaccgaaaaataatttaatgaaaatcaattaccattttaccctttcaccttacatacctagcccatacttttaaaacctttctccaggtactttctctctctatccgttagatcattgctgatcaagggtcctaattaattctaagcattgaagaagatcttacctgatggactcccttggacattcgtcggccggatactcgacgagaccggacggtgcgccgattccgccgacggaagatgcaatggagatgcggggcggcagccactacagcttccaggaggatgcgagtagtgcgtggggccggtggggcgggggacggcgccggtgggcggctggcgaccggcggcggtgggtgtgggttcggtcatggtggctctcagacgatggagagagatgaaaactggaaagggatagaatgtatcgaacggatatgtggcggaggatacatggggtcgtactccgtacacacgagctggtcccgcgtactacccttccacagggagtctgggaatcttacggtgggtcaggctgtatttgagcgagcaataaaaaaaaacaaataccatgctagcccatacatatactatctgatactgtaaaagtgtgcacgaatcttcaagccatcgtgtggttgtcagcctaggtgccgcagcacctaggtgctaaaaggactttccggtacaatgcaatgctgccctggtcgtatatctattgggcttgggcttctctgtttctgcccttttttttgacaaattgaccctattggaaaacttatttcgaaactaacccctgccaaaaacttcaaccaaaaataggccgtcgcctcagcgccaaacacattggcgctgagattggcagtgtcagcgccaacgggactggcgctgacattgtgccactgtggcggccgggccgatcccccagctgacgtggcagctacttcagcgccaacctgcctgacgctgaggtgggacttggccacaacgaccaaggtccagaccagcaagccttctggatggcttgcgggctgggacctcagcgccagccataatggcgctgaccgtgggaagctcagtgccaaccggcctggcgctgaggtgggacttggccgtttcggccatggcccagcccagcaagccttctggatggctgggctgggaactcagagccaggtgcactggcgctgaggttggacatgtcagcgccatttatcctggcattgaggtcccagccttgctaaactttagcaaaactttgcacacaacacaggcaaacatcaaatcacataaattcacaggcagtaatatatccagagaaccatacagaacatacatccatccatcaatcccaacatcattccatacatccatagaaccatgcatcaagtccatccatctatcgaaccatgcatcaagtccatccatctatccatccaaccatccatctatccatccatccattgaaccatgcactcacctcctcctacctctagtgcgaggacgaggcacgtcgggggtgtacctccagtcctgcgaaggagcccaccggcgtcgtggttgagacgggccgggctgcgagagatccggctgtgacgactctggtgcgtcctctagctgcgagggaccgagctcatccgcctcctcttcttcgtccccctcctcttcttcctcctcatccccttcttcctcctgatctccttcctccgcctctttgtcttgctcgccctcctcgtcacccacctccccttcttcatccccctcttggtgggcatgagcatgttcaaccacatcagtcgacctgcagccgagccttgctgccaacttccgacatcgctgccgtagtctctgcataaaaaataatccatgttaagttatcgcttttggaagaaaacaccgtaatttcatctctttccaacgattacctgtagggcgttgcggagggtgccgccctctccttcggagccaggagccgtgcctagcgccactcccgcatcgttgacggtccgcaagagctctcgagcctgtaggattgaaatgaagtaagtcacaacatatatggcattgaaatgaaataatatacaatattaatgctagaaactaaccactctgtcgcgaacaggtcccgtctcgaccgtggtacctagacgggtacgagtatcgtactcgttctgctcctcaacatcctcggggtcatccgctatgtcggctagtgtccaggccggacgtaggacaagacggtagggcctgtggagccacgccaagtacaagtcgaactccgtcccgttgtgctgaccctggtctggtactccattctcctcgaacttctcccattgcgtgatatgatcctgatggtagtaagcccaatcagtcaccttcttgttcttccgacggtcaaccctgcacgtatgcaaaatgtccaactcaaatatgtagtaaatgttgaagtgactgattgggcaagcaaaataaattgttaagtgaaattactaacttgtgtaggtcgatactcgtggagaaacggtgcgggattgtttgaagcctcccgaattgctgcatcacgcggtggcacatctggaactccactgcatagaagcagatcagtgggcaccgtagggtcttcaacgcatcctctatatggcacatgggattcagttctagctcgagcgcttcctgtgcctgatatggcatccacaccacctgcagcaacaaaaataaaacccattgaagcacatttagtactatatagtaagaaaccatcttcatgtgtgatagaaccccgaatagcttacatgttctggctgtaggtagtccatctcttttgtgtagtggtagtacgccaaattcctgcggcctactactggagatgggaccgattcccacaggtgagctacagagggacgtcggtctgcatcctggtgcggccaagcctgatgggtcctccacatgggccgaccaactggaagcctcatccacatccaaacctgcgtcacatacgttagcttccaacatgttagcaagaaattgaaatgttacgaaacataacatgcgtgaacttacctgtagcaaccaaacacagcatgctaggttcacgtccccgccttgccttcggcaagcatcacagagttgccgttacaaccaggctagggcagccgacccccagctgaaggtacccgcctcgtcccagtccgcgagcaacggcagccacatccaagaagccatgtctccaccagagtcagggaacagaatactgccgaagatgtatagcacatacgccctgcagtatcgctgtactgtagcctcgtctgcctcagcgggacactgaccgaagttggctcgcaaccaactcaaaggaacccctgatgtcttcgtctgcctctgaccatcaggtgccactggaggctccagaccaaggtactcctcgaccctctccctccagttccccgacgctgtgtcacctgtgaccggaaattaaatggaatcattagtaattgcaaaaaaattaacaaatgaataggaagactcattagtaattccccgatgctgtgtcacctgtgaccgcctgaccccggataggaagacccaggatcatggcgacgtcctccagagtgaccgtcagctccccgcacggtaggtggaaggtgtgtgtctctggacgccaccggtccactagggccgtcagagcagcggcgttgtacagaggcaccggtcgctgtgccatggtcacgaacgccaagagcttcgcccgctgtaggtacgggacgtaccagtcgtcgaatagtatgtgcgccgtgtgacctcttactcgaagggtcttcaagcgctgcatcaatagacaaacataataacataaagttagcgacaatatatcatatacaagggttgtggaaaatacatcatgcaactaggaactttaattttgggattgagcaagaaaactgaaaagaagatctgtgtgtttacatgttctgctttgaggctcttgaatcatgatctctctctctatgtacagtgtaaaaaaacaacaatatttcataactggttaattcggagtattcatttttctttctttcaaaaaattatccccttcagtcatagttgtttgatgtttatgacagaattcgattaaacttttaaaattatggaaaaaacttatcttaaacatcaaatatttatagttgtagtattattctgcatatgcacaaatgaacagggcaaagctagcaaatattaacaggatagcatatgcatatgcaacagcaacagggcattgggccaacttcaaatattttgtgtgtgttttatttgagatatctctatgatggatgatctatctgtacaaactaaaatcatagaagaaaaaataaattcgatcataaaaaaattccatattgttgatgctaacctctccgctggcaatctgtggggcccggtgcttctcctcgtagaaatcctccaaccccggaaagtgctccatcctgcaaatgaaaatggaatcattagtaattgaaaaaatattaaatggaaaaatcacaatgagaacggaaaggaggacaacagaaagtaaacattgaagcaacaatatgaacttaacaaatgaatgacatccaatcccacctgtgtgctaccctcaccacctccccccgtcctacggcgctttttcggtcgatccttagacatgtctcgcttcgggcacctagttttcttatggcctagttcgtggcatagcgagtatctattttgcatgaccggctctgaatttgtattgttcggcttttgtgaccgtcggttggctgagcctttgtatgctttgtccatgtcgttcttgaaccttcttgtccttcttcttcctcgtgtgttgttctttaacgacaagtcgggcacgaagaactctccatcataacttggccactgcgatggatctaggtaaggttcaaacctaggggagtacgagtcctgcacagccttattggaagcttcataacacattcggggggccacctccacatccaaacctcgcaacttacaaacggttatcatgtgggggcatggcaagtgatggagctgagggaactgacaactacatgtgttatctcgagcaaccacgacgtagtgacgtccaccccattgaaccccagccgccgtgactccgccttgctcgctgacctcatacttcatcgaagggaaatcaaaacatgctgctctttgccccaaggttcgtctttgttgctcctccaacatgtccttaacttttgtgggccacttctttccactcaggatatctacagttgcctctttgtgtctatcgacaaaccaactattgcacttcgaaaatgtgtatgccacaatagctgtaaccggcagtttccgaatgcctctcaatacattattgaaactctcggccatattactagtcatgatgctatggcgacgcccgttggtatcaaatgctcttgcccatttgaccttaagtggcatgtggtcttctagccacttctttggcctctctccgaccacacccatgaggcgttttatctcatctaggaaaaatgctttctcatttatttgacatatgcgctcaagatctttcatctgatcagtcgtagctccagctgtgtagaagttagcacagaagtgcctcatgcaccacctgtggtgaatggttaggtgatgaggcatgatgtggatgatggagttcaaaatgccagggtgtctatcagaaattatacacacttctctattaggaccgatcagcttgtttctcaacatgttgatgaaccactcccagttggatgtattctccttctctaccagagcaaacgccaagggaacaagatgtaacccggcgtcgacccctattgccgtgagcaatgtaccttggtatttaccggttaagaaagtgccatcaattgctagcaccggcctcaagtgcttgaatgcttctatggactggccaaatatccaatatgcacgtccaaatactcgtctctgtactccatccaccatcctggacttctcggggtgagcctcaacacggaaatgcatggtagggttctttgctttgatggcacgcatcagtgtaggcaagcgaacatacgcctcgtcccaatctccccaaatgaccttcatagcatcttgcttagcacgccatgctttgccatacgtaggccgatagtgctatatttgctcaactgcctcgacaatcgctgctggagataaagtaggttcagctcgcacaaatgcatgtaacctatttccaataaaccttgaagtaagttgcaaatgcttgccggttacttccgcactacagcatgtgtggtcttcgcccaccctagtcacccgccacctatctcctccactcttccttgcattaatctgccatttgcaatggcgatcgagacaagccacagtatactttactgacgcgttagattccttcacatggtacggccggtggacacggatagaataactctgtagccatattttcagatcatccatcgatcgaaactccaaccccttccttggttcatcacacattggttcgaaggcaccgtcatattgtggatccccatcagcaattgctagcccggatctggtaagattctcgaattgtgttatttccgggtttctacccaccagtttcgcaaacacagtcctttcatgctctgacatcttacgcactagacgatcatcatcggagtcggaagcggattcatccaattcatcctctgtatcatactccaaccagcctgggttcaatccactgcgtatcatagcctcctcacactcctctcgggtatagaatttcagcctagccaactcccttaggcccatacttacattcttagcattcgcttcttcctcaggcaactccacatcatctcctacctcccgaccatcctcaacatctccttcctctcttaccagcacattctcctccacattaactttctcccttaacggcacattatcctctgcatgtacttcctcccttaacggcacattctcctctgcatgtacttcctcccttaccgggtcattctcctccctgacctccacatccgccatatcatttactccctcgcccccctccacgtcttcctcaatcaatttttccttcctactacacctctccgacagttcgtgacagttaatgggtgattctatgagtagactttcattaaggtctataagttctttcttccctatcctaccatctttcttccatgcaaacacctcaagagatttgaaatgtgaccccaatactatatctatatatgtttgccattcgatctctccattcaagtctaacataaacttatgtgacatgacaccgccgcccacatcgtatctcccttgcataccaaccgactcgtcactccaatccaattcatgcttgatgcgagacattaactcctcaaaggtaggtttcacagaaaacactaattgtctaactgtcattccctcaaattggcttccatgtgtactttcatctaccacacaaccaccataatgaagccggaccaatctatccatctacaatttttaacccatgcataaaaattacttacttgaaaataatatgtaattaccattgcaataccaatacttcaaaagctaacaacatgtctaatttttccaataaataagtaccttactcaaatactacacattattgataaaaaaaactctactcctacaaattacctacccttcaccacacatcaacccctttcaaaccctctcaatcaccacaaatacatcccacatcctaggccatcaccacacatccatctcccatcaaaccctagtgcatcaccaaacattcatcccaaatatattttgtcaaatgtatcaacaacaaccaaatggataaagatatgccacctccacacttcatccccacccacattatccatctaataatccatccttagccaactattatcaaaccacgtctacaaccaaaacaatacaaaatatccaataaaactttggggaacttagggtttatagaggggtttaccttctcttccgatcccaaactcaatgccacacaaatcaccttcgattagagaggtttttgggggagattgggcgaggagaacgcggtggcgaccgaaccctaggcgggcggctggggaaaaacagaggactaactggctggggcggcctcggccgggctcaaagtagccaagatcagcgccaacgtacttggcgctgatgttgggcacctcagcgccgaagcggttggcgctgaggtagctgccacgtcagctgggggatcggcccggccgccacggtggcacaatgtcagcgccagtcccgttggcgctgacacggccaacctcagcgccaatgcgcttggcgctgagccgacggcctagttttagttgaagtttttagcaggggttagtttcgaaataagtttttgaaaagggtcaatttgtcaaaaaaacggctgtttctgcccaaaagctaccaattcgatcgtatgcagaaaagtttgtcgtcagttcaattccctggattccgatgttaaattcagaagcaaactataggctataggtagaaagatacaagatgcactgctgcagactatgtatgatccatcttacagatgagatgagatatgcgtgcgtatatatggtatgtctatgatgatgatggatgaacaattaatggtggaggaagaagaaggagatgatagtggtagtggctagggatgagaagaagaatgcggtggcgagggcttcttggacttgtagcgggcggcgagcagcaggtagagggcgaggttggcgaggctgatgagggcccagagccagaagtagtagtcgaggtgggccgtgtccaggtccggcgccagccagccgccggagccgtcgctcctcttggtgaccgccgccacgatggtgacgacgagcgagttgacgtagaagccgagggagagggcgaggaaggagaaagcggagcagatgctgcgcatggacccgggcgcctcgccgtagaagaactccagctgcgcgatgccgctgaacacgtcggatccagccagcaccacgaactgtggcacctgccacaagatgctcatcgaccgcttctcccctcgcagcctccgcctctccaccagagcagccgtcgccatggccaccaccaccagcacacgccccacgcccatccgctgcagctgcgtcagaccacccgagcgccaccacctcctcgccaccggcatcaccaccacgtcgtggagcagcacccacagcagcatgaacaccacctccaccgacaccagcgacgccaccggcacccggaacctccccccgaacaccctcgtgtccatggccatcccctgctggatgaaggtggtggtcatctgccccagcgacgccgcgtacagcacgcacgtcacccagatgggcactatccgcgccagcaccttcacgcgctccacctcgctcaccgtgcacacctcccacacgccgcccccgtccaccctcacggcggccttgtccagccaccgtaacccctcggtgtgcgccagcttctcatcatcgccgccgttcttgttcttgtcgtcgtcgacttcgtacaggccatcgccgtcggcgtcgggaggcagcgtccgggtcctgttcctgaaggcggccaccagcaccctgaggatggccttgatgggggtgtcccccgtggggaggcgcaccctgtagcagggcgtggctgccaggaacgccgccgacgcgatgagcaggcagagcgtggcgatgccgaagcccagcgcccacgacacgttctgctccacccacgatacaagcgtcccggccacgaagatgccgaggttgatggcgccgaagaaccagctgaagaaggattgcttcgtcttctccggggccggggcgccctcctgatcagtgtcgtggtcgtcgcgctcgtactgctctgccccgaaggggagcagcgcagacttgacgccgcctgttccgatggaggtgaggtagagcgcgaggaagaagacggagaactgggtcccggtggccggtgagcatgggacgccggtgcacggcgccgggcgcagggaggggacagcggcggagacggtgaggagcacaaggccctgcacaaggcccgccctggtacgttatccatctccatgctgcatgtatggatcggatcgagtatgaaagagcgaatgacttacggcgaggtagaagaggagggaggcgaggatggtcctgtactttccccagtaggagtcggcgaggaaagccccgatgacggggacgatgaaggtggtgccattccaggtgtcgacatgggcggcgttgaaggcgagggtgccgtgaaggacggtggccaggtacaccaccaggttcagcgccacgccggagaaggcgatgctctccagcagctcgaaccccaggatggtggccggcccaagcttccacttccacctcttcttcttctcatccctgcccctgctacgacttggtggactacccatcatattattcatgctcatgccgcccgccccggatctatcccctaccaccacctttctagctagtatctcatttcacgatacgaggcagcgaggtcgtaggctcgtagctaccaatatatggattctgtactaatcctcagctgctcctgctcgatcgtatatcatcatcaacaacaactgtccggtttaattagtttgattcgataccatcatcttcttcatcatcatcatacatatcgatatatatatatacactcgactccagactccagtactagtatatatgcgcgcgcgcgatgacaaagtcaaagcaccgcgctggctagctggagaaaactgtctatcgtcttaatctggcaggacatgaacctgattgagaatggaaagccgatatctaactcaactaattacaaaaatgctagctcgtgaatgataacaataaatagtaattcttttagcccgcgcaccattttaaacctattaagagatttaaaacatggcgatgagctcctttttacgctaatttatgtcacgtcgaacatgttttcagtatcaactaaagtggcgttgagaaattttagctgaacgccatcgggattgacggcgtttggaattagtttttgacatagtttatttttaaaaaacggtcaatttatcaaaattacggtagtcataactaaccgatacgtgtatgtgaagaattaagagaagcagccacaaccatccatgtatccagcttgccaaccaccacctccgttacatttttggataaagatcacctccagtacatgcgtatacatgtgcaacgatacaagatagcatagcaaagcaactactactccacacccacacagtggtcaattcatggtggtagttgagcgatccatccatcttgccatcccagctgcagctgcagctaacttggttaatttgcctttgcgtggctagattgcttcccttcaattcaagctatctatctatctatgtattgtatatagcagcaacctaacaacccaaaatgcatttcgatcgaaccaatttggcagcatggcactggcatgcggcttaattcaattaccagcagctgctaccacctgaaactatgaacaaccctttccctttcagactgaataatcgcgtccaactcccagagaaattaagctggcctacagctgactatatttatctacaattaatcctacttgtaaaataaataatactacgtctactgctctgttttaagtcatggggtaagacttgtagttaagatcgaataccactagtattagtatacgaggatagttagtcaggcacgttggattcggccagcagccaagcatcaggccaatagcaatatactccatagtactccagtagtgtatacacacagacgacgacccaaccgcactcagtcagtcagtagattaattgattgatcgatccatttgattagattaatgagggcagcaccgttcgctaggctcgatcgatcgactaaaactaatcacaggcaaggcaaagcacccaacttaatttgtcgttaggacttcttttctccaacgatctattctgacttcctactggagtaggactatacatcaaaaataaatttgcattggccgcttaattacattactagtggtagttaattataataattaaattgcttctctgaagtctggaactagaaacctcaatattattcaggggagagaccatgtgagccacgtgaagtgcaaacgtactctctactgtaatcacctgcttagttgcctaccaaaatatctcttagtcaactggaactgctggaattgaatggattaaaaaaaattgcacgtcgcatgcactagttgggattgaatctctacctctaaaattgatagaagttcatatgtccgtgtcgagcttgcttccgtacgtgtggaccgtgtgaaaatggcataacggagaacccaaattcatagtggctatgttcggcagccatataagctacagctactgcatcataaattcgctgtaaactacagcaattcttaactacttcctccgttcgattttaattttttatttgtactgtttgatcacttatcttattcaaaaaatttgtgtaaatataaaaaacgaaaagttatgcttaaagtattttggataataaagtaagccacaaataaaataaataaaaattttaaattttttttgaataagacgagtagtcaaacagtgcaagcaaaaagttaaaatcccttatattatacttcctccgtttcacaatgtaagtcattctagcatttcccacattcatattgacgctaatgagattcattagc

SEQ ID NO: 5765 - DNA, 1067 bp, Oryza sativa
aggagcacgcccagaagacggttaaggtattaagggaccgaatcgctcagctccaggattcaaactatgagctgagtggttcatcaaaaggtaatccctagatccgtttcatcggtttaaactggcataactgtatcctcaaccatctgaatttcaaacagcgcaagccgccaggatggaacagatggcgaagcaaattgaagccctggagagagacaagacagaactggctgcgcaaagggactcagccttaaaggaagttgaaggtaccgctagcagacaatctgagcttctctctttataatgcaataaatcctcatcataaatgtgttttgtagatcgcaaaataaaatcgcaagcccaatttgacgtcttggttggtaagatcaagaggcttgaaggagcaagggataacgtcgccaatgccgctgcaccaataatccaagccatgttcctcaataatggtggtccgagtgcactcgacgcaaccgaaatatttgacaagctgagtgttgctccgaaagtatatttcaagaatatcaagaaagctgaaagtatgggagctggcatggccttggcgatgacaaaatccttgtacccgagaattgaagtcgacaccattgatggatttgcagacgggacaagtgaagaagctgcccttgatcttatcagcagtgcgcaaaatgcggctgacaaaattgcgagcgatgttgtagagcaatttcgcaacaacgacctccagccgagtaatgaagactctgatgatgaaaggactgattctgactgagtttgaatgtaatacatggaggctcaatttgtacaatactggtgtatttacccaaaattttcaaaccggccaaattacccccctaagtcaatccggggtggttttggtttgacgtggcgcacacgtggcactagtttgattgatgtggcagtccaacatggaaataacaataataaaaatggtgggccctaccagtcaggcacctattctgattatacgagagagtgagagagggcagaaggggtgtgggcggcggagctcaaggctagagggtaccgag

SEQ ID NO: 5766 - DNA, 9420 bp, Oryza sativa
aatagcttaggtagcgtttgggctcactaaagtgcttcctttttcttatcttttagacttccactatgaattatttaacacccataaaagaactttccttgcatgattttctttattatgaaatcaacatttatattgacaaacctgcttagcttcagttggacaatgatacgctgcagtaaggcatctcattgaaggacattggtggattctgcactgctattctattacttaacttcagtagagaatatatttgcccttttgcttgacttcatatggtgttatatttctcattttagatggacattcgtctaatttatctgtaccgtgatctttttctgaaaatattctctgcaaagagaggtcatctgaagcattgttaaaaaacagtaagtagcaaaaaaaaatcatggtacaggagtcaatggtacgcagtagtgaaaacatagttaggagttgcatgttatgttgatttgctattccaaaacgtgtttgaactgtagcaggatgtttgttcctattaaaactagagcttttagccatgtattaccttttgtagcttccctgctgattacgttcgaagaaaacaaaaataatccttattgaaatatgcacattgtaaaacagtaaggggttcttatactgttttctttaattccacaatacagtaaaaagagtgagatcatatggcaacattctttgtgaaagcaacacatccatatctggatgtagtggttgccataatggagacaaggagctgttgaatgtagtattgcttgatgttaaaagtgggtcacaatttccagtgttggaatctaattcagtacatggcaatgaaatttcattgacctctgaaagtgaggtatcaaacttaaggttggtttctattcattcagggttttgactttcattcttctcatacaagtattttcctagaaaatcatgaaaaagcatggtgttttaaatagtggagtactaacattcctctctcaaaattcgctacaggtatactcccatggtacctcagatacatcatgttctaggtgttgaaactgaaagttgcattcattctggtgattcaaactttctggatcttgaatggctttcagcttcaggcaactcaagcgatgaaaggtgtttacttttgcattgctattgtatttttttagcgtttttgactgacagaatatcatcttctcagtgacagtcaatttgatttacacacattttctttgccttagtgtaggaaaaagtgaaggataattattagttgattatcctgtaaatttcttacccttcatgcttaattccatatcaatctattctagagttcttttgctctcactgcatttccatgtgataaacacaaatctgtagtatcgtgctgtaccacttgatataactatctgtattgagaagtaaaatggaaatattatgttgccacgcttcctaaatccaattaacaagtgtcttatgagcttccattgatactgatttgaaaatatcctccgaaacattttttttaaaactcatttaatgctgatggattgtgcttgaacaggtccattgcaattagtactccagatgtgaacctttcagcggagaatgttattgccacaatgtcttcttttgactggtagatttgtatgatcaaatatagttgtaccatcaccatggacacattactccgatcattatgtaaaactttattttcattttttatatgcattggtgcttcatctttagattgtaatgtgtaagagttttgttctcagtagaatctgtacaacgatgtatgcaaaattactcatcaacagcatcccctgcaaatgtattcgtgggttttttccttacataatcattgattcagcctgaaaacaaatgattagtctacagtaatcaaccaatctatgtgtaggtggcgcgccattggcgcgccccagcatctagtataatatgaagccgagcctactggcgagtcttaaaacaaaaaaaaaaagtacgatgagtgtgtaatagtttcagagaaacttagtaaagaatctatgtagcgtatgatgcgcatatctaacatggcaacaaaagctcagccaacaataattcaggctgtgtttagttcagcacaaagtttggattttcgttgaaattggagatgatgtgactgaaaaattgtgtgtttatgacatgttgatgtgatggaaaaggactgaagtttggatctaaactttagatctaaacaccccctcagccgctcacttgatcgaatgtccatgtggaagcgaataatggcgccacatatcaaaaaccgttgactccacaccaatcaagcctgtcaagctcatgcaccagattgtaatgcacatgtacgaaatcacctatatatatcgaaaaaaaaaacgcgtctgttaattagatggccggaggaatgtcagctgggaaaaatcacatgcccatgcttgtcagactgtgcagtggtgctctttcgcaatcaactatatataaatatttaagcaacaagtcaaattctaaaaaagaaatagtaaaatacacggccggtccttaaagttgagcgcgggtgtcacttaggtccataatcttgtaaattgcacatctaggcccaccatcttgtttaagtgactcattgaggtccaaaagacctctgaccgggttgactggcttacgtggcggtccagcgtggcaacatatttgcattttgccctcctttttgattccccgtgtccgatccaatcccttctttgcgtggcgcatgcaggaacgcgccgacggcaacgtgcgccagcacgcacacctgcggcacccacctgtctcaaccacgctgcgcccgctggcgtgcctcgtacccctctggcagccgctcgccggtgttgcgcagcgcccagagaaaccgcacaccgtcgtcgacgggaaggagaaggagcaggggaaggggaaggcccccgctctagccagccgtgggtgcacgcgacaagtggctgcggcagctgctcaagtcaagcttgccctgccgccccgctgccgccatggagctcgcacccgcccagctcgtgccgaactcgccgacgcctcccccacacacgcggccgcggtaggcgacccctccccccgggcatggccggcgacacctcccccgcgcgcgccaagctcaccgacgcctctagcaccaacgaccagcgggaagggagaccgatggatctggccgtcagtgaggcgtgagcgccaccggcacgctagctacgaagacagtgacggcgctccgcaagctctcctctagttccctccgccgcctgccaactgctgccacattcgcccgtcgctgctccgctcgcaccccgccgccgcgcttgccctccaccgttccgcccgccgcccattcgtcaagaaggatttgaggtccacgacggcgcggcgtcctgatcttcgagctcgtccgccgctcgcttcgtcccctctaatactgcgtcgttggcaatcatgcgtcgcttcgtcgaggtccacgatagcggcgacggaggacgctgatgttggcgaggcgaggccggagaacgtgacaagcgaggcggtgcagccgtggtgtgcgactaggcgccgcaacagctcagccatcggtatgacatggccagcgaaggggctgacgatgaggatgacgtgcggcggcggtgggcgatgtgacgacggaggcagctgagggatttgggggttctttttggtgcccagggctctactgaatgcaatgtagatggtcagcttcggtcaaaccgggtttggaccttaatgagtcacttaaacaaaatggtggacctagatgtgcaatttacaagattatgtacctaagtgacacccgcgcacaactttaaggaccggccgtgtattttactaaaaagaaatattaagcgacaagtgagacgtatattcacaacattcgacggttgcaacggggccaaattctacacggagctttgtattaatttttgggaacttttggagtagttgcctttcgtcgtgggtgctgctggctctcctcgaaattcaccaagcaaaatgtcaagaattacacgtgcagaggatcaggtccaaagggcagatgttactacggtatttgcccactatcagaagggacaagtgatgtatatgttaattctttaataattattagttagccttattagttagcctcatcgagtaatttttggtgatcatagtgccttggagatgtttttgtttgtcattgattaggatgatttaatttgtcgctccaatgttatgtgcccctacggatcaatctctctgtaattgtttttctgaatttgggtgcatctatcagtttatcatatcttcaacctcgatgtcatcaattttgtaatttttgtcgatggccatgatctcttccagtattgatgcacaaattagttgagaacagaaaaatgtttggaatgaatgaacaagcatgaattactaggctccactgtaccagtccaggtcaccaccgattgtcgaaactggatttcggcaataataaaagggggtggctatcaagctggaaaagtgtatgggtttggagacaaaggatttatacaggttcaggccttcttataaagaagtaataccctactcctgtccggggatgaatccgccgagtgtattattgattgtatgatttgggaaaaatcaacatctgcccctagaggcgcccggaccccccttatatatgggaaggagtccggattacaaaagataatctatattcctaacggaatatgaagatacaggtaaaatacagtcgtaaccgactaagtctcagggtgtttccttgatacacaagttaagaaacaaacccgagatacagataagatattctatctacattaagtatccggtacccaatccaaataccgtcgccgtgtagatatgggatacccataatctccacagtagcccccgagtcctttgcagtcgaccatcatagccttctcaaagatagtaatccgagtgcttcaaattattcatgccaaggcctgccgagtagcgaagacgaagactgtaaagggcgaaaagataaagaatatggtgcatcgaatagatgcacctaattaggtgtagcccccaactatgtgattagttaacaaactaaacatatagttgaaagacaaaataataacacaatttgtgcattatatgacaaaagcatacgcgacacctaaataggcatgctagccgactgctttttagccacaataaaagaaatccgagtggtgtacactctaaaaggttcacgaatgaacacacttgacaggcatccgaatataaaaactctaaagattacccaccaagtattataaagattatggtaataaataagtcaaatagcctaggccatgactatttaccatggaaacaggcatataacacgccaaggaaatgactataataaaaacaagtcattcctagttaacccaaacagcttttgtagcctaaaaaagcttgcaaaaacagcataacgcctttctgtcgggcacctttttaatttgcattgcaataattccaaagaattatatgaccgcataaaaaggatttgatcagcattgggcaacactgttgtgcgcataatattgccaaagcaaaatatgcctaagtccctaaggaacacaatgggccacgctgttaaaaatattgggctgaggtactgttcaggcctaggcccattcgtacctccgatacccttaactggaaaatccgatatccaagcgacgcttcgtcttccccgccggaactctcgccattttccccactccttgctacagtgcagaactgcgccggcgaactagggttcaccaatccacccaaatccaccttcgaaaagtacatcaaaatccttcccgtgatccaccgcctcaattcctcacctctcccaagccatccatcaaatcaaatcagcgcattcgggtaaaatcgatggcggaggagaaagaaagctttgaaggccaatgggcgccatccgacgtaacggaagagaacttgaaggagatggtggcgcacggcgttctcccagccaaggagatcattgggtggcggccagcgtgcggtgaggcttttccgacccctgatacacatgagatcgtggtcttctcgcatttcttctacggcggctttgctcttccgacctcaaaatttttccgcgggatcttgaatttctatggaatcagcttgcatcacctaaacccgaattccatagtgcatatcgccaatttcgtccatgtttgtgaagcctttttagggatcaaacctcactttgccctattccgccggatcttcttcctcaagccccaaccaaacaagaacaaaccgtgtgtagtcgggggggcaggattccaactaaggggaactctgagccaaaaatatttctcgatgcccttcaagacttcgaacaaaggatggcatgcaaactggttctatgttcagaatcccgagcctgctcttcccgggtacacttgtcttcctccagtgtaccaagatacttggaactctcttccaatcggagatgaagcagtacaagccttggagttgttggatcgtatgttaaatcttaaagaacaaggattacagggagagcaaatcactcggcacttcatcaaatgccgactggcgccaatcaaggaaagatcccgcacagcattcgagttcgacggcaaacatgatcccaaccgtgaagaaccagactccctggatttcaaaatcatgaaggagaggatgtataaaatcttctcaaatgcaattgtagtcagctactctcaccaactgccagttgtgccatataatgcattcaatccgcctccacaggtatgcatcggaaaccctcaaaccgtgatcagaacataattttatcttcatgctgagttgactaactatggaggcatcttgttcaggaatatgcattgatgaagtcagatccaccagtcactcatcgccggtctcctcgccaacacaccgctcagggaggtggagggccaacgatcagaccagatccgcaacctcagacctccaaattgactggtcaaacaggtcctcgcaagagaaagctggtacttgatgatgatgaaggcgacgatgataaatctggggataagggctcgcctaataaacccccaaagcgtaccatgcccaggaaaaaactggctggccgtgcaatgccaaagatcagaacatcttccaggtatcagacctctcagtatgattccgcttcggaatgttttccgatgaaaataatgctgaatattgaaagaacactctgcaggaaaccatctgatatagatccatctgggaaagaccccgatcctgccatgacagagcaaaatatatccaaggaccccgagccgactgctgaaaaccagccgactgctgaaagccagccgactggcgcccatacttcgggcgataggaccaatccgagtgacctgccgccgactggaaaccagtcggcaacaactgaaacggcaacaactcaagagcccccgactggaaatcagtcggatgcaggtcctgatcaagagatccccgaagtagaagcgcagacgacgacttcgcaaggaccagaggctggtaacgactcgataatcgggtctccaaataaagaacaaagatcacctcacgctcagctaggtacatcttcaggttagttgtcttctcaaacaatggcgatttaaataacctcagtttatccgtctaacgtcttggaaacacatcaggaccatcaggtgatgacggagaggaaatccctcgcataaaggcaaccgacgactctcgtcctcctatcttgatcaaatggtgggacgagaactcacaagccgccggtatagtcataaaccgtcaaaaagaagatgaagaagtgtgccagctgaagaaagcgctcggagaagccactcgtattgtaaatgtaagtcctccgggtgacggccttcggtaactttgttttctttttagcagaacctaaccgtgaaccactatgcagagaatccatcttcgcaatgaggccaaaaccgcaactttagaaaggctggttcctcatttgggaactcttgaagcggttagggaccagctacatgaggccaaggagcacgccaagaagacggagaaggaattaagggaccgaatcgctcagctccaggattcaaactatgagctgagtggttcatcaaaaggtaatccctagatccgtttcatcggtttaaactggcataactgtatcctcaaccatctgaatttcaaacagcgcaagccggcaggatggaacagatggcgaagcaaattgaagccctggagagagacaagacagaactggctgcgcaaagggactcagccttaaaggaagttgaaggtaccgctagcagacaatctgagcttctctctttataatgcaataaatcctcatcataaatgtgttttgtagatcgcaaaataaaatcgcaagcccaatttgacgtcttggttggtaagatcaagaggcttgaaggagcaagggataacgtcgccaatgccgctgcaccaattatccaagccatgttcctcaataatggtggtccgagtgcactcgacgcaaccgaaatatttgacaagctgagtgttgctccggaagtatatttcaagaatatcaagaaagctggaagtatgggagctggcatggccttggcgatgacaaaatccttgtacccgagaattgaagtcgacaccattgatggatttgcagacgggacaagtgaagaagctgcccttgatcttatcagcagtgcgcaaaatgcggctgacaaaattgcgagcgatgttgtagagcaatttcgcaacaacgacctccagccgagtaatgaagactctgatgatgaaaggactgattctgactgagtttgaatgtaatacatggaggctcaatttgtacaatactggtgtatttatgctgtgcttgatgattcttgcgaagtttttgatttcttaaaagtttttgctaagctttgttgagcctaaaacccaaggaagctattaaaaactttcagtcctcgcaaactaagtagaaaaaccaaacaaggcaatgataaaccaagtaagcaaactgaattgataaaaaatcacactccattattatgatgatagcccccgactgacaacttcaaggagaaaacttgatgtttgacagtcaaaatagggaaatacaatgataaagttaagcgtagaaacgacgaagatgttcaatgttccaagaattgtcgacgagagtgccgtcttcgcgcttgagtcgatatgaacctggccgggtaacttcagagataataaatggcccttcccatagaggagataacttgtgccgatctcgtgtggtttgaattttccgtaaaaccaggtcgccgactagaaagg

SEQ ID NO: 5767 - DNA, 1172 bp, Oryza sativa
cacatttatgatgaggatttattgcattataaagagagaagctcagattgtctgctagcggtaccttcaacttcctttaaggctgagtccctttgcgcagccagttctgtcttgtctctctccagggcttcaatttgcttcgccatctgttccatcctggcggcttgcgctgtttgaaattcagatggttgaggatacagttatgccagtttaaaccgatgaaacggatctagggattaccttttgatgaaccactcagctcatagtttgaatcctggagctgagcgattcggtcccttaattccttctccgtcttcttggcgtgctccttggcctcatgtagctggtccctaaccgcttcaagagttcccaaatgaggaaccagcctttctaaagttgcggttttggcctcattgcgaagatggattctctgcatagtggttcacggttaggttctgctaaaaagaaaacaaagttaccgaaggccgtcacccggaggacttacatttacaatacgagtggcttctccgagcgctttcttcagctggcacacttcttcatcttctttttgacggtttatgactataccgccggcttgtgagttctcgtcccaccatttgatcaagataggaggacgagagtcgtcggttgcctttatgcgagggatttcctctccgtcatcacctgatggtcctgatgtgtttccaagacgttagacggataaactgaggttatttaaatcgccattgtttgagaagacaactaacctgaagatgtacctagctgagcgtgaggtgatctttgttctttatttggagacccgattatcgagtcgttaccagcctctggtccttgcgaagtcgtcgtctgcgcttctacttcggggatctcttgatcaggacctgcatccgactgatttccagtcgggggctcttgagttgttgccgtttcagttgttgccgactggtttccagtcggcggcaggtcactcggattggtcctatcgcccgaagtatgggcgccagtcggctggctttcagcagtcggtggttttcagcagtcggctcggggtccttggatatattttgctctgtcatggcaggatcgcggtctttcccagatggatctatatcagatggtttcctgcagagtgttctttcaatattcagcat

SEQ ID NO: 5768 - DNA, 5571 bp, Oryza sativa
taaatatgattgatacattataggttatcccggtatatatggatcaatagtatggaccctatatataagcatacttatacgatgatataatctacatccattattttttttcatgatttgtcaaatctccaatgccatgcaaagtaccaagatttgtgaactgataaccgatatatagtgatataatttatattgtcatattttccataattttcatatccgtttgcattggattacatgaaaggaataaaaatgctatctaaaatataatttccctttacaagttgaaatatagtaaatatacataataaattattaatttaatggtaaataatataattatgtaaactttgttttaaaatgcggtaaagctaattgagttatgcttgtttgtaaagtgatttaaacaatttgctatatctgatagatgtttgtgttttttagactttctaggattttccctaatttattagagcatagttcatagaagtttaatagacttttattatataattgaggctctttgatggtacacaaaagcaaagtataggtccgcatgtctttttttcaaaatatacatggtttttcattgttgttattttggctatgcatatttatgaagttctatacttaataatctacacggtaaattttgttttgtatacttttatgagtaattggatggtgtaaaaaagagcaataatctaagttaacatgttagtctttttcacaacatatgcgggtattaaaattgttggtttaattgccaggaatacaacttttgaattagcctttttaatataataatccaatgagagaatttgtcggccgaacgtattaatcttttttgacacacaacacgtacatacgaactactccctccgttttaaaatgtttgacatcgttaactttttagtacgtgtttgaccattcgtcttattcaaaaaatttatgtaattatttgttcttttcatatcatttgattcattgttaaatatactttaatatacacatatagttttacatattttacaaatttatttaataagatgaacggtcaaacatgtgctaaaaagtcaacggtatgaaacattttgaaacggagggagtatgtatttacgtattagagatcggatgagtgatttgccggattgatcaggaggagtgattattagcaggatgttattttttttctcaaacttttaggattggaggctttgtttttctaacaaaagatagattttatggtctaaataatatgtctaccaatttaagtgaaaattgatggaaaaatacttttattaataaatgtagtctaaaataatgggcacataatataatataatgggtctaaactttattttcaagtattatagagctaatttatctatatatgtttgtgaagagttctatgctgatatattgaatgctcgtaaggtaactattatttaaaatttattatcactgataataattattattggctcatatacatacatggaaaaagaaaaaaaagaaggtcaaatacgtacgtacgttcatactgaacggaaggaaggaatagtgagatatgtaagggaggaggaggttggtgggtcatctgtttgttttaagagatctaatctaacggtttataatattggacccaccgatttaagtgaaaatcgatggatagatgttttattttttttctcagtttttttatgattttctctaatttattagagcgccaagtggcggcttgagagcgtttcgagaaagtttaatggacttttagtatataatagataatagatagatagaagatagatagatagatagatagataatagattttcagctacaagttgttactaccaagtggcatttttctaaagaaaatcccttgagtattttggtttctcattaccggtgaaagctagctagagcccagcaccaccagtttatcgaatatacgcagtgtatttgtgtttgaacatgctattaatttctttgttaattgtattgatcgtgatcaggggtaccgtaagggttaccggcagtagggtttgataaattatacccaaattcaaaattccgaaaaaaattatggatatagttcttgatttgtagtggtagatggtgaagaaatgttttgaaaaggagtaagataagttcaaatttgagagcgaaaccgaaagtacattagattgttgttgaattgcttcgaaatccataatatagaaaatgttatgctgaatttttgtattttacacctaaaagttaggtttacaaatatcctatatattcttttatttatacccaatttctagacacatttaagtgatttttcaattttttgctagacacttgacgataactgcgcaaatattgcggttaccgcgagaaaccacgctgaaaccgttgatttttgaattcaaatatttgaagacggattttacacggttttatacggttaccatggtaactccctttaatatcaaattctttgagatactgttcataataagcttctagtatttcaattacagaacggaggtattataattctgacacgttcgtatggcgcactacggacaaaaattcattgccatgaattaaaataacaaaaataataattttattatcatctctcgctctttcatctctatcaaggcatgtttagtattccggtgaacaatcctggtggtgaaaccactttttagtcgtagtattttaccgtttgactatctgacttgatgtttgtaaagatcggtaaaattcacatttaaaatcactttggtcaacaggctttgcatgcatgcagatgtagttgttcttaaccttcctcgccttaccttgttagattttaatgtgatctgccagacagagttactgattaagttccacaactacttcttccgtggcagatgaaaaaaataatcacaggatagcacaacaatcgcaatctggcccttgcattgttatactttttatttcgaataactaattaaattatcgtgctttaccaccaagagaaaaagcaatcactcaccacaggtttgagagtataagcgcagtccattgagattctttttctcagtgaaatttcatacaaatgtagccatttcgttaaaaccgtaattttgttacaactttagcctatcatgttgcaaatttcgatcagtagcgagcaattttatcactacactgcaaatctgcacactgtttgtgtggctacgaggcatgatcaatgagatcaacaaaattagtgttatgtcaaatgtaaggtacaatttacaggattacatttcacaaacttttaatgatcgtgataaaggccgatgttaatattgtaatactgtgaaatagaggtatgtcaaacgtaagggaagaagaataattgtaattcagtttacttgtgttgacaaacgctatatatgctacatttgttaagaggcatatatatgtctcacaaaattacatttcatagaatgttagggtgccatcgtttggtatattggtggaataagccaaatggcatatttgcaaacgaaaagtaatttgtgaataaaacttttatattgtgttcttagtgatctaaaagcaaaggctgaaaaataaactttgatgaaaaaaccccaaaatcagctccaaatttaacgttgaaaattcaaattttggctgataagcatatgaatatgccaaacgatgaggatatcttagttaattaaaattataatgcaattatcacttatactttattttaaaaaaaatcttgaatgagagtacagtgataactgatacattggaggaagaaattaaataatcacatatcctatatccaaacaaaagcaactcccaaaactaatcaattattaaaagaaactagctagcaaacaacgtactagattattacacgagactaaatcaactaaagacttttacaaattgtcgatcgattccctcaaaatgtaacacagatttcgcagtaacatttggcaaatatgccatgtttcatgcacttgtgacgcttgactctgcctttattgtatttcgcctcaagccaacagtccaacttgcacgtaggacccacgcagacgatcagcttgccaatggctttgtagcaataatctacaaagagaaagaactcattagatgctagcttataaaataatctagcttatcatttattaaatcacatgaaacattaattgtaaactgtcccctataatctcatcactgacagatatctatagagaaccgctcaagaaaacaaataaaattcagagcatatagaacgcatgcagtttcttcgaaagatgaaatcaaatgggttgagggagaattaagatgaacctgtggcagaagcaggacctccaagtgctaacacaagcagtaagatgcagcaaacaacactggcttttctcgcttccatagctgatttaccgatcgatggagacttaattggcaagggagaaatgattagatcgatataaccctaaatgcactctagctaggaatgaaatctagctactttgtgatgctaatgagtgtggatgtacctatatttatagggaggatcggctatctaatgagaatgcaggagcggcccttttcagcagccgggataatcgactggatcgatctggtcaatccatctatccctataacgtaggcgcattcgcatgttaatttctactgccgcgagtacactttcagcctgcacgccgataattatattttgatgtttaattaccacggctattgaccagttaatccaggaaaaaacaaattaatgcgcatgcatatgcgcctaaatagtttgaggaccaaaagaacttctgcatacatgcaaattaaagcgtgcgatcagtttgagggtttcgcgtgattacagttaggctgctttactaaatattaagaaaatacattcattctattatactgaaaaaattccaaagataaagtgaaattttctagtatttgatatgggtgcggcttccctgtcccgatacgcttgttcctggcgacgtgtcatcttctcattcgccgagttttttctggtaggccagtacgcatgcgcttctctttcacttaaacggcgtcaacgtctccgttcttttttcccacaacggcgtaacatatcccttccctcccccaacagaaggtatcatatacattattaattcctctctctccatgccgctgatctactattactacaacaaaataaaaattccccaccttgacctagatgaactccgccagattccgccgctttacgggtgagctcgagcaccgcttgcccgagcagtcgattgtctcgagctcgccaccactgatcaagcgccttgccgctgagttggagctgatgcatggttcagctcgtgcaaattaatcaatgtccagctgcatcaaagtgcatgagcttggatctagaaggtccatgatgtgatcgatgctaacatcgtccaaatctagatcacttctgattctcaagaacttctctatatcttctgccaatttttcaacacaattagtagacatggagtatgtttcttcagattttgcagctgtagaagctattcg

SEQ ID NO: 5769 - DNA, 12046 bp, Oryza sativa
cgacgaggctacggagcacgagagatcacgggaaagagggcaaacgaaagaggaggactagggggtcctatttatagccttggattgaagagatcggactcctcccgcaagaaatcgatccgggaaatcaaaaactcggttttggagataaactcaaaaacgagttcgattcggataaaatactcaacggtttgctccgattcttgggggtaaagatagaggaggataagaggagtatttcccctcaactaattttggaaatacacgagataaaaggccggatttggaggggaaaaccgcggctatacaggtactgtgcggctggctcgggctctgtctccagccggctggagattgaagatgacactgtagcagggaggcaaactagactttttgctgggcttctacttcttggcccgattgaaaaagggacacaaagcagactttggaggagggataaggccagccgaaaggaagggagaatgggccgaggacagaagctgaacttttcctatttcggcccgaaaaggagaaggggattttaaatacttttccaattaaattaatcactgaaatgatctttgaattgttaaaaatacttcctatgctcaaataattccaagaaaaatcttgaaaatacttggacacgcaaagtacttaacaaaattataattagaccatttaatgattaatttaatatgtgggtaattactgaaatgctctttgtaagattaaaaattaggaattgagctccgaaaaatccgagaatattccagagagtataattaaccatggagaatttaataaaaattaaatccatccatgctttaaatttaggaaattttattttccacatttaacttcacttgtaaattaatgaacatttaatataaattctattattaatttattaaataatttataaatcctgaaacgaaaatcaggatgtgacaacaaccaactaaaagatcacttctgcaaattattaataaaactcctacaattacaatagaacataacataatatcttgtcttcagtggtactaaacattcttacaaagttggcacaaacatttgatcttgtaaccttttcccaagcacttgtgagactggactttggctttgttgactttggcgaaaaaccagcagtcgaacttgcaagtgaaaccggcacagatcggcgacacggaaacttcataccagcaccattgttctacaaaattaatttagccagtgaacttacaataatctcacttggttgatgatcttaatcacacaaaacattggaaaatagaacctataataatctcttttatccttacttatagtggtgaatccttactcatagtggtgaatccataacagttttacagctagcataggcataacatagttaattataccatagctagtatattctataaaacttctatcttcgggccttccaattatatagaattttaatgtaccaactaccgatgacatcaggcggccgccccgggccggggtctcggggcattagatttgccgttgcttagtcatcacataagaaataaaaattaaattaagatttcagtttctacatacaattgaataatagataatacatatgaaatgatactcgaacacaatacattggagagggatagagaagggaggtcaaggagcatgaagaactaaccagcataagcatgttgcgcaagtgttgacagaagaagtaccaaaaccaagcaaattccagcttttctctcacccatggctcgttaattggctgtgagagagctaacggctaatactaagacctcggctttaaagtttcaagctcctctgtcacacaagagagtgatgaggtttaactgtatgatgatgtgtatttatagggagaataatccaactgaagaagatgtaggttgtaatgcaacgtaaatcatgcgaggataagtaacagcatttgactgactgagtgtgagaggaagttaattagataggagaatccatgcaggcatgcttggccctgttcagctggaagaaagaactacattgcatgcaagattacgtctatgtatagatcgagagaataataaaactgaagatgctgaaatgcaacgtgaatctttgaagaactacattgcatgcaagattacgtctatgtatagatcgagagaataataaaactgaagatgctgaaatgcaacgtgaatctttgaagaaatgcaacgtgaatctttgaagggttaagtagcaacatctacaaagactgagtgatcctttttcttttttgggaggggttgttattcctcataagtaaattaattatattattattaatctttgggttagtataaaaattaatgagaaaattaaatatgttttattaaataaatgaccttgccgcacatccatatataagggtgctcccaatacctgctcaaagagacataaactagcggtttcaatattttgtactgccactttgcaggcaaccacgcaaaataaagttcaccgtatttcagcaaaggtaatcatgaatcgaatagcgcatgcaaaagttgagtgtccttccacaaaatttaccctatatatgctagttaaatcccagagatttttcttcctactagcagctagcaaaattatccattcattgacacgcaaaattaaacaaagagatcgtcgtcttatactagctagcatgtacatgtctagatctaattctgttatcgaaagaatttatgatcagcttagtcttcggctccgcctcctccaagctcagtcaagctctgaccaaaggtgaggccataattaaactcctccggcatgcttgtcctatttcattaatactttttttttgaacgaatgtattgcataaatactcacgatgcaaattatttatggaaattaatttattggtttggatttgtattttgtttttgttgttctgggagggtgtgtgagctcggtagtgtttggttgttgtgagattatttcgttattaaattctacagggaaagatgttttgtgttccttaatttgaagttccagtaccctgtaccgttgtcattcttgactaatcactcatgtgcatatatattgtgaaaacatgtctaggaattaaatcgcattcctttctgaaacaagaaactgaaaacagggaaaagtagttcaagccagacgtacttgttggatacattttctgaacattatgttgtctcgcactgttttatcttcttgacagagaactataccagattgatccatctatgatgacctatcagtaacgggccaaagtgtctcatcacaggtgaacgcatttgtgatgggttcaattggagcccattctagatgtggcccatcacacataaggggccagttgtggcaggccagtatgtgcacccgacacatagcacgtttgacatgctcacctatagacccatcatagatgacccttttacctgtgaaggtacaaaaaaatataaaccgtcacaagtgaggacactcctcgtatatgggtatattcttttacccatcatagctctttctctctctcccatcgaaagaaatcgaagacaccactaagtccttatccacacatctctctcccttctttttatctcagcaaccaatcaaccatagctctccctccccagctgagcaccccctgagtggcccccatgtcctctcgggccccgagcgccagaggccgcttcctccacccaagcgacgaccgtcgccgtcgccgtcgtcacatcgacctcgagtgtcagcgagctcgcttctccgcatttgagctccatccgtcaccgccataacgtcctcatcacgtcgacccccaagcaccggcaagcttgcctatctgccctgagctttggctggtactgtcgtcatctcctcatatcgtccattcccaagcttcggctgttgcctcctctacccttcgccctaaggttgtcagcggccgcctctccgctgccaacaaacaatgggacgccagatctggtatccaacaagttggagaccaccggatctaaattccctagagcttcggccgccacctcctccaccctctcctgcatggtagccattgtctgcctcttcaccgcctccgagctacgagacaccagatttggtctccaggaggttggggaccactggatctgaacgcccctaagctctagccgcctcctcctccatcctccgctccaagatcatcggtggccacctgatgaaggcatcactcctttggatacacatgctactcctcatgttgttttgtaaggtccaatcactagagctcgtgcccgacaattaaatttacaagtgagctcgttcctaagtacttctttatgtgctcttgaggatagattgctacctaatgatttaattatgattaggaactatagagacaaccatggagcacttggagagaggttaggagatggacaagatcatcatggacgttcaagacaagatgaaggtccacttcgggctccaggagcagtccacactaaattcatcatccaggttgtatttggactccgatttcgacgttctacatatgtatggaaagctaacgagaccacctttccaatggatctgatcccacgtcaaaattccttccgaatcaatgggaatcttcaaaacaaaaaggcattcagaatctatcaggtgctatgtccccgtctttgggcccattgggccgtgtgtcgtctcggagtctaatagggaggcgtacaggggtctaaggtcgaccctagaacctatatattcagtagttatcattgagttagggttgtgttttgcttagattatttctgccttcgcagtttcgctgctagattggtttgtgaaaccccaacgtcgagttcttaaataatcattcatttgcaattaagttgttgtttttcttgttcttacttgtgttctttgattcacacgcagggattagccttctcggcaaggtcaatcggttttagcatggctgataatcagagaagacgtgctactacgattgtagggtttggatcatgttgatcggaagttggatcgtgtgtgtcaagtttccaccaaatcgatagttatcttcacctgaaggaagatcgggaatcccataatcccgttgccatcaccgcctctctgcctttaccccaaggtccatcctagagtgtgcaccaccgcggcctctgcctcttctccggtctcctcaggattgtcatgtcgttcttcggagtctcaagtcatcgaggcaacaaggattttgcaagtattttttttgtgtttgtgtcatgttttggatcttgcaagttttgatgccaattttctgattgagttgtgttctttttgaagcccactgatttgtgctgctggggtttggagaggcagatggctgattatagaagaagagtcgggtcatttgtttcttgtagaaagagttagtctgaagtaaaatgttttgggttaataaccatagatatattactgttaatacacattttgcttcctgttgcaaccgagcatcattttagtttttatttttttaactgggtttttcacacctgtaattgtgatgggtcacaagttattcttcactcttattcttttatctttttgttgggttacactcatcactgatgggccacaacttatgagacgatcgagattgagtcatctgtgacaagttctatacagtcaccatcgacgggccttcacccgtcagagatgagatcagtcatcactgacccctaatttctacgagagctaaactcgtaagaggtgatggtatgggtgcatcggtgtggagattatgggtatcccatatctacacggcgacggtatttggattgggtaccggatacttaatgtagatagaatatcttatctgtatctcgggtttgtttcttaacttgtgtatcaaggaaacaccctgagacttagtcggttacgactgtattttacctgtatcttcatattccgttaggaatatagattatcttttgtaatccggactccttcccatatataaggggggtccgggcgcctctaggggcagatgttgatttttcccaaatcatacaatcaataatacactcggggattcatccccggacaggagtagggtattacttctttataagaaggcctgaacctgtataaatcctttgtctccaaacccatacacttttccagcttgatagccacccccttttattattgccgaaatccagtttcgacagttggcgcgccaggtaggggtagcgtcaagcttttcgccgatcagtgcaatgggtcctttctccggcatcgacgacctcgtcttcccacccgggcagacgtttcggttcggcagcctcgacttcgtcaccaacaacttcggcaagatttctctccttgactcggaatcagaccagtcgggagagaaccggctttcggtcccgtttggattcccgaacgcggctgaaagctacttcaagaccatctcaaccgagtcggcttcaaaccactcggccgagatcgcatcttctccgacgacaccagatcaagatgatgggacttacccaccagtcctgatgaagctccccgacgatttagcggccgtcttcaccacgacagcgtcttcatcccgtaggcctaggcagaagtcggcttcaacaccgatttcgcctagcttcagggaagtcggcgtcatcctccaaccactcggcacggtttcgacggatcagctagatgactacaacagctctcccaccgtcgactcacgtcctactgacatcgtggagtacgacgaatttagctctcgctacaacgacttcgacgactacgacgacttcgacggaagcctagatgacaactacacccctctctactttggcgttttcatggccaataatgagacggaggagcaacgccaagtccgggagaccgaagaacgtcgccgactggaagaggagcatcaagcacaagaacaagaacggctacggcgtgagcagcaggaccgtgagcggaccgcgaaggaggctgaggatcgacgtcagcgagctttggaagcagggcgccgagcgcgtgatctcatcggccaacaagacgtcgaagggacaccggttttccgcacccctcaacagaatgcggttgccgcgatcactcttctcgacaccctcctcaaccaaaacgagctcaatcgatccgaccacgtcgtcaacatcttgaaccagacgaagaccatgattgcggcctcggtcccagttaactccgaaagcgtccacacgccgactggcagccgagttccccacttccgatctcatgactaccgtcatccaagcctcagcatcaccggcgcaggatccaaccgcaggagcaggggtcacgacgagcggtctgttcactcacctcccgaccttcatagggagcgccgagtggaacggcctcgctcaccacctcgtcgccgccccatcgatcttcgcgacacaatcatacagcgccgagcagctcgaggctaccatcactcaccggaccgccacgacgacgaccttgacggagtagcagccttcaccgacgacctgcgtcgagtggattggccagccggcttcaaaccgactggaatagagaagtatgacggcaccactaaccccgaatcgtggcttaccgtctacggtctcgcaatccgcgcagcaggaggagacaacaaggccatggcgaactatttaccggtggctttagcagattccgcccgatcttggctccatggattgccccgtggtacgatcggatcttgggctgaattacgcgaccacttcatcgccaacttccaaggcaccttcgagcgtcctggcacacaatatgatctttacaacgttatccagaaatccggagaatcccttcgagaatatatccgacgattttctgaacaacgtaacaagatctccgacatcaccgacgacgtcatcatcgccgcattcaccaaagggattcgccacgaagaattggtcggcaaatttgggcgcaaacctcccagaacagtcaagctcatgtttgaaaaagccaacgagtacgccaaagccgaagacgccgtcaccgcatcgaagcagtcgggtcccagttggaagccgaaaaatacgccggctacgggaggaggtggaagtaacaatcataaggaccgcaagcgtaagcctgaggaacttgttgcaaccgccgctcactcttctcgacagcgttcgcgcgtcaacaccttcgacaagatcatgaactcccaatgcccgcatcatccaaactccaaccacgtggccaaagagtgcttcatctacaagcagttcgcggagcagtataccaagcctgctcggaagaactccgacgaggaacaaagcacgtcaaggaagaaggacgacggcgacaccccggctggatttcaagaccaccgcaaggagctcaaccatatcttcggcggccccttggcttatgagtctaaacggaagcagaagttgactgaacgggagatcaatgctgttcagcccgacacgccccagtatcttcgatggtcagagattgcaatcaagtttgaccgctcggatcatcctgaccgagtggtccacccggggcgggtaccccctggtactagacccagtggtccgtaatgtcaagcttcgcagaaccctcattgatggtggcagtgcactcaatatcctcttcgccaagactttggatgatatgcagatccctcgctccgagttaaaaccaagcaatgcgccttttcatggagtaattccaggattatccgcaactccactcggccagatcactctcccggtcacttttggcactcgggaaaacttccgcacagagaatatcagctttgaagttgccgatttcgagacagcataccatgccatactcggacgcccggcgttagccaagttcatggccgtcccgcactacacatacatgatgatgaagatgcctggtccccgaggagtcctaaccctacggagcgacatcaagcaagctgtcacatgcgacaaggagagttgcgacatggcccaaacccgcgagatggcgtctgcccgagaggaaatccgactggctgcaaccacggtgagcgaaggagaagtgcccgctgccaagatttcaaaaagtggagaaaccgaagccgagactaaaaagattcccttagatccttctgatcctaccaaaactgctgtaataggcgccgagttagattgtaaataggaaagcgcgctcatcacctttcttcaaaataataaagatatctttgcgtggaaaccttcggatatgcccggtattcccagagaggtgattgagcactccttacatgtcaaagaagacgccaagcctattaaacaacgactccgccgatttgcacaagacaggaaggacgcgatcaaggaggagttaaccaagctgttagcagcaggcttcatcaaagaagtccttcatcccgactggctggcaaacccggttctagttcggaagaaaacagggcaatggcgcatgtgtgttgattataccgacctcaacaagtcttgtcccaaagatccttttgggttgcctcgcattgaccaggtagttgactcaaccgccggctgtgagcttctcagttttttggactgctactcggggtatcatcagatccgactgaaggaatccgactgcttgaagacttcattcatcacgccttttggtgcatactgctacgtcaccatgccgtttggattaaaaaatgcaggagcaacttatcaacgtatgattcagagatgcttctcaacacaaattggccgcaacgttgaagcctatgtggatgatgtagtcgtcaagaccaaacaaaaggatgatttgatctcggatctagaagaaacctttgcgagcatccgtgctttcaggatgaaattgaaccctgaaaagtgcaccttcggagtaccgtcagggaagctgcttggttttatggtgtctcataggggcatccaagccaacccggagaaagttactgctatcctcaacatgaaaccgccaagcacccagaaggatgttcagaagctgactggatgcatggcggcgctcagccgattcgtttcaagacttggcgagcgggggatgcccttcttcaagctactgaagaaaacagataatttccaatggggacccgaagcacagaaggccttcgaagatttcaaacaactcctcaccaagccaccggtcttagcttcaccacacccgcaggagccgttgttgctgtatgtatcagccacctcccaggtcgtgagcacagtcttggttgtcgagcgtgaggaagaaggtcatgtccagaaagttcagcgaccaatctacttcgtcagcgaggtcctggccgactccaaaacgaggtaccctcaggttcagaagctgttatatggtattttaattactaccaggaagctgtctcattactttcaaggtcacccggtaacggtggtcacatcgtttccactcggcgatgtactgcacaaccgcgaagcaaatgggcggattgctaagtgggctttggagttgatgtctttggacatatcattcaagcctcgcacttcaatcaagtctcaagcgttagctgattttgtcgccgagtggaccgagtgccaagaggatacccccgtggagaaaatagagcactggaccatgcattttgacgggtcaaaaagactttcgggcactggagctggggtggttttaatttccccgactggagaaagactaagttatgtgctttggatacatttttcggcgtctcacaacgtcgccgagtatgaggcgctccttcatgggctacggattgcaatttccctagggataaagcgtctaattgttcgaggtgattcacagctggttgtcaaccaagttatgaaagagtggtcctgcattgacgacaacatgatggcatatcgacaagaggtacgcaaactggaggataagttcgatggactcgagcttagccatgttcttcgacacaacaatgaagctgccgatagacttgcgaactttggatccaagcgcgaggcagcgccatctgatgttttcgtcgagcacctttattcgccgacagtacctcacaaagatgctactcaagctgcggacactcatgacatagctatggttgaagccgactggcgagagcccctcatacgatttttgacttctcaagaactccctcaagacaaagatgaggccgagcggatttcaaggcggagcaaactttatgttatgcatgaagccgagttatacaagaaaagcccttcaggaattctgcaacgctgcgtatctttagaggaagggagacaattgctgaaggacatacattctgggatatgcggaaaccatgctgcagcgcgcactattgttggcaaagcttaccggcagggttttttctggcctactgcagtgtccgacgccgacaaaattgtgcgcacatgtgaaggttgccaattttttgcccgacaaattcatctaccagctcaagagttgcagactatcccgctgtcttggccgtttgcggtttgggggctcgacatggttggcccgtttaaaaaggcagtcggcggttacacgcacctcttcgtggccatcgacaaattttccaagtggatcgaagctaagcctgttgtcacgattacagcagataatgctcgcgatttcttcatcaacattgtgcacagattcggagtacccaatcggatcatcactgataatggcacacaattcaccggcggagttttcaaagacttttgtgaagactttggaatcaagatttgctatgcctcagtagcacacccaatgagcaatggacaggtggagagggccaacggcatgatacttcaagggattaaagctcgagtttttgaccggcttaaaccctatgccggcaaatgggtgtcacagttaccatcagtactttggtctttgcgtactacgcccagtcgggccacaggccagtcaccttttttccttgtctacggggcagaagcaatgttgccgagtgaagtcgagttcgaatctttgcgcttccgtaatttccgag

SEQ ID NO: 5770 - DNA, 12766 bp, Oryza sativa
tttagatgggtctaggtcatctgagttagaggatgaataggaggatgagtccgacatggttggaggaggaggaggaggatagattgggttggcagtttcaagttatgagaggtaatatatagatgctgcaaaggactagctgtaataaccatacaaattttaatatggctggactatgactgcattttaattaggaccagctgcaataaccatgaaaaatttaatatgtctggactatgactgcattttaattaggaccagctgcaacaaccatggaaatttaatatgggttggcaattgactgcaatttaatttagaccagctacaataatcatgaaaatttgggttgactgcatggttatttagactaatggcagttaatcagcacaaaatatgagactatatgcatgattatttggactgaatgctattaattatcacaaaacagggactggttgcatggttgtttggaactagagctatgaatacagtacaatagtttgactactgctcaaaatcaacgtagatatatgcatgttttactactgcaaagaacttcatgacacatacctcactggttttttgtaaatatatcttctctcatgcatttcaacattgcaacaagctcagacctcacatcatcaggcatatctcttgtgtctttgttcagtaactctctatatgctgcaatcatagcggtctggcgacccaccttcttcgcttcaagattatcactagcaacacgtcgctgggtctccaacaattcactttactgctccttggctgcttcatgtgcttccataaacttgtgggtgtcatcttctagctcagcagtacaatcttgaaccttgccttttcctttgcctatacgcttcgccttagctgccttgactcccattggacgtgggatctcctcgtcatcaaggggggtagcatcagcataatctcgcttccttttattcgacttgtcaagctgatccaaatatgcatgccatttaggttgggtttttagttcattccaacactcaataaacaagaatcgcccatccttgaagtcattctcatacattttcagcgccttgtccatgagatcaacattacactccccactagcatataatgaattagcctccttccaagggcaacaaaaattcctaacttttttcttgatcttactaaaccggcttgacggagtagtgctattgtaagcagcagcaacatcagccaatatttatcattctttttgaaattcgattctattggatcatttgagttgtttaaccaagcctgacctacaatttccaaatatttcactattgttaaattgcatgtattatgaatgccactaccaaataaataactcgcgtaggacacttaccagcctcaagtcttcttcagttgaccagcctaggcgcttctcggtcctagtggcatttccattgttgccattctcaacattaattggctgcaactgacacccttcagtcacatggtgcataaggttcgtggtgtttttgataaaatcaacaaaaccaccgagcgggcgagattctagtcccctatataaaaatcatgaacatgaaaatcttgatcagttatgtcccatatataaaaaggaatgaacaagccaatcttgatcaatgcaaggcctaacccaatattaccccagtataaatggtatattgatatgtgcagtcaaaattattttatttcagttcatagtggtaaatgagtgctcgaatctaaaacaaattagtaatagatgtaacattggactcttgtttttactttgccaaattactgcataaatacatggttaccaccactgctaattaccctaccatggttaccctacatgtaacattggactcttgtttttacttagccaaattgctgcataaatacatggtacaaatcattgcagaccaaattacatgggccaagttactacggtaacctgattatcagaccaaaatcacctcttttttcctaaacaattcattgcactagtgctgttatggatcaaaacaataacgaccatgaaactctcaatattagacagggaaacagaagcatgtcaaaatcagaactgataaagccaaataataaatgtaccattgttccaaatcaacttggacgtccgtcttggcatcagtaggaggacgatatgcagatgagcccgccatggcttgtgacggtggaaaaggaaaccatgatggcagtggggtggggaacaaaggacctccatatggatacggtgttgccggcgggatatgaacaccgggaggaccagacgagcttgcaaatgagtttgcggtggtgcaacctctctcttcgtccgacgagacatggtgaaaaggaactagggttttggtgcggtagaactatggaagaggacggggggcagtggccctccctgaaattcaccggggggatggatttcaggggcgattttggggctttggcatcgttctacctgccagcaaaatgaatttcgcgcgcgcgggagaagttataggaccgggagagaagaaaaaggagtgagtgagagggaatactgcgcgggaaggagatcgatcgatgcggtgggtgggagatctgtccatcgatttggcgggaggggatcgatgcgccaggaaggagagatcgatgcgccagcctcctttctcgcgctcgcgccaagagggagagggggatcgatctcatggcaaagagaaaggggaaaggggatcggatcagtggatcggcggcctaggagcggtgcgcgcacatgatcagtttttccgttcgtgggccccacaacccgcgttttctagcgcctgcctcggctgcaagcggattcagattgggtgagataggatagacatgtcataaggtgacatagcgtagatctcagctctccaaaataaatccaacggctgagattcgttcacatcatcatgagttaaaatttaactcgtatgagtaaaaattttactggtagttaaaatttcaggagttaaaattttattggagttaaattttaacttgtaatgacgtggacgaatctcagccgctggatttatttcgaaggactgagatctacactatgtcaccttgtgacatacctaccccatgtcatccaatctaaatgcgctgcaagcgggcgctatgcccccaaaaaatgcgttatagcttggcgacaatttagtcgccagctcttctctttcccctcaatcattacccttccacgtagaaataatgtgacgtggcaattattggagctgatgggtcagccctattgtacctgctctaaatgatcaggtgggtttccttgtgcaagaattgttcgtagctagattggttaggcagccgcgccttaaggcctgtgggcatatggttcaaatcccttcgctagcgggcgagtttggctcatttgcatggcattcggttttggcgcgttgctgctcgtttttttttttgccttggttttcactggcgcgctcacggcacgctgtctggaccgacgcttgggtctcccatctcctgcttgatctatttaagacacgccacttcttaacgccacctcttcctcacttgttcatgtactgagccatccgcacatggccgatttatttcctgggttcgatctcaacgaacctgcggcagagcacggcaacggtaatgcatcatttcattgtttcattgtttccgttggagtatgaggaaattagttttgttttttgatattcacagcagtctcatgcaaattagtttccattatcagtgtgttctttcattttcgacaggatttgatttgaacttaccactaagatgaatatggtgcatttgattttgatttcgtacaaaacatcgctggtaagccgtggttattatttcctttctcagtttgtactttccatgtatgattgttttttaggtaagccgtggatattattttgaatgtgcttgttttttttcctcttactagaaccaaaccatcgaaagaaagaaatgacagaagaagtcagaaaacaagtgtatcaagtattgctggctaaaagcaagaatgggacactaggcaatacagatacaagaattgttgctaatcaatttggattgcacattcggtcagtccaattgtggttgcaagtagaaagaagggtagatgtggccataaggcaatccctcttgatttgaaacaattgcgcaacattcctctcaagtaaagaatgaccatagaagatgtgtctagtaaacttggtataaacaaagctaggatacaaaggtatttgaaaaaaggtttgcttaggcgtcactctagtccagtgcgacctcgactgagtccagatccaccttgacggagtccagcgccatctcgactgagtcccacagcgtcatctctgagtcgagtgcgacctctgagtccagcgtctcctccatgtctagagcgagcttcatggcgccgagctccatggcgagcgtgctgcgggagaggaacgcgagcgcgaggaaggaaggaggacgtgcggcgagcggcgagctgtgaggcgaggcgaggcgaggaggacctgcgacgaggaaggaagccgcgcagcgaataatttcttcgagcatgcgcctacgaagaaattaactcaagcgtgcgcagcgaggcgatgcgagcgctgattcgctgaacagagtccgagcagcgagcttaacgaacaggcacgattaatgcgcgtgattactgcggacgacgagcacgcatgcgcaggggcaaacacgtccacctcctttcctccgagcgtacagcgacatcctttgcgaaaacgcgagcgatgccaaaacgacatctaattcgagtacggagggagtagatacttagctaatgccgttttctgatttgtagtattcactctgtttcaaattataagttatttgactttttttttcatagttaaagttttttattttgaccaagtttatgaaaaaagttagcaacatctataacataaaattagtttcattacattttacattgaatatatttttataatatgtttgttttgtattgacaatatttatatattttttataaatttgattaagcttaacaaaatctgactaataaaaagtcaaatgacttatagtaaatagtgggagtaccatagtatcgatcggatcgatcctataacgtccgaatatctttcgtcatcatcattatcgaaatccaactgccctacacacattgcaaggaggcaatcccccgtttctgctgccacgattcctttggcggcgtggaggcaccccttcaccaaggtaatcagtatagatactagctataggatagatctgcagtatcatggtatcataggatcataatacatttttaaattatatattttatacaaatatccagaaaaaagaggcgaaaaaaaaccaaaattgtccaatctaaaaaaacaggcgaaagaaaaacgtaaattatctaataaaaaaaccgggtgaaagaaaatgtgcggaaaaaagaaaagaaaaaacaaatctgcaaatctgtccgaaccagaaaaaagggcgaaaaaagaccgggcgaaaaaaaaaaaccaaaattgtccgataaaaaaaccgggggtaagaaaacgtgcgaaaaaaaaacaaatctgacgtggtaaaataaaaaccgggggaaaaaagaatttgtctgattccccaaaaataattgtccgataaaaaaaacggggcgaaagaaaaaaaagcgaaaaaaaatagtccgactcctatccgattcctctcataaacgacaaaaaggtccgactatagatccgattcccccttaaaaacgaaaaataaaaggagccactccttctgagtccgagatattagccaccactcctttcagttttaatctataccgtgatatctcacacatcttggtgaaacaaaatgatgtgccggattaaagatctgtataaaagacggaacctataggtcgagagcattccatttttatatgattttattttttaggtttgtacttttacatttgagtccctgtaatttttatatttatatttgagtccctataatcttgcaataaggtacttgaggttgtttttttaaaaaataataataaaagagagagaacaaaagctgaaaggtgcgtaaaaagaaaatataaacgattcaaaatgcacgagaaaataaaaacgatttaaaaagagaaaatgcacgagaaaataacaatgattcaaaaaaacgcgtgagaaaaaagtcaggaaaaagcgcaaaaaatgctaaaaaaggctttccatcttccataaaaaaataaaaaacacgtgagaaaaattatttccaacgtcggtaatttttttaaaaaaaacatgggaggaaaaaactataagaaaaaacgcgccattttaaaaaacggtgctaaaaaaataccgtctattaaaaaatcgctctgagtcggataggatccatcgattttttgccaccactgtacacggcttttatttcgtcaatactaatatgttgtgtagaaaccatgtctcatgtaagacctggtttccttctctttactcgtttattcacttgccacattattttttcatcttagattgcagcttatttaatgctatggatatcataccagtcaatggattgggaatggccttataatttgggatggaggggtaccaaacaaattaatgaacacttgaaaacacaactccaaagagttactagtgagatcccctgcacgtggctgcagaacttgtgtatgatgaattgctacaaaatggtgggtgcaagctagattatttggttaggataaaagggtatttttctagtgaaatttgtacattgcgatgatcatccaatggcagcttaaaattaaaaaattaaaataaatggttgcttcggatatgagaattttattgttattttgtaaagttattaacatttccataattgtgaagatatgatgatcttttctatttattttgatgtagccagtcatgtactcaaataataagattgttcccatggccatagcatttgagcattttttttatctccaattaagtatagaataatccaatatgaaaatttaagatctgatgaaataaattcaagatcaataaactgcttggaaaactggccaacaagttcaaaaataaaatcaatgttttggcaagatttgtctaaatttcactagttttttgtcatttattgagctcaacctgtgataagtgatgaaaccactcccaagcggcaatgggtcaccaaatatttttttaaccctgcctatcactcaccatatgtaagttgctccttctcaaaatcaccaagactattccagtatcacaacactttatagagagttcccatagcaagataatatattattatttgaaattgaaataatcaatcaccctattaccaaaaaaattagcacaaatcaattattcgaccagactagctaataacctaactaaagactctagcaaatcattgaccccggcaacatctcatcttcagtgctactatttcctgcaaatcaagcagtaacattttgtcttgtaaccttttcccaagcacttgtgatcaatggctttgcctttggtgaatttcgagaaaacccaacagtggtacttgcatgtgaaacccacgcagatcggcaatatggaaacagattgcgtacaagtatctgccataaattaatttaacccatcagtaacttataccattaataatctcatttcatttgccataattaatcacaagaaacatttaaaaatcaagttttcggtttaaaaatcgagaaacatttaaaagtactgaaaaatgaattggttcttatcgacaaattaaatatgtatatccttcaacacaatgagaatatacatgagattctttgataaaaaaatgagtataacagtgtgtgtgagagagaataacctataggtgttggtatagaattcccaagtgataacagaagcatcaagacgaaacaaatggcagcttttctcccaaccatggctgattagctctgatcgggcttaattattacccgagacttgtagctagcttcagaatcgataactaattcctatgatatgggaatcaaactgttctatcatgaagagatatgatgataagatgtctatttatagagaggagaaatcaaaggcgctcgattgatgggggacgtgaaatgtgggtggataacggcagtgactgagttagttgaatattcatgcatatgcatatggacctgttcagccggaaaacttcaccaatataatgtacgcatgcaccacatcatgaccaacttatgatatgagtgtgattaattaacggctaccgcctaatcaaatgtttcagttgaccgttgatgcaacattaagttatacacgatgaaacagaaaaatcagcctatgaaacatatagaaattttgtgaaacaaaatgagaacacgtggtgaaacatattgctattacgtatgaaacaataagtttttattgtttgaaacatatgtttttcttttatcagaatataatcatgggatatctttaaagatttaattatgacgaattcaacggtgtgatcgaatcgttcatcagataaatagtttagaagaaaaaaatatttttaagatcactaatacatgtatgcatgcatgcatggtgagggagtcaatagaatgacaggagagagagtaggagcctgaccatcctgtacttcttcggtcattggtgaaacattaagttatacatgctgaaacaccagttagtgaaacatttaaattattttatgaaacataataaaaacacatgtttgaaatatatttctatatatcacgtctgaaacatttaatttaaaggattgaaacatatcttttctttcatcagaatgtaagaatatgagatttaattataacaaatataatggtgtgattatatcatagattggataagtagttcaaaagaaaaaaatattttgaaaatcattacagcatgtatggatgtgtggagtggacaagatttagtaattttctcgtcccatttttcttgttgcgtcagatgtctggtactaataatttctatcatctatatatatatatagtcgtttccgtttggtaaactatatttttttcttgtttggtaaactgcttttcacttgctatatctgttttttccgtcccaaaataacttaaactctaaatttgatttatgtccttttatctatcctcacttggcaaattaaataatctgacatgcagtacaaacgtcgactctcatacacacgcacaaacacatactcttataaacacacactcacacacacacaaattctaaatgtatgagcacctcttaagactggattagaatatcatagaataaacaaagtcatcacaaatatctcgatattgatggatatatcgtcacctactacatattgaaagaataattagtcataaatacgagcattcgtgtaaaggcttgaacttaaaccgggcatggacaaggaagaaagcttagcttacctcgcaaacttagaaatcttatctcttcaatgtacattctttgtctacccatgtgtactacttttctattaatgaggtgtgctttgacatttttctttaccactaaattttctctggatatgagggttccaatagtaagctgcaaataataatattattgtagtataaaaacatgaattaattggaagagattaatgaaggttggatagcatatttcatgattgtaatttcatcagtaaaacaaaatacaatctatttgcacttatgctaattaaaactttctatgaactctcacattagctagaaattgatttgatgcatcggattattgtgaatgtagttcatgctgagagtcatgttaaataaacaaatgacacaaatgaaaatagcacagactctaatttagtaataaaattcataattaaaaatatcatatcgtatccatcttatactctgaatttagtatttattaattaaaatctagaattcaaaattcataagtagtaacttgtaactaacgtggaccctaattttagtatgagcagatcaatatcaactcacaaccaacacatgcaatgtaataatataattttaatattaaagagtagcctatgtaatgcatgggttagcgactagtggttataatttctaatttccgtagaaacttttatgagattgtatgtgtacttttcatgacatatgtacaacacaccatatgttttcaaactaagtattcattactttttttataagccaattttgaaaaaaaaaatgacacatggccatgtatttttgagcagagggaacatgttatgaaacacaaatcttgaaactgagtcacattccttaatttgagagttaaggcatgttggatatattttccttaatttacatttttctaataattcatgattgttcattccgacatttcctatatattctcaactaatcaatctgcattggatcgatacgatgaaagagatcatcaactcaaattctgatggcatcacctggacagaggttgcatatcatgatactgaaatgacagaaataattacaaattaaatagatcgatttgtaatgcgtctttgaaacttttggatcttagaaactttgaaacgtctctttaatatccccaatgataacaagccatgcgttgcgcgacttttgattccatataagaactatttgttgtataggatctattagtttatagaagattttagatgagttattttatttacaaagtatctattggtctagctaactatagatttagctaagtcgtgctatatgagaaatcactagaagcttcttggttttttttttcttcattatctttgcccccgctctctttgtaccatgtgtctataagaggaggcactagaaacctctataaattcccatatgtttatgctattgttatttttttaatgcatatgtaaccttttgatccaatggccattatttatctaaattctttattcaacggttgatatgtttttgatgatgtggcgtgttctcgtgtaagaaagcttgttgctttcactatataagataagataataagatatgatgatagccaccggccggaatacacaggagactaacagtgctctgattttcttttctctcgggctgaaacgccctcgccgagaaatatcattatatatgtatcgaaattatataataatttgataagatgcacattgtgacagtacaccattggaggtagaagtcaaattaatcataatgccaaacaaattaacaacgacggtgtacttcaaagagataaatttagggatctagctagcttacgaacatatgactagcacaaattattcaatgacactactagctaacgatcgacaactgtcacgcccggaaattcactagtaatttccgaacttatttgtgcataaaatcctcgtccaggaatcagccgaggtacacaaactgacaatttaatatacaaatccatcataataataacgttacacacttacaaaagaaaagaaaacagcagcggaatttacggtctagcgatggcttcagctccactcccacaggcagctcaactggggtataagccaaacgtcttctccttctggatcctttatcttcaactgaggtttgattgattattgcaagaatgagcatatgacatactcaacaagccacacagcaaatatgcaagtgcacaaggataccaaaggatggcataatataggctcatttgcaaaagcagcatttagcaaaacatttaagagaagtaaaacagtggagtaattaatcagaaattttaatcaacactgaacagcacacccatgctgcacaggcccaaccatcctgaacaaccatacccggctgtacagatctaactccaaaccaggagctaagcaaattgttaccagttataacatccataattattgtgagaggtgtgagactaatcacgaaaaacattgctcaacccgcccataaccgcgggcacggctattcgaatagttttactctggccagaggtgtaccactgtacccacaagacacaaccccacatcatgtcaccatgtgcctcaataccaccacggtacctcggaaaggagttgtgacaataccccttgcacaacataacccattacagcgcacctttcctggatcataatcacccccttataaacaaggcatggactccccagcgacccccgtggacttctcgccacttctcagtctggcgcactataatgaatcacgctatacaaaagataaagccgttgcccacgctggcttgtggttggcacggtaaatgtctcacaatagtagctcgcgaaccggtccttaattgccatgagcacgactctcaaaaccatgtgctcacaacccaccattatcaagttttagttggcaagtaattaattaaccaatcacgattaaccatcgtgaactatcattaagccatccttaaataatagtgagtcataagttatcccaatagtatgctaatgtttctaagcatggctaagcaatcataactaatatctagctgaaccaatatataaagcccaactagtcaagttataataacccaaggtatcaaggaatagggtaatcaatgcaaactggccataacaaaggaataggttcacaccacccggtgacattcgaaaataaatgcacagttgaaataaatagagaatttaaatataggatcaacatgctcaaaggattgtgtttaggatctgtgtgacttgcctt

SEQ ID NO: 5771 - DNA, 27204 bp, Oryza sativa
aaccaccaatagccaccctaagggcgagagctacagaagaagtagttaaccggaaagaagccctgtggagatccaacaccaaccggaaaggagaagaattgaaagaagaagaaaaatgcaccggcgttccaaaacaagaattaacctcatcacggatggaattccctggaaagaaatcccatccccccggaggcgaaggcatgaccatcgccgatcagaaggaatcaccattgcggtcgccaacggagtcgccagagctcacagaaggagtcgccattattcaaagttgttcaaagttgttcacaaaagggtatatgcgaaccgactaatagctatttttatcccgagactgacattgcctcgcatgaatcactttgtcaatgggaaagagcgaggtcgatcaatctacatttagttttgtggataacttaattaaactgtttaggatggtgttataaatattgatgtgattggattgtggtgtaaatactcttatatgaagttttattatattttctagtgatatgttatgaaatgaggatggcatcctctttttctatttgatatatatgatgagattatgtgatgatttctaagatgaagtatataacttgtgatgaaatatggttctaatgtatagagaaatatgtaatccctgtaattgtttaaagagataggggcagttcacttcagtgaatggctcatggaaaaaaaatttcgcgagcggtttgcttaagtgatctgcccatgaaaacatattttcactgacaatttccttaagtgatctcacatgaaaaatgattttcacagtcagtgttatgaagaaaacaacccctgcaaaggagtctccacatgcggctccatttaagcttgtgtaaatagctgatttctgcagatcctagactgtaggcggctggattaacgcttgtacaaagttcactcaaatgaacgacccgtgataaaaaaaaaatttcaccgatggtttgcttaagtgcttcacccatgaaaatgtattttcacatacagtttgcttaagtgttccacccataaaaaaaatcttataggcagtataagaaaaccacccatgagaagttgtctccacatgttccatgtaagcttatgtaaatatccgattcccacatgccctagactgtaggctgctagattaacgattgtacaagataggttatcagacgtcggcagaaatgtttcatgtaacaatgattagatcaaaatttatggggtgtatgagttgccagagtttaattgagtgggtaggtgtatttccaatagaattttcataataagtttaagggttttacatctagtccatgtcttctttaaccaattattaatcactactaaaaaacaatttttctgtacaaggacctctttagatttcagatggactgtaactggtcgcgtctgtaaaaattatcctatattttcacgtgcaccttaagaggaccacatggaaaatcggtttccgtagaggggcctcttaagtggaccacacgtgaaaatgagcttattttcacaggtgggccacttaagtggaccacacgtaaaaatatcattctcctttacagattttttttctcccctcctctctctctctctcttccctctcactcacttcaaatttttcacctcctcaaggtaataaatagcgttcgtagcacccgaaatagcggcctctatagcggtagcgaacctctacagtagcggactgctaatagcgtattggaacttagcggccgttatagagcttcacgaccgctatagcgcttgctatagcgcttcgcggccgctatagcagcccgctattgactttgttggatcactataatgcttaaatagtgttcttcacatagggaaagaataacttaacattgtgtaccttctttatcttatatatttatatgctatttcataattttttatgttatgaaatgtataagtaactaagcatacagtctaaattttaaattttaagtgaaacttgatgttaatattgatatacaatctaaagttatggttatttttttaattccactattggagcttagcgtccgcaatagcacccgctatccgcaatccgctacccatacactaatccgctaccaaccatctatacactatttattaccttgcacctcctctatcttcctttcccttttattttcactcctttctctctgactttctctcctttctatcttcctctcctcacctcttctccgaccacacggcacgcggggcacgggaggtgacggcgacgggcagcggcggcggcaacggagggctcgggcagcaagggagggcagaggaggcgcgcgatggcacggatccaacagcgaccgccctctccccgcgcggaggatcctgcgctggggaggcgcggcggctatcgcccacgcgcaggagcggtggatctagtggtcatgagacatggtggcctttgcctgcgcggatccgacggtggccgtcctccccccacacggcggcggtggatcgcacggtggggaggcatgggggcggcggctagcccttccgcacgggaaaacttttttcgggccgtttgcaaaaaaaatatattttgtagtggtgaataaagggggcttatttgtgtgtgttgtgtttaatggtacatgtacatagcaattgaaaaatggaaacctaaactccgaggtgatgcgtttgatgccgtgtcatgcttatcatgatcttgccttcatgcaaattggattgatcgcataaacacttgcatgcaatggcactcactcacataaatactactgtaatacccattgttaattggcgcactgcaacattgaagcttttgatggtgtccctctttaatttccttaatttcactagctaggtaggaaccaaatttgcatcgagattgtgaaacggaggtgaaaaaaattgcaaccaaggacaagtgctccaggccacgaggggcttctgtcctaggaatttgtgagagttttgagataccgcgtcgatccataccatcatcatttgactatgatcaaatcaggcttaaactttaataatgcaactgggtttgacctggctataattagaggcgagcttgttgtactaaaatttggttttattagagcatttcgaggggaaatctttcgctagttatgagtttttcttgaccatgcatgtgaagctgcgtgtggtttcacacttttttctttatgaaacttatcaatgcctttgttaaccaactgtaagtttctctagtcgatctggttatttccacattgcaagggacacatacacacgtattggtcactaattaactctccccataaattaactaggacgtgatacaaaatgatcattatatatattaattaacttgtgtacccccttcacttcggcaaacatatatgtaatgagagaacgacacttagcaagagcatcaagattatatttaagggaatagagaagtactcattatgacccgtttatcacacaaaattaaatatacagaagtatcattaatttcccttttttttttacttgatgcactggatatcaaacattttctttttcgattacactgaaggcgtatgcacataccactgcataagcacaccacactcacgcatctgccattgcgcatcctaacacacgtttcaaaatatgaaaaccagcggctaatcctaggcttacaaaaatactattaattagaaatgtatatattcacatgaacgtagtattcgtgagtaccaggatttgaactctcatttaagtagtgcacccacagctagcagtactccaccacacaactggtgctcccctcactggatgtcaacattgatatattcttagactgaaatgtgtttgatgctttttataaattagttttatgaaaattatcattagattgaatgctttcataatattaaagtctaattttattatataaactctgttttcaaaaagaggtgtgtcattgcagagtgtgtagaacatcaaaccatgaaagcctatctcactcttgtatatgcacaaatgctatgatttgatatatgtcaaaatgacattagtacattaatttcttctcatggaaaatactttcgtgtatgtgtatatgtaaataaattatgagtggatttcccctctcagtcaatacctatgcgcgcgaggggaagagaatcatgcgaaatggaagtgttaaggttaaactacctgtagtgtatttaacaagtgagtgtgcaatgatcaaagtaatgcaaaattctgtcaaaacatgtgatacatgttttccgaacgttagattgcttgattgacttgtttgagatgtgtgacaagtaaatgtttcaagagtatgtatacatgatacggcgaccacgagatgtatgcaaaaggtaaactgattatactacattagattactagtaccaaagatcacatcaagcagtaaattaaggaaacgtaaattctgataccagaggttacaccgcctaatataagaaacaaccacgatatggaagcatgaagtattataactcacattaatcaggtctcatgcatatattggattcacataatatttaagcacgcaaaatagtaagaataaaattttaacagttacattagacatgactaaaggaaaatggtataggtgtggcaaaatatatcaattataggaaaaaaagtttaattaccatcaaggatgaacacaaatttgaaaccacaacttctaaagaaagggaaaagctctcttgtgggcaagataaaaaaaattcgagctagcagcacaattgacaacacaattgatttaggaaaaaaatattaggaattagaaaatgcacaacttgaacggtccaccaagttcactgttctttctgtcgtgtagcgatttttttcgagatggtgcactttcagaactctcatttgtagacattattgtaaaaaactttgttaaattaccaagaacaaaattaattacattgacgcttgtgtacagctttattaagtcaaccaaattaaactcaaaagcttacttgcaaattaaatttgtcaaccaaaagttagagttaaatgtgctgaaaattaatgccattaccagtttacttgtaatttctcaaaaatattttagtgaactcatccgtccaaaattgatattaattcaatcaatattccagtttaggtcatgtcaaatccgagcccaatttaagcccacccaattaagcccggttaagtcgatcgagcttggcgaaaattaagagcatgtgtaacagtgcaagcaggacagccagggcaggcaaacccaatccccagaaattccaaggaagcttcttaatcaggcatgcaaagccgcaattagaccctggcttaacggttaattcacacacacaatactagtatacatttctgtccaagttaacaacaattagcagcactggccctgcagcaagcagcaacgggctaatagctagaatagctatagctcttcattaaaagtgtcccacatggcatggactcgatcgacgcacacggtgccggcagattccccaattcttcccaagctttttttaacccaagatcacacctccattgccaagaaatttaatgcccaaatcaggtcaaaacttgcagccacagctagtgtactactctcccagcataaaataatagtaattaagaacaagccaagccagctactacactgtgttagctactcctaaccagtgcaaagtgttagtgttaatctctctataaaaccctactagtggcctacctgatgccttactctggagtctagagtctggagcttgtagtgcagcagctagctagcatcagcagcagaagaaaaagaagaagatcaaagtagcaattggtgtgtacaccctagtgctacttctactactactgatcaactggtagctagtactactctccactgtatctctactatcctcaaatcagctagccactgagtgagctgatctctagacaccagagtgagtgctactagctcttgtgtttgtgtgtttgtgtgtgtgcaactgtgcattggtctcctccaaggcagtctagtctgcacctttcttggatctgaagctcataggcaccttaattagccagggagagtaccattttcttggttctctcatcatcagggtcacagaacaaagaattacagggtgagtagtactgttcatatttgatggttgattggttggttctgccaaaattattcatcttgttgtgttttgtttgtagtagtgtttttagctcatttgatttatctttttttgtttgttgacaggtgagtgagtgagtgagtgagtgagtgagtttgttcatcagaggtaagactgagaaattgaagttaaatcagcagcaacagcaacactgcactgaaaagcacaagatcttgtacctgagggggcaagagggcagcaagcaagggtaacctaaggaggaagcaacctcacatggtgagttgctggaaccaagcctagcaagctgcactttccaacggctagctcatcgtcggcttctccggcgccgcgacacggacaccgaggcgacggcggcggccgcagaggaagagttagctagctcgagctaggtgaggcagcaatggcgcctcctccgaacacgtactcggagtcgtggtggggtggcaaggaggagcggggcacgccggtggtggtgaagatggacaacccctactcgctggtggagatcgacgggccgggcatggcggcgccgtcggagaaggcgcgggggaagaacgcgaagcagctcacgtgggtgctcctcctccgcgcgcaccgcgccgtgggctgcgtggcgtggctcgccgcggggttctgggcggtcctgggcgccgtgaaccgccgcgtccgccgcagccgcgacgccgacgcggagcccgacgccgaggcctccgggcgcggccgcgccatgctccgcttcctccgcggcttcctcctcctctccctcgccatgctcgccttcgagacggtggcccacctcaagggctggcacttcccccgctcggcggcggggctcccagagaagtacctccggcggctgcccgagcacctgcagcacctcccggagcacctccgccgccacctgccggagcacctccggatgccggagaaggaggagatcgaggggtggctccaccgcgcctacgtggcgtggctcgccttccgcatcgactacatcgcctgggccatccagaagctctccggcttctgcatcgccctcttcatggtccaatccgtcgaccgcctcgtcctctgcctcggctgcttctggatcaagctccgcggcatcaagcccgtcgccgacacctccatctccaacgacgacatcgaggccaccgccggtgacggcggcggctacttccccatggtgctcatccagatgccaatgtgcaacgagaaagaggtaatcaattatattgacaatgttttaaatagcgagctaaggcatttagcggttagcttctcaaacagctatagcgacagctgtagcaggctaaatggagctatagcggctaaattgtacataagaacaaatagctagaacccttctaaaacagctatagcgggagatttaaaaccctatgtacactacatattgatatggagttgtttccgagcatatgattatgaaattaatgttgtgttgcaggtgtatgagacgtcgatatcgcatgtgtgccagatcgactggccgcgggagaggatgctggtgcaagtgctggacgactcggacgacgagacgtgccagatgctgatcaaggcggaggtgaccaagtggagccagcgcggcgtcaacatcatctaccgccaccgcctcaaccgcaccggttacaaggccggcaacctcaagtccgccatgagctgcgactacgtccgcgactacgagttcgtcgccatcttcgacgctgacttccagcctaaccccgacttcctcaagctcaccgtcccacacttcaaggtaatatacataccccttcattctaaagaaaagtccaatcctatcattgaatctggacgtagctagagtttgtctttttttttttagacagagtagtaaatagtacatgtcacactcttcatcttctttaagcaatatatatgtggagatttcgttgagcaactgaaatcatccgatttctgcaacaaaccgtacactgattgagtaatatcgaaacactcttctgcaccctgtttataaattgatactagctagtctaatagtatatgtgccaaatgtgcatatatataagtatatgtccaatgggattgaaagatgtgtgccttcagttccaagtctcagatctcaatggccagaggattgcattactataagttagccagtgttgaatcgcgggtagaaatattccctaagagctcgagatcagtatagtatacaaatgtgttgagattatgctttggtattagagcctaataaaagccatggcgacttacaaggtctgtaataaacctctgcctaattaattagttagtgattatttataatagtactactactaacaacatgttaagaggggtatactatttggactttggacatgcaagtaataagcgtttctgcagttagggcatgcatgcatggaccatgtaagtccaaatcatagattcggtacagtagttgacctccaaagattggctctccttttgactaaactgatgcgtgcgttcacattactatacatgttgcacaactgccgaatctagcgatacagtagtctcatctttagaataaacttaacttcatgatgcaaaatatgggacccatcagtcagtgagacacattatcacaatccattaatataaagggtctcttatgtttcattaattttatgcatggattatacatttttagaccgttttagatcggagatctacaagtcgcgaaagatgaggctaatacatatcgaatcccaaggtcaatggaatcattttgtgatttaatttgcttcttctagaataaccaattaattaattaattaattaacaagcggataattaggtcaaacatgttggagatcgatcaatcaaacaaactaaactaaatcgaaatgaaattttgtgtacgtattacaatagggaaacccggagctagggctggtgcaggcgcggtggagcttcgtgaacaaggacgagaacctgctgacccggctgcagaacataaacctgtgcttccacttcgaggtggagcagcaggtgaatggcgtctacctcagcttcttcgggttcaacggcaccgccggcgtgtggcgcatcaaggccctcgaggactccggcggctggatggagcggaccaccgtcgaggacatggacatcgccgtccgcgcccacctcaacggctggaagttcatcttcctcaacgacgtcaaggtatgtatgttaaccatgcatccagccatccacatgtccatgctccatggttgtttaatcagggttttaaatctccgtctaaaaagtgttttagctatttactctcatgtaaaatttaattgctatagctgtatttatttagcccgctatagttatttgagaaggccaaccactaaatatcttagcctgctatttaaaacattggctatggctactatgattgaacgatgccatttgttgcattcttgtattattctaggtcctctgtgagctgccggagtcgtaccaggcttaccggaagcagcagcaccggtggcactccggccccatgcagctcttccgtctctgcctcccggccgtcttcaagtccaaggtaataacctcatcgacgccggcgcgccggccgccgccattgctaatgagatgaggatgatctcgagctaattcagctctgacactatattatatgatatttgcagatctcgacgtggaagaaggcgaacctggttatgctgttcttcctgctgcggaagctgatcctgccattctactcgttcacgctcttctgcgtgatcctgccgctgaccatgttcgtgccggaggcggagctgccgatctgggtgatctgctacgtgccggtgatcatgtcggtgctcaacatcctgccggcgcccaagtcgttccccttcgtcatcccttacctcctcttcgagaacaccatgtccgtcaccaagttcaacgccatggtctccggcctcttccagctggggagctcctacgagtgggtcgtcaccaagaaggccggcaggacctcgtcggagtccgacatcctcgccctcgccgaggccgccgacgccgacgcccggccgccaccggccaagctccaccgcggcgtctccgagggcggcctcaaggagtgggccaagctgcacaaggagcaggaggacgccacggcggcggcggcggcggcggcggcgccggggacgccggtgaagaagagcaaggcggcgaaggctccgaaccggatcttcaagaaggagctcgcgctggcgttcctcctcctcaccgccgccacgcgcagcttgctctcggcgcaggggctgcacttctacttcctcctcttccagggcgtcaccttcctcgccgtcggcctcgacctcatcggcgagcaggtcagctagcgaccaccaccacaataaagaaaaaaaagccaccgccgccgccgctgccgccgccatgcgtgcacagcgcgccggctggctggccggaggcgaagacgacgacggccagccaagacacttccatggatcgacagaggattacatttttagccttcttctccttatttttatccctttgatatattttttgttcagagataaaaaaaacagagtgcgtctccatgttacaaagaactcttcttttctttgtgctttaattagctagtgctttgttgctaggagaggcaagcaggccgcatcaggttgttaattacattcagattaagttgtgtcaattcagtagccacatcttgctaatttgccacattatgttatgatcaacatggtgatattttgtaacagatactgtactacatatcaatggataaatcaaatcttgtatgcaagtttaaagtgttcatcaatatctgtgcttgatgttggacgaaattgctatttaggctgtgtgttcggaggtgggtattgggaacctatttcccatgcacagaaaacggagcggtccattagcacatgattaattaagtattagctatttttttaaaaaaaaaggattaatatgatttttttaaacaacttttgtatataatttttttatataaaaaacgcaccgtttagcagtttgaaaagcgtgcgcgtggaaaatgagaggtgagtgttgggaacttgctcttgcaaccttagcgcagctgcgttcccaccgcacaagttttcaggttttgagttaaactttttttctaattcaagatgaaagtttgcacaactgaaagtttcttataattctaagttaaaagttgtatgatttaatttggttgaaagtttcatatggaagtgctattaaaaggaaaaatagtgtgcgctctaattagcaatcacttgtattgaatgatttatttattataaggcaaaaggcctgtccccaatagtatggagtagtacgacggagtagtagagttgagctgaaatcagttgggctgaggacgcacgcatggtgagcccaactttgtgcatatccagcccaaaactaggccacaaatggaccaattgcataatgacataagacaacaaattccaacaggccagaatcaacattcaaagcccattacattcatgttgcagcctgcaacagtagcgtaacaactcatctttctgccaagcagtgggctgggaaggagtacttctaggggaataagttcaccagagctccctcaacttaacagcgagattttttgaggtccctaaaccacaaaaccagaaatgttaatcccttaacttactcaaaccatgcaaaggaggtcccatggtagtatttacacctgattttgctgacgtggcatcctagtcagcaaaaaataaaaaaataaatatgcggggcccacatgtaagtgagagaaaatggtgtaggcccacatatctcctttcttttatttttctcttctcttctctcctctcgagctggcgcgatggcagactcgggcgtgaggcgaccggcagcagagctagggcggcgacagcgggagagggggagaaagacggccggtgcgatggcaagctcggcagcggagagtagcggcgcacggcgcggcggcaggggagaggagcggcaggagagggggcgccggcggtagaagctacttctgatatgtgccacccctgctgtcgccgccgcagccgagcatctggagcacctacctccgcgtggcgcccgcagcgagcaccagggagacctgaacggcaggggcagacacggccgcgttcccggtccccgccgtggcgaggatgcgccccgcgagtggctggcagaaggtgcgctgcgccgcggctagctgctaccgccggtgtggccgacttgttcttcctcttcgtcctcctaccccttctgctcctcctcttcctcttcctcctcacgccagttgcccttgccgcgctcgcggcggcgctcctcgctctcaccgccgcggccaccgggcgacatgtgcgggaacatgtgcgggtacacgatctcgggctccccctcgccatctaggacatacgcgaccttgaccgaccgggtgttgtagaatggcgcgttcatggatccctgcaatacaacgcaacgaaaccacgcgatcatataccaatcaatccaatgcgcagtgaggcgagggtgcatggcgaggcgcgtggacgacgacgcaaacacaccgcggtgatgttgacaacggcgacgcgaatgtcatgctcggcgaggtcgaggaagctgcgggtgttggcctcatagaggcggccgtggcggttggcgaacctaggcctctgatccaggatgttgaagggaccgcacgacgactcgccaaatggcagcagcggctagtgctgtccatagccgccctccgacacgtagtgaccgacggagtagagtggagtggcggcggcggcgaccttgtctccctccgtgctcgcccgtcgccgcctgcctgctccgcccgctgccccacccgcccaccggcctcttaggctcggggaggaagaaaagaagagggaggaagaagagaagaggagacgataggacaaagaaaagagaagaagaaaaaagaaaaagaaaagaggagaagagaggacgctgacatgtgggtcccaccatatgccacgtcagtgaaaccgtagaaaaattaggtcaatactgcctagggacctttttttttacacggttttttatagtttagggggtggagatttctggttttgtggttaatggacctcaaaaaatctcgctgttaagtttagggacccctggtgaacttattcctacttctaggcgatgcaggcatgctgggcttttacctagcaggctgcagacgtcatcggggataagctgggctggccaggggcagctggaagccgctttgctgatattaggccggcccgatatcctaattagctttgtgtccctaaattatgggcaagtctgttttgtctccctgaaccacaaaccagatgttttatttcaccggttcattttgtgtccctagcagtttagactacgttttagtgtcggcgtatattggggtgtgcctatgatcgctcggagtgatcaccccctattcaccccccccccccaatacgctcctctctctcttcttcctcaccttattctcttcctactacaccataaattttaaaaaaaataaaaaataaagttggaaaaaattatgtatagaaatactatatgtaaaaaatatttaaattcaaatttaaattgaaagggatatataaacttttgacttataaactttaggtctataaactttaggtgtataaactttaaatgcatagaactactatatataaaaaatatttgaattcaaattcaaatttgaatctgatatataaacttttgacttatatttggatctctaaactttagatgtgtaaacttgaggtgtataaactttaggtgcataaatttattaaaatagaaaagtaatacggtgccaaaaaagaaaaccacgtggaggaggggaagttgatcgctccaagtgatccatcgccctttagcctttttgcgtctatttggcacattaacctgttcttcagttcacttcagaaaaaaaaaaacaattggacgcaagtgtcatcctctctctctgttgacaaaaaaatcgaacacatcggcctgggagatctgcttagctcctatgtaggtccaaatattgatgagatgcgggcgtgccagtcagtttgatcctgcaactgacaagatatgcaaatagtagatcaaaacagtcgatcggctgataagccgatggagtagttccagccgatgccgataatagccgatgccgataccagccgatagcgatagggtgtaagcaatcggctatatgtccaatgtagatgatgatataaaggcaatcggctgttgataataaaatataacaataatatagttcagtataaaccaatcggcagataatgatatgataaataagcatcgatccgaaggttaaagcacaaatcggctggaggtccgatgtcatgaaatttacaagattagattaaacaatgaaacctttgttgtcatcggctaaatccaacctatatgtatatgcaatccttatgagtcgatgcaacgtccagataactcaccggctgaaaccccgatgaaacccttattggcaatcaaaagcaggctagagattatggttctaagcacgacttagtagatcaaacttaactgatgcagcactaagtatgaaaagaaacataatatctagacaatcaagccattgattgtgttttcagggtggtagatgtctaagctaatctaatctagcaaagcgatttagccgataccggcagaaaccctaaaacgagaagcagccgatagtgctaaattgatatgctaagactagactaacagagacatatgataaataggtagacaaatatatcatccaaatcagagcaatccaagaggtcgaatgtattgatgcaacctttaacgacaccgatgtagatgagacaattgcctgggccggcagaacattggacttatcccttcgccagagatcgaagacgatgcagccccgcatcgggtgccaagttccgccggaacgtaaaaacaaaagtagaaaaggtaaaaggtggcgatgcgccgaattgtattgatcgtgaagatcgattacatagaccccgggtgtacatatttatacccatgggttgatacaagtccttgtcggacaagaaagaaactttcctaaagataaaaggaaaacataaagtccttatcggacactaaacacaaaggaagctaacaaactattcctaattaatagataaactaccatgccgcatcctctttaaactcggtcacttagggataagcttcctttagtagattgatttccttaaccgaatatagcaggaatccgactattggcgacttgataactcccatcggctgattccgagatgctgcagccgataatgattctaagccgatgacgtctttgccgattaccaaatttcactgttaacactctcactcttctagtgggacccatatgcaagtgaccacgtcatcttcttttctctatgcccttttaactctctccctcctctcttctctcttccctacattagcgccgcagtagcaacaccgacctctagcaccgtcagcaactccatcctcaccactactgcataacaccttaaaggtgccagttgcaaaactggcatacatgtcggtttcacatccgacaccaatgacattagatcattggttaatgtcattggtgacggttatagaaccaacacctttgtgctctctccaaaaatttttttaaagaaagagaagccggctcgaagcattggctcattgagccggtgctttcgagcgtcctcctacaagcagcccctaatcccatacatcaatatcacatattaaccacaataatccctatcctcatccatcaaagaccacagatcaacaacagcaatcctcatccccaaccatcgcagatcacagattaacaacaataatcctcatccctatccatcacaggtcaacactagtaagatgaagaactacacaagatgaagaactacccaagcagtcgcggagccaaggcccggccagcacgggcaggtgcccgggctccgccgcatatgcatcaatgcattagaactaactatggtgcctagccattaacctagctgcgtacatgcaccattagattagcactaattatcatacttagtcattagctaataccccaattttacttctatccatgataaaatgctatatgtatttgtgtttacgtgttaatttgttttctatcgttaggtttgcctaggctaaaaaaaaatttctaaatctgacactgtacccaagcaatatgaacccactctctctggatcctataatagatgccgctattttaaagaactggcacctacaatatattataggtacgattttaatttataacaggcaccaatagtcgttcaaaggtgccgatttcatatttttctctctcatggaggtgggaaactgtcaataggtgcccgttttttaaaaactagaacctatgagcaggtacctatgagggttttttaagtagtgcaccactgttggcagtaacgaattaaaaagcagagctaggcggccgcaatgatgtacctggaccatgatgccaagtgtgcgtggccaacactggggaacatttgaccatatcaacgcctctcctctcccaagctcagtcagaaaaaagaacagatcgacgtcatcgttggagagaggttccaattctagctctatgacatccactacggcaggaagggagcaggagaggagggcagccacgaccgctcaggaagaggtggagtggagcttgataggggaagggggtgtggaagaaaacaccgagagggtggtgacctcgcaagatccactagtgcataaggcatcgtctactccgccccgtcgatcttcctcccatggtgagccggcatggagagttggaggtcgaggtttgtcaaggcgaggatgggtcctttcgacaacgacgcaaggagaaccaattggtgctaagctcgaccccaagcagccacagcgtggaagcaggacgcaactgtctagatggcaagtggaggcgagcctctatgccaggccttccacctcatcggcggacaatcattgattcctcccttggtcaacattgaagagatgaggacaaggaagctaaggtgttcatgacaagtcaacgaggttccctctaacttaagtcaaaaggacgtgtgttcgtgacgtgtggttccatgagggtgggtcccacttatcagggatccatgtccctcttatttaagttaacgtagttttaatttaaggtacctttgtctactactatcagtctagcaccttgacgttggtaaggtagaatgaaatttacagtaaaaaaagtaaattttgtaaagctacaaatattttaactacgtaaaataataagatttataaggtgttgaatcacaaaattacagatttgatactaaaattatcataaaactacaaatttaaaactaagtatcacataactacagatttagtaacaaaaatatcacaaaactataattttagtaacaaaattatcacaaactataagtttagcaccaaattaatcgtaaaactaaacatttatagctaacataatagtagtgctaggaatttaagctataaatagtagttttgtgataatttcaatattaaaactgtagtttttgtgatattcagctctaaattcatagttttgtaacaattttagtgtgaaatatgtagttttataacgattttttgtgcggaatatgtagttttgtaaagctataaaatagtagttttgtgataatttcaatgttaaaactgtagtttttgtgatactcagctttaaatccatagttttgtaacaattttagtgcggaatatgtagttttgtaatagttttataggttttgtaatagtttggttaaaatacctgtactttgtcaaaattactttaaaaatagatcatcaagcaagtgcttagtcatagtggaatgtgggaactaatctatactgcaatccttcagatccgctgtcgcgtgggacccacctgtcatccctaagaaagaaaccgcaccgcgtgcacccaaaaaaaaaaggaaatgctgcgaaaaacaaataacgcgcacgcccgccggacctaacccacgccgtgccggccgccagacgccactgctccgcccgcctgaattcaccgccgccgccctcccccacgccgccatctccacggccctcccacgccaccgaagccacgccgccgcgccgcccgcctcacctcaccgctgagccgcacttccccccgctgcctcctcaactcctcgccgccggccggtaccctactccgcttgcaaccgtcgccatcggagccgtggatccgtcgccgccctgaatttcacctgcatccgcccgcttgtgacgtgtttgattttttttttgtccccggtgattcgattcaaattcaatctgatcctttgttggttttgattttttttgtgttctatatgttgttccctgtggtcgtcctttcgccgtgttcggttgttgcaggagcggatttgattggaagttcccaagtcgaggtctcaaggaagaggtcagtttcccgtctacagtccggtcgtttgatttagtcacttgggtcggtgattgatttcagatttgagtggttgattacaaccttcaatcgatggatggatgatcatcggtttctatcagtccttacacgaggtgattcgataccctgggttgattgttatttgtaaccgctgatctggcttgtggtatgtgtttgtgctcctctagatgatgcaggaaggagagtgcctgttgagatgaaccgaattggtggaggtttgattattatggtccaggttcatggttgctttgattattagttagattcatgatgaataggggtggtggaggtttgcttgttatggttcatggttcttttgattagttcatgatggttttgaaattattctgacacgaaagtttgtggtgccgtgacaaccctcactggatttcctttggtcagatcctcaaaatgtgcagatttctaagtggtttcgagatagatgtacgagagattgtcagatggaatagcaatgctttgtttggattctgacccccccccccccgcgcgatttgatttatgcctgaaaagtctgatttgggccgttggttgttcttcagaattgttggagttgcatctcatggtgagtcctatttgctgcatgaattggaatcatacatacaggccgctggcagttctttttgtgtgatcaacaattccccttaatcaaattttccatgtttttcgtcagtaattcttagttcttgcagatagcacataacaaagatggaatttgcaacccaaacctgcctcggtctacgagctcaagacaggctttatccctatgcactcaatctttaattcatgttttctgtacttaggctactttcttccaaaataatattcttgctctctgtaggtctctgaataggagtaatttttttatggcccgtctcagtgaagcacaccaccattttctcttcaattcgtcattagaagttaaatacttacaaagttgaatttcttcccaaataaatgttctcttgcttattgcaggcctatctcataattttgcaagaccaaccttcaccgagtgaaatctttaaatcaccgccattctcttcaattcatcattagaagttaaatacctcacaaagatatatttaaatccaatctattactcactacaggtttctacataatttctatggccaatctgagtgaatcctttaaatcatctcccctttctcttcaatttatcatcagaagttaattgcttgcaaagttgaatttcttctcgaatatttgatgattctgaacaaaatctgctcgaaagttgccacaaatggtctgagagaatagtgaaataagaagaaagtaattggccgaaagaaagctctgcattcgatgtacacctcaaaataatttgagtttttgccgttccatatgaattcattgttagctgcaagtttctatactagatgaacaattcttacatgtgtgcggagtgcactaaatttcccctgaactcccctgattcacaagcatttttaatagataaataccagcacttttatgcatgtgctgcttccttcggtgttatgtatatattaaacttagaagaatttcttctacacaatacagttgaccttttattggttcatgtaaaatttaattgttctgtttgtttctttacagggaagctatgaaattatgagaagtagcatgcctaagttgactctcttctgcttgatatgatgtcctgaacatgcattgttcaggtgagcatagttatctatattgagatcccttccgcatcgtgatcgcgtccggcccacaccccggtcatggccattctgtcctctaaaccttccagataaacaatttaagtacgtctccactggtatattttggtattcatttttggatttttttttctcttgtcttttagaacttgccaattttgttgtttctcaggaaatagttaaatgagtattttggctttgctgtttatcactacctaggaagacatgtcatgatttcttttgcttatccaaagtgtcaaacattttattttattagatcctatgctaaactatgtaactgctgctgatatcattttgtaattaatactctgcattttgtctacatgattttgaatcgaggcagcaggagcaaaacagctttgttcgaaggactcaatgctaggaatagcatggggttaaggcattgaatattcctctcccatgctctggaccgtttttctgttggcggtctaagtcaggcattgctccagtattagcttttggatggctttaattttattttgtgaaatttgaatctgataaaagtacatgaataaaaacttatgttatttcttatttcatcattgtaaactatgagatcaatctagccccaggaggtgtttgacaatatttgaatgtttattgaatcaactacctcttggatatgggatcgtctgagaaaaatgtgtgttcaatgatctatatagattctctccacttctggggctacagtattgagcttgttatgaaaatcaaagcttgaatttccataaagaatcataaaaaaagccacttaaagcatgttgtataatatccaaggtactttagttattcactggaagggatcaaggtaatataaagccacggttttgtatactatacctggcacttctgatatagggaatagttttcacttttagggaactaccgataaatatgtttatttttccaaattatcacacctttttttcctggaccatttatctttcctatgctaatataattatttggaaagtctcgcaatcgtattatcttttctctgataatatttcttttatatatttcacaaggttgcatagctgaaaatttgcagcccaaacatttcttctttaaatggcatcccataattaaatgttaaactgtttcttgctaacttatgtatttttcgagcttgcatggtgaaccatcaattctgaattatttgtacttgtctgttttgtcaattgacattcaagcaaccaacaagcacctgaagctatcctgatatacaaaccctgtgtggtctatctataaatgccgatattctttttatttgtttgaatctttagatagataatacgcctaccacaacgttttcttgaatgtgtatacattgggaactagcatgtatacttaaaatcaacaacaagaatgtatgttaatccatacataaatatatctatctggattggatgtagccaatctgtacatgtactaaatttaaaatagcgacggataataatgattcttccataggagtgtccatgacattaaaaatgccattgaagaggcaaatgaacacacaaaatattaggcaaataaaaagggatttgcaacaccaattggcactcctaatgcttaacatgacttttgtgcacgatctacataacaaaaacttttatatatgtctatccgtgacgtgccttgcacgtgcacgctcactagtaataaaaatggaccagctgtggaggaaaactaaggtgaaattttttatctttttagatcaaagaacatggtatatgtggacaacataacactacctgatgtcaaagaaaaaacataaccctgtgtatgttaatctgtatagctgaggcatccaccagagcatgcatgtgcagtatattattggttgaatttggaaaactagaatacgcaccatataacatatatcggtcaacattatcataatccccaaataaaaaagataactttaacaacaaaaaagatgcatctggcatgcagctactaaatccaaatgaacaaaattcatatctcccaaacaattttggtcaaaatggattaaaaactcaagacgatgtcaagaaatgaaaaaaaaatcgacatgctgcatctgcctatttaaagctcaagaacattcagaagaatggcggcgaaaccaaacacaacaatcgcatgatcagctagagatcgaaacagagaaagaccgtgacccatggcgagcggcggcggcggcgtgaggctgaaggccgggacgcggccgccgtgggtggggctagcggcggcggtgtgggtgcagatggcggcggggaacgcgtacacgttcccgctctactcgccggcgatcaaggcggcgctggggtacacgcagcagcagctcgccgtgctgggcgtcgccaaggacgtcggcgagaacttcggcgtcgtcgccggcgtgctctgcaacagcttcccgccctgggtggtgctgctcgtcggcgcggccttctgcttcgtcggctacggcgcgctctggctcgccgtcagtggcgccgtcgtcgccatgccgtactgtttggtaagcactcatctgattccaaccagaattcaatctttggtattttcaaaacttgtattgggatgctgatatggcgatattttcaaaactttggtccaaaattttaaacaaaatttagtaacaaatattaccaaaattcatgaaaaattaaaaattttggccgaaataatatcatatcgaggatggtgatatgaccgaaatttcagaccctgattccaactccatcaggttaaactacatgaaatagtttctttaaatgatttttcgagaaatattaatcactcttattttctatagcaagtttataaaaataagactatataagtacaaacgaaactattttagcaaatctagccataccatttttaactattaaaaataattctccgttttatattataagatgttttatttttttaaaaaaaattatttgagtatgattaaatttataaagaaatgtaggaaacaaatatactatcaaactatagtcaatatattagatttaatgaaactaatttaatttaatgatataaagagtaaatcatcaatttttctatgatcaaatcttttaccttaacaaaatctcaattaagtgcaacaaaggttgtattaattccgatgctattgatgacatcacataacagctatggattgtgctagcaatggcaacaaacagcaacgcgtggttcctgacagccgtgctggtgaccaacatgcgcaacttcccgctccgccgcggcgtcgtcgccggcctcctcaagggctacatcggcgtcagcgccgccctcttcacccaggtcttctccggcgtgctccaccgctcgccgacgagcctcctcctcctcctcgccaccggcctccccaccatatgcctcgccaccatgtacttcgtcaggccctgcacgccggcgacgctcgacgccgccacaaccgacgccgacaccgaggaagacggccatttcgccttcacccaagccgtgagcgtcgtcctcgccgtctacctcgtgacaaccaccgtcctcggcaacgccatcaaactctccgatgcaaccagctacacgcttttcatcgtcaccgtgcttctgcttcttgcgccgctcgcgatcccggtgaagatgacattgttcaggagttcgccgcggcggcggagtacagaaacaacggaggagccattgctgatcccgccacatgtggtcgtcgacagcggcggcgatggcgacgaggaggaatctgacaaggtggatttgctgctagcggaagggaagggggcggtggtgaggaggacgaagaggcggcggccgaggagaggggaggacttcgagttcagtgaggcgcttgtcaaggctgatttctggctgctgttcgttggatacttcattggagttggaacgggtgtcaccgtgctgaacaatctggcacagattggtgttgctgctggtattggtgacactacggttttgttgtccctgtttgcgcttggtaacttctttggccgccttggtggaggtgcaatttcagagaaatttgtcaggtatgtgtgttatatggaaaaaaatagctaatttttagaaaattttgttgaaaagagaccgaaatttttatagagttattggcctgtgcattgtaacggtttttttattcggtttagtaaaaaggatttggacagagtgggttgattggtcttctatactatggttgggtttttaagaaatcggttttataagatggaagtatttttagaggatgaagtgcgggagaggaatggaaggtcttttttttttaagtagttgagaaaatcagaacagtccaaatatttattaccaattcttttttaaagaagtgttattctgttctgtggttaggtcgacattgttggttcctaggccaatatggatggcgttgacgcaaaccgtcctcgtcgtcgcttacctctgtttggcctatactctcggcccagccgtcgcctacgcttgcacggccaccgttggcctttgctacggcgtgcaattctcagtgatgattccaacgacctcagagctgttcgggctcaagaacttcggcctcttctacaacctcatgtccctggcgaacccgctcggcgcagcgctcttctccggtgagctcactggtcgactatacgacgaggaggccgcgaggcaacaacattctggtggtgtgtgccttggcccaggatgcttcagggccgcgttcgtggtgctcgccggtgcctgctcggtggggacggcggtgagcttggtattggcggcaaggatacagccggtttacatggctctctactctggcgggtcgttcaggttgcctaacgcgtcacagcaacattgagctttgcatttctttgaattgagttgttgttgcatgtcacgcgcgcgttacattaaattttggataattggattgctagcttggtttgtgaatattgatgacatgcatattattgaaaatggtttatgatatgtgaacaagggatttactagtttggtttttgggatcttttttttatgctggtgaagttttaagtttgtgagtattaccttatagataataagaagagtgttctatatgaaattacgaaattcgctagtatgtcacaaagtttagtggcgtactcacttttaccacaaagttgacgattattgcagattattcataaagttgagtgggaatgccatatcatcctttaagtactagaattactctcgtcttcttctccatcttctttctatctatcccctctcgttctcaactcttgcggcattgccaccaccactactcccatatcatcctcaactcctacggcattgccaccgccactgctctcatactgagcttttgatgcttgtcaacctgcctcaatgccattgtctaccctctccgagctctccgtagccgctactagagctcgcttgctctcgtgcttgcttgcctatcggtgaatctactgtgcgtgtatgctcggccgctggctttgccgtcagtcgttcgctgcgccgattgctcacgcgtgctcgccaatgttcagtccgttgccgctcgtccttgcggcaggcgcttgctagtgctctacgtcaacagcttgtcgatactcagccaccatctctcgccagtgctctactcacggatgcatgtcgtcgtttcgtcgagaatccaagaagagatgggaaatgaaagaagattagggtagaaaaagaaggtggggggcaaacgagggtattctgctgaactttgtagcaaatctgtaatgccacttaactttgtggtagatgttgagtatgctctccaactttgtggcgtatcagaatttttcatgaaatttgtttatttgtgttgttcttttcttatgaaaatgacatttattcagaaattcatgccaaataatttggatgatgcagaccgtatgttttataaaggagctacgaattgaaaaaaaaatacatctcatattcacatacccattgatcaatttaatttatgtgttgtttttgtcccatgttagacttcttcgtcttacattaggatatctcaatttctatctggagatggctaaatgatttctgacatcaaattaacaaaagatcgtagatgagatcgatctcttgtcaacatcggggctgttcaaattaatgcaattttcaaccatactattttttaagtaaagttgtcaaaaaaaaatatagtttgttaccaaatttaataaatacagaagaaatccttccaaaatttggtaaggtttatttttggttataatttaaacaggcccatcgacatggcaaatgttctctctctcttttagaaactatggcaagtgttctcgttggggaaaacgaaaactgaagtgaattttggcccagcccaaaccacaaacctaaatcgacaaaacaagtcttaatcaatcacaggccgatctgcgttaacagagaggaaacaaaatcatcccccaaccacaaaaccagatatccgatattcccttaactaatcaaaaccggccacaacaggtccttaggtggttttgactcc

SEQ ID NO: 5772 - DNA, 20703 bp, Oryza sativa
  unsure (1)..(20703): unsure at all n locations
ctcttttagaaactatggcaagtgttctcgtttgggaaaacgaaaactgaagtgaattttggcccagcccaaaccacaaacctaaatcgacaaaacaagtcttaatcaatcacaggccgatctgcgttaacagagaggaaacaaaatcatcccccaaccacaaaaccagatatccgatattccttaactaatcaaaaccggccacaacaggtccttaggtggttttgactccggttttggcctacgtagcggctgagtcagcatgggacccatgtggaccccgcatgtcatgatgccacgtcatctctctttcccctcttctctcccttcctcagatggggcccgcttgtcaagtgtctcttctacctccctccctgtgcgccaacacagagaggagaggaagagtagcgaaggacgacgtggctccagcggccggcggtagggaggtcatcggggcgaggagatccgacgaccggccggaccaggcctgcgcctcccgccgagcccgttcgggctgcccatcctgggccacctccacctgctcacgccgctgccgcaccaggcgctccaccgcctcgccgcgtgccacggcccgctcctttacctccgcctcggctccgtcccctgcgtcgccgcctgctcgccggttgtgatattctgtcatggtaattagcagtagatggacaggcatcagtgacactgccgagtatccataccggttgtgatatactccctccgtttcataacgtaagtcattctagcattttccacattcatattggtgttaatgaatctagacatatatatctatttagattcattaacattaatatgaatgtgagaaatgctataatgacttaaatcgtgaaacggaggaagtagaaatagaataggcggtgatactaatttcaggtaaaacgaaatgaaatcacagtacaattcgcatgacataataaatccattgttgttaattgacagcgctacgctacgcataccatttactctgagcaaatcatacaccaattgattctaacaagttactatactctactctgcaagcaactggttaggaaatgaaaaaaaaaaggaaaaagaaagcaaggatcgaatctaagcagctgattccaacgagcaacaaggaaaatgggggtagaagtagaagcggggcggtgagaccagaggatggaggcgcaaatcggtgagctcggaggcgacgccacccgccacctctacctcgatgcggccccgaatccacctgctccgggcgcgtgggtctcttggtggccgggaaggagaggcacgggatcgacgatctggtggcggtggcggcggtggcccgacgaggaggaagaggcgacacggggcggggagaggagcagcccgctgtgcctctgcggctccgcttgatctccggcgaagctcctctaccgccgccggcggctggtggagaaaggtggacctcctcgccccgacgacctcctccccattgccggccggccgctgctgccgagccgctggagcctcgccgtccttctgaggaagagacacctctcttctctgtgttggcgcagggaaggaggtagaagagacacctgacaagcgggtcccatctgaggaaggatgagaagaggggaaaaagagttgacgtggcatactgacacgtgggccccatgtgggttccacgctgactcaactgccacgtaggttaaaaccggagtcaaaaccattaaagaacctattgtgaccggttttgattagttaagggacgccgggtatctggttttgtagtttagggacgattttgtaactcgaggacaagttgagggaccttcgatgtactttttcctaacagagatgtgctttagcggctaagcctaagctaattacggcccacgaccacgagcccggctgaggcccagggcccagagcccagggcccatcctctgcgccgctgccacctcctcatttcacctcgcttatcgcctcccaaatccactcgtccgtctccctccacccatggcggccatggccaccccgcagcaatgctggctccccacccgcgcgcgcgctccccctcctcctcctccacgcgcaccctcctccgcgtcccccgtctccggagctcccgcctccctccgcttccgtgggcgccgcgccgcgtcggcgtcggcgtcggcggcgaggaggaggaggggagcctccctgccctgctcccccaggtagcataccagcatcacttctcgagagtaaaattgcgccgtacgcgcttcatcccgcattggcggaggagctccgcttcatttcgatcttttttttgcttatccgcttcgcaggtgcgcgttggagacggctggccctggctttgatcccctagggctgtacaacgatgggccttcgaggaatgacacgcagtccccgctgtcgaacttcttcggagtactgtcgccggtgttcgggagctcgagcggcggcaggaaggagaagtcctatggacgaggagcagcaggttgccaagttaaccccttcctattttttgtgcgtgtaactttgagaatttgttgttaaatgcttttggaatatctgtactaatttacctatgcagtaccattctacatcattgtaggagcgtgttattacttattaggataaatgcgtagtttgagctgaagacgatgttatgttagtaaattgttagtgaagaaattattgaaaattttccatctaagtaatatgatgaagttctgagagagctaccatgtaatttacgtagtacttagattttttttaacacagatgtaatctggtaatggtaaatcctagagacttcagtatgcgtgaaaggaaacctcttgattacacatggttttgacataatgttatcagcaggatcttgcttgttataaatatgtggaactactactctaacttttcatgttgtttgtaaaattaactcaagttatgttcatatttttctatcagtgcaaaaacttattttacccatgcatgcctcataggctgttactgttcaattacttacgagcattgacctatgttgttcatgtatctgcagcttgaatccactttaaggctcagttcgttccctccctttcccaacctcccttcctcgttttccgcgcgcacgcttttcaaactattaaacggtgtgttttttgcaaaaaaattctatacaaaagttgcttaaaaaaattatattaatccatttttgaaaatttttttagcaaatacttaattaatcatccgttaatcgctgctccgttttccgtgcgtgggagtgaggttcccaaccctcactcctgaacgcagcctaataagtttaaccaactagaattcctatttaaaatgtgtcttaacccaagtagttcccttttgagcagctgcaattgaagatagttccattgacattggtgacttcttcaagggtcctctacctgggaagttcttgaagctccttggttatttggccttgtctcgacttggtatttatatacctctgggtggagtgaaccgggatgctttcgctggtaatcttgaccagaacagtctactaggcactttggattctttttctggtggaggtattggccgacttggaatatgctcccttggcattgttccatttatcaatgcacagattgtgtttcagcttcttgcacaactttatcccaaattgcaagatcttcagaaaaaagaaggagaggcaggaagaaagaaggttcttcagtatacaagatacgcatctgttggttttgcaattgtccaggttagattcttggagcacttatcatatttatttgtcaacatgattgattgaaaattggaagacgtgggatgtcggtttccagggtgccaagggggtacagttagtctcgtctagatttcggagtacttgagcaaacatatctatatgaagctctagaatattatgtcgctagtcgttacattatataccaactgacctttacttgataatatacctttaacctttttgacttgtattgaacatgtcacaaaatatgactgtgaatcttccagattttaggaatgctgggtgctttgagaagttaaagttttttgagaaactatattttttatacagcaatgacctagctctggcgtagaggacaaatgcttaacatatcacaaatactctggaacttatttccacatgctaattggcaaagtaaatatgctgttgaagcacataaaataaaaatcaaccttttgttttacccaattaagtttgtgctgttaagttaactatggaaaaactctgttctgctttgcctggttgtactatactcctagtacttcatagtattttgtggttattagttacaaaatattccttaatttgattgaaaattcggaatgttctagtaccttcctggctggtttctttaatttgtttacttcttgctaggctattgggcaagttctttttcttcgtccttatgttaatgacttcagcacagaatgggtcctcacatctgtgacactactgacgcttggatcggtgtttacaactttcattggcgaaagaatatctgatttaaaactcggaaatggaacatctcttcttatatttacaagtataatatcgtatttacctgcatcgtttggaaggacagttgcacaggcatttcaagatgggaattatgttgggcttctgacaatcatatgtatcgttccttttcttagttcttgggattgtttatgtccaagtaagcaggttttaatttgtcaagatacatatggaattcctctcaaattgctcattgcttatttgagatcacttgggtggtttcaggaagccgagaggaaaattccgctaaattatgcttctcgatacagtagtcggagtggagggctccaacgatctgcatatctaccatttaaggtttgctgtgcttccatttaattctatttaatgtctatatttccatatattttgtgcaagggttgagtttgagcttcagcttttagttgatactctggatgcttctcatttgaatacttacaattcagaactttctccaaatttattgatagtattacatttgcattgtgacttaccacatgttggaagaatgacctatcttcatttgatagttgtggtttcgtgcaaaataagggataattctgaaagttggtatgcagactcctagttgttattcttgattatatgttgtctgtactcttctaaccgttcatttgaatgacactcaattcacctttttggttcactttctatttttctttgtttattactttaaaccgttccattggcacttttgggtgtctgacttaacaatctaagggcatgtttgggggagcttctagctgttgcagcttctcctagaatcagacgctcccccaaacagtccagcttttggtctagattctgagaagctgtagttgtagaatctagaaaatgaactagaagctagaagctgggaaactcagcttttccagattctcagaagctgcctaccagccagttgcttctcagaattttaagctctccaaacaggccctaaataactttgtagagggtgtatggacgaattaaagccagaggatatcacccatatgttctgacttaacaatctaaataactttgatctaacaagagttggagcctgtaggaccaagcacacaattattctgttattttttagcaaatgaaataagatcaagcttctaatattttttttcttaacctctctccatcattgggagtcataattgttctaatttccattttatttgattttttatgtcctaccttacaaattaccaaaggaaatattgcttatgacttactatgctaccattatgagcaggtcaatagttctggtgtcatgcctataatattttctacatcttctttggctttgcctggtactttggcacgatttactggcttagagtttcttaaaaaggctgccatatccctaaatccaggaggtaaacaaggagtttctataattcttttgaaatttgttgtctttatatgggagatggcaatgcaatagacattttgtttgcatgtaaatcactttctgttaacttcatgctgcaggtgctttgtatattccaactaatgtactgcttatagcctttttcaattactattacaccttccttcaattggatcctgatgatcttagtgagcaattgaagcggcaaggtgcttcaataccgcttgtacggccagggaaaagtacagctgccttcataaaaacagtgagttattgttcttccattagaataaatattgttctttcaccgcatccgaatttttagtttatgtgcataatgtatatgttcctgctcatcagctcattcttgtccatctgcttggttaattcggtgcaatggttgtctgttacagaaattggcaatggtccttatctttgtgtagttatcaatggaaactgttttcgtagtgacatgatgtattaaagaactccaaaactcaggttgcaatcctctaaagaagtcagtaaccactaaacagtctgttgtctcctctgcagtgttagattcatgtgaggcacacctgttcatgaagatattctgttttctttatcataggaaatttggagttgtagtaattgcacaacttatgccaaccagactggttaaactcattcatggctcatatcatcagaaaatatcctagatcctatttataagtatcttgtggtatggccaaatgctagtctttggtggtggtaaggtcatttgctacattcagttggttcagaaccacatacaagagaatttaggatgcaatttatagtcaagactttcatccttctggatttatataaatcatagatattcctatgttggttatgtgattcataaactgtatgatgtaaatatgccatcccttggactggacaacatttccctctgttagcgggcatccttactacttctatctttttgaagatcacagtcagtaacttttttgccagaactgattgctgcgcaagacagtgggacatacagttacatttgatatgttatgcatgtgaggggcaccttttactttcttgctgcgtatcattttggagaaattgaacataaaaatctcaaattcaataagaaatccaatcacaactaaagtatatcaagtactgcaaaccattagcttctatattgtgcactgaaattaaattatctcattgcaggttcttagtaatatatctgtcctaggatctgccttccttgctgttttagctgctggaccatctgtggttgaacaaatcactcacttaacggcatttcggggatttgctggtacatcagtgcttatccttgttggatgtgcaacagacacagctcggaaagttcaggcagaaataatttcacagaaatataagaacattgagttctatgatgtcaaccgttttgaccaatgattaatgacactgatcattcttttcaacttgtaccaaatgttctgttgtattataattgggtcatgtggtagcatttaagactgttcaattttatgcccgttttccttctatcgtgcatatcacttgtatgtttacttgaggagcagaaaccatacatccttatgtacataaatatattagaattatttacctcagaatatgaactttctaccatattgctcagacctcatcagctatagtagaattggctgagtacttaatacatgttgagacgatgagaagcagttatttttgttttacatatgaggctattgcaaactctaatatagctggcatatgcttacttgtggacgtgaccctccccacatttggtagccttttctgcgatacagtatttaataatttaagtgagcactaagataactaagtgaacagttattggcgaatgagagtaaacatccaggaactataattatcatacagaaacgatcaccacttgtataattagtacgttactatttgcatcatttgattatattgaatgcagtttgtgttactctggatgatgatcttcagagaaatcaggttcttcaggtcgctccttctgtgcttttttgaatattgatgctatttttgagacagtaactgtttctctgtgtgatacagtgctagaagaaccattaatgtcctcacatctcgtgtcattgaagtcattgaccaatgagaagaatgacttccacctgttgcttagacctacttctgccattttttgtcgattctggcgccttcgccatgctgattggataaagcgagcggcccatgttctccactggtatgagtgtaacctgaatgtgtgctgcaggtgcttggaatgcatcatcctgaatgtgctggctacgcacttaatgtcatcggcttggagggagaatgcttccaattcggcaattgttttaacagttcttgttgatgatggatagctgtctctagagctgggaagcaatgcccatgtaagcaactcctcaccacaaaaatcacctggttttaggatgatggagttgaagaagccagttctgccaccatctgttgtggagctctctagcttgccacgaataatgaagagcatcaccttgacagggtctccctcacgggttatgtaggtgccttcagtgcgaaggaagtaggtcatgcgttcacagatggcatcgagtagttgatggtccattgcagaaaaaaatggcacctgaaattaaaattgaagggagcatactttagctgatcattattttaggatatatgtttactgtctatcattagtttttgttcatttttgtccttaaacatgaagagtaaggatgagtaaaggtgatgcttgtgattgcagaagatatttgcaggaacaggactcacgtacacgttcgacaagatcaaggcacaggtaccgttttatatctcgatgaagatctgctggtagttgtctcaagattgaatcctcttcaactccctgcgtagcaaaccacttgtatttgaagaattgacnnnnnnnnnnnnnnnnnnnnnnnggtatttgatgatctatcatccaatcttccatttctgtttgccacattctccaatcttcagtatttttagaaagagatctcatgtgtatctgtgaagcatttctttttcttattttgtgtactacataagtatataaagtgttactgaaagtgttttacaagataaattacctgcatgttgcctattagttgtgcaaacaaaccaatgctgagaagggttaaccctattgcaaataggttttcaccaatgaaggaactagtcaccaaaggattgccatacgtgctgtcaccaaaaatatatacaaaataacatttcagtaatctcaaaccatgataagtctgctacaaatattgcaagcagcatgaaagaatttgtaagaacaggtcattatgaggttgatgctagataataattgctttctgggtgtaatgcctttttggagcttgaaaaattgaaaatgcattcagtaagtatcgaaatacgaacgtcaactgttgaagtccccaccacagggagtagaaatatttctcagagaatgaagctgtggtcactccattttgtattgcttgaatgaatatgccatagttgatactgacactattgctgttggcgttacaatgtgtgaacacatttgtgctatttgcccaactttgactgttacttgatgtggcatatttgcagtcaaggaagtgtaaatcacacagtcctttgtgtgccattctgtcctcaatagagcactgtgtttcccagcatgtcttttgtcgatccactgcagttagatagaatattgctccaaccacctggtggaaacatggcacaagtaatggtttaatgagataagttgcaactttttttctataggatgatttatgtttggcatattttccaatcgtttatttgatgaagtgtcttgacttaaaaatgcctagtgaaatattgacgacattaattctagccaggttgtatggggctaaaatttatgttttgaaatgggccatgatcctaaccaaattgtcattttatctgtttgcagcaatatctgctgcaaatatgctcaacgttatttatgtacttataaaatcattatatgacagttgtttttgtaatccaggcgaaataactaacacttacgtgacttgccaccaaataaagaactagactgtagatagctccttcccacccattttttgcgatgaaacccaccatctccatgatactaaggctgagaagaattacgatgtataatctgatggcagattggaccaatattataagaaagaaaggggcattgatatgcttgaagctgatagatggcatggctatccaaacaagaacctgcacatagaaagaaataatttaccagcacaaaaaatatcacacctttttctgattactgctgtactatttccaactttcaaatgaaagagacatacttgtggaactggcaatgcagctactaggtcaatgaagaagtttgttctgatgtatctatttgcaatctttttaggatctgtgacaagctcacccctgccaagcactttggagcttggatcaacatgtgcagtggagaaacttatagcaatatgagctatgaagaatatgtcaagaaaagaccgtagacaagtgagtataatggcgagatgatggtccattgtcatacacaactggcggtctctgcgctcaacaattggcaggaagaagaagagaggatcaatgaagtgagaagcaacgcatgagacgaggaagacacggttccacatcagcacaacattgcctccagggtctagcatactctcttcgcggcttatccagattctggtaaaatcctttaacttgagcactatcttgctgctcattgttttaactgaacctgtggccaagttattctgtctgtgtcttgcttcgttctcaataagattaagcctgcagagtaaaaaaaatcaatgaaaaattatacgacctaagtacaaagaactttacttttttgtttcctggagatgtttatagttacagcaatgttggtcaacatatgattctgcaatcattgtacttaaagactggaggtagttgccagtgacttgacaattggcagtaaattaataatagtcattgagtaactcatgtgttgctacatttgtaatgacctaattgtttataatcaatcttgtcagtactaaaaggtgagtatcaacattttctagtaatccctgattaatgcatttttttttataattaaacggtctcgtgaaatgcattcattccaaacttgtatcagtatattgtcggtctgtggggttactgttttattttccccgctgtgaaaccttaactgtgattataccgtactaatgtactagcccaatgttgtttctctataattcaatgcaaaaacgattcctcataggtcaatctgtctcttttaggctcttctttcttacgctatatccaactgagtcccctcttaactcttgacagtactttgcctaatcttacacttttacaaatgacaagctcatcctagtctctttgctcttggaaattctttaaatgattatacatgagaccttgtatgtatatgatctgttcgataataacacagagattcctatattccttagaagcaccacgaggtgctgaatacgttagtctgtgtagaaaatatacctatccaacgctaagaagtgtagtaccacctcaaacattttttaagctctagtacgatgcagcaaatgaaggtgaactgcgttaaatatatgagatccctatttacacctaactgaagtatcagacagtgataaaattaatgatttaaaaagacaacaaaacctcattaaaattaatgttcaaggtgaagaaaacagaattatcggtaggaaaataacaacttaattaatgcttgtaaataacgagcaagttctcattctagcaaaaatatcaatttgaaaataagtcgctaagcgagcagctggtgcatgatttgacacttcaaaaactttacactcatttgcgtcaaggctcaacttattcggtttatatagaacatacaccatccatcccatagaaaaccaacctctggttaggtttaaattccaaaagttgtttttttaggatggaggaagtaaaatacaagtaagacaaaaaaaaaaagagaagatgaaacaaactagtacttgaggaattcttttggaaataaaaattgcactctgttgttgaaagattcaagctcaagagcaaactgaatttatcccccaaaacgtctcatgaaactcctgattcaatactacatcaaatttcagcgaaataactcgagatcatttgacacatcatcaaacaatatgttgaactcacctcatgttcttgtcaatcgatccttttctcaagagctaagcctcctcatccacagccaccaatctcgtctctttgccttttatcttgcacataaaaccgaatttcctagagaacacactcaagaaaaattcaatatatataaccatagaatcccacacatcatcactcactctctagcacgaacacaaaagagacacgggatcgactgccattatctagaagcttctagaacctctcctcttgggaaaacaatggagacaagctacctaggatgagaaagtaaaccactcgttgtagctaggaacactggagagagagagagagagagagagagagagcgagcgagctaggacttcctcaggtgactgcttataaatattctgggagtatgggacaggtgcacactattcaccattgcataaaagaaatgtgaagtccatatttctaaaatttatattagtattattaatctaagatcagatcagaggaacgggatagtgatgacttgatagaagaaagacttggaagaaggtaagcatatacaagtattttttgtttttttgtttttagagcttaggaagtgggtgagtcagagtgtcttgataagatggcacctactgattttctttcttgaataatataatgtaaaatttttgtagggtagatctcaagagggactaaggtagggcgtttgcattgaagcaaagactcattttggactagttttctagtattgtttgaagagcttgagcttcatgttaattgttaaagccaccaagatgtttagctcacataagcaagtgtggctgacatacaatttacttgtcctacttgcgacgtactacctctatcctataatatacgtactaacctaataccggatgagatgtattctagcactatatttggattcatagtcctaaaatttatctcatccggtactaaattgctatattatagatagagagagtcgcctttaaaatttcagcgtactactatacacataagtgtttgagattgtctaattagaacggaatcagtatatttgtcaacaaaattgcttccatataattatatacttgtaatatatacttttaacaaagcagaataaaaaaaaatccttcccccgacaacacatcacaatgcactattgcaacttgccctaccttaaattatcctatagagataactaggcatgcttagctcactcgcttcagcagtttgtctagctaagcttctcagcattgtaacaattgttttcccaagagcaaagataagagttggttacagataaaaaggtgaactacaaaactactccaacatgagctaatatataacacagcttgaacatttttaattacatgaaacacatgtatatatatgcacacgcgcgtatcactactatgcgtgcacatatatgagtaagtaggcatagacctatatgcctacttaatgttagctttaagatttttaccaaagttgctacaaataaaataatggatgacgctcaaaaggtaattagtcctactcaaacagcgttcattcctgggagaaatattagggaaggggtggttattttacatgaattacatcgcaaagataaaagtggtgtaatttttaagattgattttgagaaatcttatgataaagttaaatggccttttgtacaacaaactttgagaatgaaaggcttttctcctagatggtgtgagtggatagcttcttttgttcaaggtggtcatgttggtataaaagttaacgatcaaattggtaatggttttcaaacttacaaaggtcttaggcaaggggatcctttatctcctattctttttaatatagtagctgacatgcttactctattgattaagagggctaaagaggcgggactcttgagtggggttattcatcatcttgttgatgatagtttgtctatcttgcaatacgcagatgatactatcatctttttggagcatgacttgcaacaagcaaagaatttgaaactgattttatcggtatttgaaaagttatctggcctaaaaataaattttcacaagagtgaattattttgctttagtcaggcaaaggaatgttatgaacaatattctgatatttttgttgtaagttaggtacctttccttttaaataccttggaattccgatgcattttaggaagctttctaataaatattggaaacttatagaagagagaattaagaaaaagcttagtagttggaaagccaagcatttatctgttggtggtaggctggtgttgattaattctgttctttcaagtttagccatgtttatgatatctttttttaggtgccgaaaggggttcttcgtaaaattgattattatagatcgcggttttttttggcaaggggatgaccataagaaaaaatacaggctcactaggtggaatgttgtttgtcaacctaaggaccaagggggtcttgggattcataatttggagatacaaaataaatgtcttttaagtaaatgattgtttaagttaattaatgaggaaggggtttggcatgatttattgaagagaaaatatctttataataaatctataacccaagttgacaagaaacaagatgattcccatttttggtctagtgttatgaatgtcaaaagtactttcttaaatatgggttcttggattgtcaacaatggggaacaaattagattttggaaagatagatggattggtaacttggcttttaaggataaatatccatctttgtacgcaattgttcggaggaagacatcttctattgccactgttatgggatctgttccgcttaatgtttcttttaggagagctttagttggtcagaatcttgtttgttggcatgagttttgtgcctctatagtacatattcagttgaatgattcgtctgatagttttagatggaattttcatcagaatggcttgttctcggtgaggtctatgtacctagctttaattaataatggctatatcgagagaaacaagtgtatttggaagcttaagttgccacttaagattaaaatttttatgtggtacctgcttaaaggggttgtgttaactaaggataatttggcaaggcgtaactggaatggcagcttgagttgttctttttgtttgaagaatgagtctattcaacatctctttaatggattgtcattttgcgaagtttctatggagagctgttcagttctcttttggttttaatcttccagttagcatatctcatatttttaataggtggcttttgggagttgataagaaaatgagtaaactgatacttattggagcttctgccatttgttgggcaatatggctgagtaggaacgatatggtttttgacaaatcaccatcatttttctatatgcaggtcattttcagggcaactcattggctccggttttgggcacaactacaaaggtgtgatgaatatgaagagtttctgaaagttgcatgccgaaagttggagaccacggttatacaactttttaccaattatggttggagatttacaaatagacttcaataattgtgatctccttacgttaggctggtttctttgtttttctcttcggtgtgttctattcatttagatttacactatgttcatgaaaactactatgtaataattggctgtagcttttttgagtaaaggccgggatattatattccattatctaaaaataaattaaactgatgctttccagcctggacaatttattgtgtgaatatatactgcattgcatctcatatttacttgttttgggggtgggtcttctaaaccaaatgactttggtgagataagtcttgaaagtgagtttatcttatactacaccgagagggagttgtccgtccgatactgcatcatatacacaccgagatatcctcgaaaaaccagaaaaaaaacctaagtaaaaaaaatgttcaaagggcgtgaaggtagtgggtgctgttatatgttggatagctatgccacaattttcatccgtgtcttttttatagtacttctatttacatatatgaggtgcaacatgttggctccggtgttgggcacattgcaaagatgtgacgaagatgaagaggtcctaaaagttgcatgccacaagtttgagtcgacggcttatgcagctttttgccaattatgggtgaagattcataaatagacttcaataatgtattctctttatcttttattggttcgtttttatctttccgtgatgtttgctgtcttagttggactacactcgatgtggagtgctagattataataatgggttgtagctctcttgagtaaaggtcgggatgtttattccattatctaaaaaaaacatacatgaggtatatatatggtgctgtagacaggaggctccttattggagtagttcagggtaatttgatttttttaacttattactatttcttttcgaccgaaagcggtccatcaggctaccagcttcaccagcaagtttttaaaaaatagcatggaaaattagagttaaataagaaaaaatattcagtagggaaaatcatactccatatcaagtatgtcctattagagcaaatagaatttaggtgctcagcgtgtggtcataatgtcatattgtaatttagttctctttgaaatattttcaaatttgattgatattcctcaaaattggacttctctgctgacttttagatgggctgaaatttggcagattgacgggctagaatcacgcgcgcttatggactgaatttgatgagacaaatgggctgaaattccctacaactacgcagatcaacgggccggaatcccacgcaactgtaggccatatttactacattctgggcctttggtaggctcagttccattgcttttagagaaaattcgattcatggcacacaaaaagaaaaaccggaacaaaataatagcacaaaaattttccccttttagctcaaagcacatgcctctgattttccttcgatttgtagcactcccgtcaccttcttctattccatctttccccttctctttgtcccgtcgatctcgccaccacgtcggtggccagccatggtgtggcacggctgagcgcctctgacggggatggcggctgcgcgtggcgagttcgtggggatggcggttcggtggtggaacgtgaacccaggggcgacggtggtggcaacgaaacgcgagatcgggggtgaccatggtggcgcctggacacgaacccaggggcgacgatggcggcagaggaacacgagcttgaagacgactgcggcaacaataggacacgagcttgggcatggctgtttagtggtggaatgcgatggcggcggcaataggacgcgagcatggagacggcgccgaacgagctcggggtggggatggcaacggcagagcttggggatggtagtgacgacggcgccggacaagcttagggattgggactgtggtggcgggatgcgagggccatcgctatcaaccaccccaccgccgccaccaaggcctgcgcctcctccggccacctcatccacccatactttggttagaaaaaagggtaaattcgtcttttcacgctcctaatcatcgctaaccaatggacttggacgataaatgtgacagaagtgctataaatcgaagaaaaaatagtggcgtgtgcttatggttgaaagaggaattttttttgctattttttggtaccagttttttcatgtgctatggatcgaattttctcttgctttttaggcctgcaattggagaggaagagggggactggggtgaaaatggtgagggagcttcctaaccgtttccggtatcttttttattatagtcactagggttaggagaggtgattgtggtctctcttgtggcctgatcttctggtgaggggataactctcattttgattggctgtgatgtttgcgacgtggctaccaactagaacaagttcagaacgctgtgcaatcgcaacaccacaaacgatattgtaccaaccgtgatgtgcggttgatgttccctgcaatgtaaacgagagaacacttcaagaacaagataagatgcaatccaaatatttcgaataggtaattaagtataaaagaatagttgtgattgaaatggtagatctaatcgacctagcaaatcaatgcataaactattgggtgactctgaatctctatctctagatgccgactaatcgagcaaggattaaatattaggtgaatggcacttggtaaaattcaacaaaacaaaacccaattgttttttagggtgtacgaagctttttatagaggaaaataaagctagagataggtgttggttcgtagaggtggagagaggcacttccgagatggccctagtctattacaaagcacaagggctaagttcggtttcagcaacaacattgttgtgttttgacgattcccaatttcctattgactcgagatgaattttgatattagactggatacgtttgaaaggtgatgagataagatctccaacaaatccaacatcatccaaattagagttggcatgaagacgctagatccatttgaaatcaatgctactgacttgaacttagtcattggaacttgtgaagttacatgcggattcgatgaaggatgtcgtcatcatctcaattattttttgcatttgaataattcatcaatggtatggattatatctttctccataaaaccacaccatgcactccaatcatttataccatttacataattgatcaatgtataatatatagaaagcccataaaacaaaatcaacccatattacaagatacagaaaagcacgtgaaaaaaaatcgtacattaagcaagaaaaatttatttcctctgttcactcactatgaccacacgtattttaaaattcaactgaccaataaatattttattataaattaaattttatttcatgtaaaataatattattggattatcatttaaatttatttttatattattgtaattctattgctacataatgtagtatactagaaaacatgcccgtgcattataaagggtgaaggctattttagttgggttattgttagatttttttctaaaaaatatatatgaattttattttgagatattatttatatccaattcggatccctagttgggatgatggccataacctatatattgttttcttatagcttggtagaaattttaaagcaattaggagtctgactctcatcctaggtgagtatgtgagttttttttaaaatatttttttatataacttcttatgtattttcaaaagcgaacgaatttagaatccgactcaaatacggacgacataccaaaatatcaacggaaacatcctcaatttttataatagtagaaaagagattatataagaaatttaaagttaagaattagttttaaaagactatgcccatgtgaacgcacctagagaaaatattattctatcgtacaattatctcgcagctaatacatgagtacttatctactctctccgtcctataaaaaaataacttcttaggatgaatctggccaagcatttatctagattcaagttattatttttctagacgtaggttatagattttttaatagcatgaaccacttaaccataaatccgaatcatcaagaacacattttgactacgaatgccacacctatctctaggggtgaaagtggttcggataatttccgtccgtccggaccatttttcggattcggatagtttcggtcggaactatccagaaattctcggattcggaaacgaattcggattttttttctcggaaacgaaaacgaatacagtaagggtactatccgtcggaatcggaaaacggtcggaaactatccggattttttttcggatatccgcaaacattgagcaaagtttagaaaaaatatgtatatatacgtaactttttcatacggaatcagatggcgacaaactttatatcaacattgtagagctcgatgagatctacaactttcttattgactattttattatttgaggtcatttaaggagtctaaatattcattataatataccatattaatttttacaaaatcttagatctacaattcaaacgacatctgatggagaatcaaagttgtagagctcaacgagatctaacactttgtagtttataacatttgtatttgaaagcatttaaagtataaaacaaacattacaagtttcgaagatgtgaagtaaaataaataacatctctaatttatacaatagtaagtaagttatacatctagtaaaaaggtcgtgagaatagaaaatggtaatcatatttgcatatggatctctaagaggaatagccataaaaattgattttcaca

SEQ ID NO: 5773 - DNA, 107015 bp, Oryza sativa
  unsure (1)..(107015): unsure at all n locations
atatcgttctgtagtttccctcaacttttatacatgtgtttttagtgactcaagcaaaggttgaaaaataaattatgataaaagaacattaaaattaactttaaattcacattttagttgtggctgataagctgacgaataaacgatggtagtttatactttatagtagcatgtgcttgcaacttttcgttaggaattctaccaatatattatatcctctatttcttaaaacaactgaaatggctaaaaatgtgtttcccattttagaattttcatcgatcaagcaaatgttgaaaaataaattatgataaaagaacatcaaaattaactttaaattcacattttagttgtggttgataagctgaagaataaacgatggtagtttatagctgcatgtgtttgcaacttttcgttaggaattctaccaatatattatatcctctatttcttaaaacaactgaaatggctaaaaatgtgtttcccattttagaattttcatcgaaattctaacatttgaaatattgtatctatatattccaggcacttaatttcgcggtccaaaacacaccgcataatataattatttttttcaccggatgcataatataattattgcacttttgacttttatgtcatatgattgttttcttttagcccgtagcaacgcacatacattccggtagtcttctcaacaacagtaaaatacctgttttttcgtgtataactagaattctttgtaatcttggtggcgtgcaggcatttataaatccgtatctgctgtactcgaatgaattaattaggcgggactttcgctctcttcgcaaaaaggttctctgcgacataccctctgctttctagacacgcgtggccctgaacatcgatgtacacagtacactgcgttccaatgcgtacgaacacctgttgcaaatggcaataatactggctccacacggtgatccactctaacgtgaaacaatacttcaatctcagaacatgggaagtcaacaaatgcagatggaatgtacgcgccatatgatgtggactttggaattggtatggaattcatccgatgcaacttggatccaacaagcactcaactcggttaattaccaacgggatatcagaatatgcatgcagatgatggctaatcaccagcaatggacgcatggttcattgtatcaggatgacgactcctaaatccggcaagtcaaaaaaatataatagtaactacttgaactacatatgcataattgcaggtatgcatgtctctcttccatgttttgatgtttaatctgcatttgctttgctgtttcactgagtcaatgaaagaatgtgtctctgtcaggatctgtaattaattggtatcaactgaaggttcatccagaagaaatcaaatgaggatttgtgcgaatgcgattgcatcatagatgacatagcagtaccaaggtcagagtttatttttatgccttgtcatatctaggcgcacaccatgccaattcatgatttcttacttagtacattgcaccttgcatcatcacgttgatgatatgttaatggttagcgacgaacatatctattctaggcatggttgtatctagtaaacgattattgttttctatcttgctatataaatgcaggaaaccaaatttgcagaaactgaaggttcaccaggttttggcaatgcgtcgtggatgacatgaaaccagttacagctgcagtttcagttatgtcaaagatgcttcatttatattagtgtttcttgaattgtgagccatatactttttctccttgctaatcttgtgtggatatgaaacaccggaacttctctgcgcctacttgtttatatctttcgtgagaaaaaccatttgcctgaattttcagagagaagcttgtttgctgcaactactcgattccaacccaaagtacaggctgtggaagcagaacaccatcgtccttgtcttacttttccttgaactcatcctcaagccagccaacttcccagtattttcaggttttcaaagagcaattcgagacgaaataaatttcacacttaattttcgttatactactattcttaaccgattaacatgtgcacaagtcgaacctgaactagcccgtttccttctactacttttcagtagaaaatacccttgaaccccttttgtttcagaccaggatgtgcccaggtcaagagaaaaaacttaactacccagctgttgctgtgtctgcaactctgaatgcaatcaagacatcaagatcagaagataccgtgctgcttttgaaggtgatttactgagttctgacttgattagcagtcgactacgtactgacttagctatccagtgggaaggaagtcaacacacgggaaggactagtagtagtgacctcgccactgatccaatttgcagcttctttttttcagagttattcggtttacttgccggagtagacgactttaggaagctagcttgtgcagtacttctcaagttgtcgctgaaaagccttacctgatgaaagagagaagatgagataacaagttgcttctgagattgaagtcttgtttcaggttagctaagagtgctgattaagtgtgtaaggttgacagctctcttcaaccaagctgagtttccagaaaaagaacccaatgaggcaaggatctatggaccatttgaaacttggcaggacattttgcaagtatagcacatgccctaatatttttgtatctgatctatttattaattttagatagagaaaggaccaaggatatgctaagagaaaatgttggggctgtttggttatttgccaaattcaaccctaccaaaaaggttggctctgccagaacatttgccacttgtttggtttgctaccacaaatttggcgatacctttttttttccgttactagtctaactaatcttgccagcaatccaagcaatcatctttgccaaaaaaataatttgcaatagccaaatcttgccaatggttgccattgtaaaaatgttagcaatactaaaaatggaagagaatcaagtaggcccattaaggctgcgttcttttgtagggttccctactcccctctcgtttttcatgcacacgttttttaaactgcttaacggtatgtttttttaaaaaaaaattataggaaagttgctttaaaaaattatattaatctattttttaagttagttttagttaatacttaattaatcatgtgctattgtactccgttttccgtgctggaagagaatagaaggttttcaactagcacaacgaacacagcctaagccctgctacttcatcaaattattgctgtgaattatttgctctatgctacttctcaagaaaaaaaaccagcacttattctaagtcatttgttaagtttatcttaaaatattgtattattcctataatcaagtagataatcaagtaaaaatttaggtctcatcttttcgcttatacttatacttatacttatcggccaaaatttaaatttaagctgattttaaggtctttttaatcaaagtttattttttagcctaaaaacacgtatataaaaattttatttacaaattaatttacgtttacaaatatgccgtttcgcttattcaaaacaatgccttttttgaatgggctctaacgcccctggccgaaggatttatttattgatattcttatctttttcttaaccgtaagtctgtaaccagcccaataattatgggccgttgtttgggctttgggccggatcatgatattgcagttatcggatttgtacccgaaaaggaaaaatccgcttcactcgcctcctttctcctcctccgtcctcgtcctggtctcgcggactcgctccctcctcccctccgccatcgcctcgctcgcgcagcaatccgcgacaaatccaccagccaatcgcggcatcgcgcccatcccttcccctatactgcaaatccgcttccccgagatggtaatttccttccgccagtctctcctctcacgatgtttaattgcgcgcatctctgtttcttcggtctagttatgtcgtttagggtttatgaccaagagcagatggtgaaaaatccggagttcttggtcactcggcgtgccattccatatcttttatgcgtaataagaccttttttttatgtttttgtttcccaaattttgctgtctggaaataatttcttgaaagggttggctttgatcgtttgctcgtgcaggaatcctgtccttcggtgaagaacattcttgtgctggattccgaagggaagcgcgtggcggtgaagtactacagcgatgactggccctctttgtcctcgaagcaagctttcgagaagtcggtctttgctaaaacccagaaaacgagcgctagaacagaaggtgattaaaatatacttttattctagttctgttctggaagaatcaaaacaatgtttgtttcttttttttcaaaaaaaaaaggtgctctgtgctacttgtgtagagaacaactgccttatccctgagaacatcaattagcaatttagcatctcacaatatggcattgttgattattgtaagactcctgtggaatattctagaggcatacacatatcttccagttcgagcatcattccattgtttggctcatcttctgtaaacctgtggtttgcttgttatgagatgttaattggtcgatttctgaattttggcagagttatcaccagattttgctgtggaatactaaccttatattatagaataacaggttatctgttttttactgctcatgaattccgttgcatttcttaaaattgactgaaagattcaagtttcggaaaaatgaatttttgttccaacaaatgaaatgatctcgatgcctgtgtcatctgaaatgccttatttttggttgatcattcattttgggggattttagaataattgcattgcacatgagtgtaaaatttgcatggtaggttgtttagttcaagtcatccaactatattcatccagtgatttctttcttttctttcccaatttgcagctgagatagtaatgtttgacagttacttcgttgtatacaagttcatccaagatctacacttttttgtaactggaggtgatgaagagaatgagctcattttagcatctgttcttcagggcttctctgaagctattgattaccttctcaggtgtggacatttcctgtgccgtacactcctatcttttttaacatccattataaatgcttgtcagtactgtatactattttaacaactctctttcttgttttcagaaacaaagtgcacagaagggctgcgcttgaaaacttggatcttatcttcttatgccttgacgaagttgttgatggagggtaattactatgtttgcattgcaatatgctaacctttgctttccatcaattgaacaagcccagttttgataactatcacatttttacgttcatatcaaaggcaacagacaaggtcttgggcttgtattgctgaaatgtgaggttaggcactagttggttaatgtaaagaaactacactctggccttgtttaggtgatgagaattgagccagaattttacacaaaatcagcattgacagctatcagttatctataatatttttatagttcattgttgggtatgctcagttcacagccaaccaattttcagataaacatttgcacaaatgctatgctaatgtagaacatctacaatcaggcatattaaacatttgacaacctgtagttattgattgacgctactaattgtttcttcacaatcgggttttgcaggattgttctggaaacagatgcaaaggcgattcttgaaaaggtatcaggtcatggattggaaggatccgggtctctcactgagcaggtatggcaagccgtcgcatcaccttaagtgcaattgcacaatgagatgcaatcatggtgtcgtaattgccaccaaaccaacatgagaaaattcccaagtgaattaattcttttttgtacatgcagaagttaagcagtgccctagcaacggcaagagaacactttgcgagatctattttcagctgatggcgtgtcatccttcaggttgacgatgagcaagcctcagatagtgtctctgttagcagatcagtactcccagtttgcaatgtcctttgaacatttgccacgggttagtggtaggtgcagcttaactggcgatcattgtcatcctaagaaggttgtggtcggcacacttgttactcttgtggtttcatgtcgatcttggctgtaatcgagcacagtaaccatgtagcaacatgtttctgctcaaagacgagccagtttccaaattgtcttcagtatacagccgccatgttttgacgtagtactacatacatttacttcggcctggtttggaatttgaatggtattctttatagctaagttgcttaataatgtttgactaatttcagaatacttgctatcaaaaccgaccaatcatcgaaagtaaccaaaattcgcattacaattctatcacctgttggtatgtttcatctcatgtcaaggtaaacaaaaagagacaaaagtaatcaagcaaagcgaccagaatcacgccggcaaactgctgccaatcctgctcacatactggcacagctggtccctcagcgcggccgcgccgacgtcggcgacatcgctgaactgctgccggtagccgtcgtcgtggttgtgcgacggcggcatgccgcccctcgccgcgtcctcgaggtcgatcatgatgttggtgagcaggcagcagacgtagatgatcctcggcagccggtgcttgtccggcctccacagctctcccttgagaacctgccacctctccttcagcttggccagagcaccctgcaccaccatgatcgtcgcggcgtgccgcttgttgaagtcggctttcgccggagatagatccttctcacggtatggagtcatcagccagggaaggagagggtagcttgcatccccaagaatgtagtctctgaccactgacccagctggctctcctggaagctccgtttgtccgtccagcctcgcgcctttctcgcagagcctgtagaatcctgaggtgcgcaggatgcacgagtcattcaagctgccaggccagccactgacaacgtctctgaaccgcatgtcggcatcgacgatggcctgcaggaccatgctgttcctgttctcgccgtcgagccagacattgctgttaggctgagctgaagagcacatgaggatgtgcgttgtgtctatggcgccgcagcagttggggaggccctgaatcttttcaaacttagatttgacggttgccatctcctcaggagtaggccacttaagatgattggcagcgcgctcctccaaggcctcaataaacttccaagtgatgtttgagatagctgagtggttcatcccgaagcggttccctatgctcaaaagcgactcaccggtggtcaatcttaacagagcaacacctacttgatcttccacgcctagaattgccttgtctccaaacctgaaatttctgaaactttgtgtctttcttgtgaagtccccactaatcagagagcaaaggtagtcaaaggtcttcctcgacatcttgaagacggactcaaagttttggcagtctttggaaaattgtcctgtggacataagacatagtcaaagatcgcagtggcgttagtcgagcatatcataaattatttggcagggaacttgaaagcataaaagggaaaattcagatatattgaaattcaaagaattcgattcgttctcctcatattgaaattagaagggcagaggaagaaacggggtaaaccttatgatagcaaatttaacagaagagattcaaatctaatagaacatggtccacaagtgtcgagaacagaaaatgaacaatactagcaatatcatgaatgaactgagcatattatatgagaaaaggtttagctgttttggcaatacagtgaatatcgattcaaaatttagaagaatcatcagtagaagggacactgcccttgttaaatagatgactagaatgctatcattcctgtatctaccttcttaaatcactcacacttgatgctcaggtttgtactaattgttcaaaatgtcactcttgtcaaaatttgaaaattctaacaatgtcacttgtcataaaggataggtaggcattcaaaaccaatgttttccagtgtttcagatcatttcagcaatcagggaagctcagaataaatatcactaacgacttcaagaattcaaaaatatattgtctatgtttttgtaagaacatgtatgatcaaaataagaatacagcagccagacaaatagctatacaaatctactttatttgttcaagctaaattgtacttgtatgggctgcttcacccaatgatctctgaaagactcacttgaacaccatacagagaggcctaatgaatctatactcctggatgatctatcacattgaattataaaacagtatttgctgtggtaccaggtactataagattcaagaaacttatcgtgggaatccatttctcggaacacatcattcaaccgacctacctttgagccacactaatcattttctggatttgccagtcaatctattggaacccaatcccctcacgtgtttcctttaaaaaaaaatattaacagccaatcggatgatgaaattggggaaactacctgtgaacagatgagctaattacttaaaaaaaacgcatatgctacactttacaattctggactgaacaggcaaagcaattcgatggcaagtacagactaattgttctccgggagatgttgttttccccttagcaaaatgaagttacttcataagttgcaaagagaaaagaagttagttcttgcaatgtcaaggcatgaacagtcaaccaacctattctgaattagattgacacaatgggcaaaagccaacagcacccgtaaatttctagccccaaaataccattgcaccaaaggcttcatagatctggattggagaaggaaacaacaaaaccacagatggcacaaccaattcttctcccaaacacggtctactcgatcgatacccatcagagcaacggcattcacaagcttttccttgctcataccctcggagcaatcgacatccatggtggtctccaatccagaacatcccccccgcccgagatggttcgctgcctcggagcaccgtacaatcccaccacctccaaaacaaagcccaccgaaacagcggatttgcaacagtaaccaccctgattaaggagcactgcacgggcggattaagcgaccgcatcgaacagataccgcgcaggcacgaacagtgcaaattcaacggcgggtctccctgatctaaccccgcggaatccgcccgcgaacaatcccaagcgcgcgagggggttaagcacgcattactcgccgccgacgagggttacggtgcgcgggcgcgaggtttacagcgagccaaggaaccagggaacgggcatggacatggttaaggacgaggagcacagtgctcgcaaacagggaagagacgaacgaacgaacggcaagacgtatacctgctgcaagcctgcgggcgaagccgtcccaccaatccccgccgggcgccggcgccggcatcgcctgccccgccgccggcaacgccttctccggctgccgcttccgccgcttggctcccctcagtggtgccatgacgagacgagacgagagcgacgcgaacgcgaaccccggaaggaggagaagagatcaagaaaagaaaaaaaaaacgagcaaaccaaccaaagcaaaactcacccccaatggcttagacttgaaaagacccagttgttttagtgcctaaacaaaagcagccgcagcagcagctgttgcccagactattctgcttccgttatttttcaggcccagaggcatgcaagaatccaacaagttttttttttttttttacaaaatgtgaactcatgtgcttgtgcaatctgcacacagcctagcctctggtttttttttttgtgtgtgaggaatgtgagatgagatgagatggcatgcagatgcaacacagggcttggagaattggaaagacttgggcaggatggatgggttaggtcaaatggaatgctctttgttatctacctatgtgttattaggtggtctcctcagggctgtagtgtaaagaaaaaaaaagaaagagaggagattcttttgtttgataagcttgcaaattagttgagaaaaattcaaggtaaaaaatacctttattgaggagtgtttgggtaacctgcccaagggatttgtataactgactgatgttttttggggatctctgttgctgttcctggtgatagaactgatgatgctctgctgtttcatgtgatctgcagggcttggacaatgcttacaaggtagctctatactgctatatatgggtttctttacacatttctcttcctttctcgttgttttcacgctcggtcagtttaatttaggccgggtttagttcccaattttttcttcaaactttcaactttttcatcccatcaaaactttcctacacacataaacttttaacttttttcttcaaactttcaattttagtcaaacttctaattttgacgtggaactaaacacaccttaaggaggggatggtaaattggatttttttttaccccctgaataagaacatcagcattttgattgatcaacagatgttttggtttagcttgcattggtttcactagatgtacaaacacaagtgatgtgaaaatgtactgaagcatatttatagtatatgttgtacttaattaattcacgccatggtgtaatgcaagtatgcaaatattaaacaccgacgtacctgatgtcttatgaactacgaaaatgaaccaacaaccttgatttggtcacgtgtagatcggctggtgtagctatctgccacgtttacataagaacccttttttttggggtaattttgcaatgaaatatgccatttggtttgttctaattatttggttaatggattcacacccaacttctggagaaaaattcaagggtaaaaaaggaaacaaaaccttgtagaaacggtcccgggaatagtacatcacctcgaaaacgttttctggtccctttcttaggccccactaatgaacatatccaaatccaccggaaatgtctcatgcttaacttttttgctaggcatgaaccctctgctaatcttgattgtgcctaactaatagcacagattgcaatatatatgatctttacacgtcatatttaagtgccatacatatcttaaaaccggctccaaaatcaacataagtaaccaaacattttaaaaagaccataaataatctaaacataataacgataccaagacacagtattttcttataaggtttatttgaaaaaggacgtgtacagtacaatacattgatagtatataatactagtataaataaggttacattaggaatctatcatcccaattgcattaattacaagactcctatctgatctagcataattacaacgtatcatgttatccacgaccatcgatcggataggacgccgaccaatcatccctcgtctatgttattatcgttatacgattacaaccgatggtgcctctctatttaagagaaactatacgagagagttcgaccctaattatatcttacatttattataactccaaattttaaaacacaattgactttgtacacattcaacacatactctaacagaagaaatcactcacatgtgtggtctgctgagctattttaaatagatttaactaattaatgatttgattatatagacaacatatacagtgatacggataatgttaaatgttcagtagaccgtatgttaatcaacgttgttgacatcatggcattgtttatgcacctttgacctttatcttccaattcctcaggaagatcggagtataagacattttagtcataaatatttattagctgtgtgcccaacaacagagaaccatttcagttatataaaaaaatgaatcatgtgcgattcttcatttcttctagtatcaatttgtaaatcaaaataatgaatcactacgaaaaacaattgttcataatttcttatgcacagtatattcacttctaattgttttaatcagggtcaagcgactcaagcctggttaacacctatgctacagtctcttgatgtcgtgtgtgtttgaaacttatttcggttctctcttatgtcatttatgactagattcagatgcagcacatcgtgtctgggcatggttcccgtatctccagcctcaccgtatgcccaggcgacaatattttttttgaaaagactacagataccaatattatttatgaatagattcacacttcgagctttaattgtcagcttgttatcaatcacaaaattttaactgaaacttagctttagccatgttttttttagacattggatggtttggaaggaaagaaatgtgcgtgtgtttcagaaccagcggcactcgacaagtttcatgtttggttcaattaaaaaagaagtggcgatttggaaggaggttggggttttcagaaatatataagagagtaatttctcggtgtattttttttttttttggaggttgctcatgtgacaactttcatttacttcgacagcttcgtattgaagtcaaaactttatatatttgtacatatttctcagtcttaagtaaatttggttggcctatcatggccggcctatcattagccatgttttagaccgctaatagtacaatccataaaatatctttaattgtcttgtttatttctatacgttcttatcagctatagctcaactgatcgaaacttatctattatgtcccgtgagagaaacgtctatgggtcttcctgctagttctacaaagtggtgggctagacgatctggattcgaagcctcaatccttctaattattgaatattagatcattccctaattaacattcacgtttttccatttcgtcccgtgtcaatcttgttctgcttgtaagactacctatattaccacttcggtcagtacgtgccaattttgattgacagatgagaatcgggatcaacgagctagccacttagccagcaggataacattggaacaagtagcaggtttcaatgttctcaaatgaaaaaagtagcaggtttcagaaagtttggcaaggtatcaacaagacaacaagttcacaataagcttcacaggggtttcaacgatttttcaagtcgaagttctacaattctacgttgcagcaaagttccagagaaaaaacattcagatccacagctgccagtctgcccagttgacgctgtgcctcgtagtgcggcttgcccaccggccaccggccacgaggcccacgccgtcgctatggggctcgatcggctaggtggcgaaccgccacggtgttgggacaccgtcggtggccgccaccaaactggacggccaatctagacttcgcccgccgatcactcggcaaaacggggcggggtccgatcgccgagtctggctcgccgcggcgctcgcatcgcatgccctcgtcgacgggacaaacgctactggttggtcgccggtccgtgcggtggtcgtaccacggaatctttgggtattcccggcccccacgatgatttgttacggaatgatatacggttctctgatattcccgtcgtccgtcgacgattaggcgctaaactggcccggcaaaaaaaaaagaaggaataggtgctaagcaagctgattggcgatagaaaaaaaaatatgactgtctatggatcatttgatagaaaacccctcaaaaatcttgcaaattttagaccacccgattgctttaagattcgtgcaggcaatcaaaccctaaaaatcctctcttctctcccgattcctcacgcgccggcgctcctcagcgctccccccccccggccggccccctctcctctcatttgcctcaagtcggcggcggcgagctgtccgttgtcttccccgtcgccggcggcgggacgctactgcaggccggcttcgtcctaccccttcttgcccgcttggccaccaccgacagtcttcagccccgcggcttcaggaagagccacttcctgcctcaccgcccgcctgatccgccacctcccacggccatccctctaaagccggcgaactcccccctcttccccctccccctcccccacccccaccccaccccaggaccctaattcgttggccctctactggagtttgggttcgccggcgccagagaagaagaggtggccgccggagttagagaagaagagcacgaatcgtaaagcatatccagtgatctaaaatttgcaaaatttgagataagattttctgtcgacagagttttagcaattccaaaaaaaaatcccaaaacattagctgtggatacgtatgtctacgtgatgagagttagtggcagaaagtattgtccaacttatataattatgcagaggactattaaaaactgccgtaaatttttaaagtgatctttcaaatctgactacagtatagttataatatagttttacataactacaatatatatatatatatatataaaagtataagtattaaaaaatatatgtaactttgtagtttgtactaagttatatagatattacaatgtaattacactatacttacactgagttcgatgtaactcagtgtaagtatagtgtaattacattatggttacattgagttatattagaaagttttttgaaaaaagcttgcgacagtttttagcaattccgattatgcaacattgaataactatgatatttgattatgttgatatggtacatatgcctctaaaatatttttaattgtatcgtggctttgtttgccttacaaataaaatgcctttacaattaatatatgtggtcagttttttttttcatgtctattgcattgcaccgagtgcttagtgagtttccccgtcacactatcaaacaggaaggatgcagctttgtgtatctttgacgcggcggcacagttatctttataaatgagggcaacatatactatgcacataggccctcacgtgtacacacgtgcacaccaactaaaaaatgtcaccaaaaaatctagaaaaaatcatacacatacttttaattgtattacacctagggttaaaatcttaacatcaaattcattatattttagccgtaacaaaaaaacaaaaaatctgacagttttaaagttgcaattttgtcagaattttatcttttttgttattctctatgtagaatgaatttgaagatacgactttacacgtagatgtaatactattgaaagtacatgtatgaattttcctagaattttttgtgataatttttagttggtgtacacgatgtgtacacgcgagggcttgtgtgcataggatacgctcccataaatgagaagtgtacaatttatctatttttttaattgatatattaatggcgtgaagtattaatacatatcaattcactaaaacaatactaccacgtgaaagtatacaaattagcgaacaatttccacttccacacatggctacaaaattgaataaatggatgggttgttgcaataggcattattgcccaaaaagagcattttatctcttgtctcgcacgtgaaggtttcttttatttcttggtgggttctacgatgcgctagcaacaaaaggtataaataaaaaatagaagtctttcttgtgacataaagtcaaagggatatggatcactgacataagaaaactacacgttagagacacatgtccctctgatgtatgttagagaaacctcgtcaatcggaggatagaggcgaattgatgtatgggtgaagtggcaatgataaagaatttgggttcaaaagaaaaaaagtatttggtatatacccagttacatttatacatgtaaaactttatacatcatcttggtgttggtgctacaaccaaagaaaggtaccaatagcctgtacccccaccaaaagagtacatattggtacatcttcttaagggcatataccaacaatcccaaaccccatctttgctgtacgatggggtagataggtacacaatcagcagtagctcaatttggaaattaatgacccggaatagccacaagagagcagtagtaaccctgctgagcattgacaatgacaagagcgagccacggaatggaggaagccggatcaaacggctcagaaagatcggatggtgacaggtcagcttgccgttcccgggccgtcaaaaagggcatttgccataggaataagttcacattgggtccctctatttctcgttcagtccgattttcgtcccttaccgtaaaaccgggtacgacccgtcccccaacttacgaaaaccgggcaaacaaagtctcttggcggttttaaaggcggttttggctgatgtggcgcctatgtggcttagtttgactaggtctctatccgacgtggcaatgacgtgacgcttacgtggcaatttaacccaaaaaataaataaaccttgtgggacccacatgtcagtttcacacagaaattataaaaaaaaggtggggcccacgtgggccccacatgtcagtttcacaccgtctttagggacatctagtgggccccatgctggccttcacggacaggcagctcaagtcccttggcggttttgaatgcggttttggctgatgtaacgcctacgtggcttagtttgactaggtctctgtccaacgtggcgctaacgtggcaattcaacctgaaaaataaataaaccttatgggacccacatgtcagtttcacacagaaattataaaaaaggtagggcccacgtgggccccacatgtcagtttcacaccgtctttagggacatctggtgggccccacgttggccttcacggacaggcagctcctcgtcgtccaggacatcgcggcggtgctcttcccggccaccgagtgcgtcctcggcagggacgacgacctcgtcctcctcgtcgagtctttgcccgccaagctcacggcgcgatcgacggcctcgaggccttcgccgcaggcgccgtggggcacccgctggggcacggcggtggtggcggccgagcacgggggagctccccatcccatccactgtcttccgcttcggcctagctcgccctccgctgctctgcccgcggccgtgctcgctcgccgcccctccgccgccgcgctcgccctccgctgctttgcccactgctgcactcacccgccgccgctcctccgccgcgcttgcatattttttgttagtggctggttgcaggaagcaggtaaattaggtagctaacaacgttaatgtgctaagcaagctaatgaattaaatatgactcatgcatgagtcatgcacgtaatggcatatatacatttgagtgtgctcagccatagacacatgtttggctaatatatatgtctgcatgttgttggcggcaaaccaacaagaagctagctagaggctatagctggtcatctccatgcatgcatatatatgctcgtacgaagacacatatgcatgcggccgtctgtacccggcgtatatgcgtatgaggctatgagctactcctatgggctcggaaggaactcgagaacttggaggttgtcacggcggacgacggcggcagtggcgatggcaacaccgttaccgtgcatggcgacaaggctcccgttgatggcaaaggagaggcagcgactccggcgaaacgcgccgacgtatcaggtggccaagaatgcggcgtggtccgcgtggaggatgtacagcgggtggagacgccagctgcagagatcacgaatgccatgaaggacacggagatcgtgaagaataaggaccaggagagaggaggcagcgagagggaagaagaggagactgttgccatggccggcacggggagcagggaggaagcatctcttcgatacagcatggaaataggggaacctccttaccggcgggagcggcgggacggcgggtgcgcttgcactaactcgtggccgcggcgggtcaggaaggcaggcgacgctgccggtcgctgggctgcggcggcggatggagtcgcgtcgtcggtaaccgctggcgggcgcgggcggcgaagggcgatggaggaaaaggggagagaatgacaggtggggcccacgtgggccccatcttttttataaatcttatgtgaaactgacaagtggggcccatgtgggccccaccttttttataatttctgtgtgaaactgacatgtgggtcccacaaggtttatttatttttcgggttgaattgccacgtaagcgtcacgtcaatgccacgtgggacggagacctagtcaaacaagccacgtaggtgccacgtcagccaaaaccgccttcaaaaccaccgagggacctcgtttgtccggttttcataagttgtgggacgggtcgtagctggttttgtggtcaagggacgaaaatcagattgggcgacaaatagagggacccaaagtgaacttattcctttgccatatgccatctccgaataaattcagcccatttaacgttgtgggctgaacaaagagaatgaggaataagttcactttgggtccctctatttgccacccagtccgattttcgccccaggtcggttttggctgacgtggcgcctacgtggcttgtttgactaggtctctatcccacgtggtattgacgtggcgctttatgtggcaactataactcggaaaataataaaaagtgtggccccacatgtcagctgcacacaaaaaataattttaaaatggtggggcccatatgggccctacatgttagcctcacccctctcttcttccctctcccttctctctcttcttccctttcccctctctctctctccccttactgggcatggacggcgcgggtgggcggcggagcaggcgagcagagttggagttggagcgtggcgagtgacggagaagcgagcgcgccggccgggcggtcggagtcggcgagcgccgcgacgtcggaatcggccgacagctgaaggtccacgtctggcccgggctcagctgcgtgccgccggccacaccgtgaacgagcaccggttggtgatggtgaaggttgccgcgttggcgccgccggcggcgagggtcgccaccaaggccacgacgacgagcactgcagaagaggcggtcagagctgacgccattgttgaatatcgatctctcgaagctagctagtttatattgcttcttaggatatatcgatgtatgcggccggcggtggctgtatcgggaggtggaaggggacgcgcgcagtcgcagtgctactgctaccaccaccaccattggggctgggtgtgcgtgggtcggagagctcgaggattccgccgccggccgattccgacgttgttgtgctcgccgactccgaccgcccggcgcgcgcgcttctccggtcacccaccgcctacgccgcgctgtccgcggcgctccggtcggggggcagcgccgaccatgcccgccgccgctgccggagctcgcctgctccgccgcttacccgcgtcgtccgttgcgatagagaggggaaggagaagaagaagaagagagaagggagagggaagaagtgaggagtgaggctgacatgtggggcccatttaattttttttgtgtgcagttgatatgtggggccaagctttttattatttttctgagatataattaccacgtaagcgccacgtcaataccacgtgagacggatacctagtcaaacaagccatgtaggcaccacgtcagccaaaaccgccttcaaaaccgccgagggatctcgtttgcctgattttcgtaagttaggggacgggtcgtacctggttttgcggtcaagcgacgaaaatcggactgggcgacaaatagagagacccaaagtgaacttattccaagaaatgacgtgtggcccgaagagagagagagagagagatatagtacagcccattatagcattgccgatgtgcgttcttccactaggcctgacgcttccaatccaacctcgtcccttctcgtcagcccatcaatccaccgaccttgatgaatttttcgtctcgtttcttcttttttctcttttttattctctattggagtagagcatgtctctttttaaaaaaaactgagtagagcatgtcatgttcatcgctcaatttccacgttcctcttgcgagggttttgaattccatgtcaacatacgttcacgcggttgttcaagctgcacgtgtgagccgcgcgaaggttgaccgcagtactgtcgagaattggcttctgcccttatctcaaagctcacataaaaaaaacagggatttcgagttctggatgtagacttgaacaaatgaaaagtaacatgatgttgttttcaagccaggcaaactatcgctggatttcaatgaaaaacaaatcatggctggagtaagtaagatttgctgttgcatatacgcgccgccgtctgtctgcctccagtctccactgcatcttccagtgtccagtcttctctctagtctgtctgttttttcaaccacggccggtctacaaaaggtacaaatcaaatccaccgttcttgttggaattgcttaaggccaaatccattcgcaagtcaagcattcagatttcactataggcatccaataaaaaaaaaagagcatatgggagtatatttgttagcattcccttcttttgatcgtttcccctcttctctcgtacagtacctacctacttctttggatttgactgtacttactgcagagttggtaccaactgccctatcaaccacactaccacagttgctaagcatccagaaattcagaatacgagtattaggcgatcccaaaccctccctatcatctccctatcatctactgtccatgtggcaaaagaattaataaggagagagataaaaaaataaagaaactatttcttatacaagaaactatctctacacagtaaccaagaatgaaaacaagaggatatgtgcagccccatcgtttggctatttggtggaataagccaaacatcatatttacaaataaaaaataatctgtgaataaaacttttatatacatgttctaagcgatttaaaagcaaaggctgaaaaataaactatgatggaaaaactccaaaatcaactccaaatttaaggttgaaaattcaaattttggctgataagcataatcataagcgaaaagatgaggccggtggataaaaggagagagaagagagataattagataataatttaatctgaagacatcattcattggatatatagtttctatgcataagttgtgtttagttcacaccaaaattccaagtttgtttgaaattggaacaatgtgatggaaaagttggaagtttgtgtataagaaagttttgatgtgatagaaaggttggaagtttgaagaattattttggaactaaacacggcgatagtgcttatatgatatggcaagtatgaaaactacttgccctaggggtgcgtttagttccacgccaaaattgaaagtttgactaaattgaaagtttgaagaaaaaagttagaagtttatgtgtgtaggaaagttttgatgtgatggaaaagtttaaaatttgaagaaaaagttggaaactaaggctgtgtttagttccttccaaagttggaagtttggattgaaattggtacgatgtgactgaaaaattgtgtgtgtatgaccaattgagatcccctgcagtactgcagcagtactgcaggctgacatgtgggcccgagggctgtggggcccacatgtcagcttgcagtactgcacatgcagtactgcatgtgcagtactgcagacgacctgtgtccgtgtaagacaggttgaggtgatggaaaaaattggaagtttggatctaaacacagcctaaagcactactccctccgtcccaaaaaaaaaggtaaaccctgagtttccatgtccaactttgactgtatgtcttatatgaaattttttttataattcgtattttcattgttgttagatgataaaacatgattaatattttatgcatgacttgtctttttaattttttttcataatttttttaaataagacggacggttaaacgttgggcacggaaaccatctaggttggggatgacattagtagtagtatctcacatcagcatgactgacatccacatcagtttctggataaagctccaagttgacttctaccagtggattgtatatactcccactctacccgtaactaccttgccgacttgcagtagcacgcgtccggtacgcgagaagcgcactccatcaaatagcttccggatgtactggcagtattctgctttcgcctttcggcacaagaaatacacgtatgcggaaaaagaaaatcaactgaaacaacaggaggaacaattaaatttcaattcgttccggaattttatatgcctcgccacacgtacaggcgaagtggtcgttgtcccacacgcctcacgccccgtgcgtggcgccgcacgcgtcacgtccgccgccgcgcgggttcgccggttcgcatgctcctctcgccgacgtggtctacacggccgccgcgcgctacactatcctttcttccagtagatttattcccacgatcaaacgcgcgaatatttatcagtacacgatacactagcttagctcgatcgggtgtccatgacgacttgttgcaccgtccactgacgtgacggaatggccagtgcgtgcactttcgattcgtcaagatatgtacgtacagttaccagatagatggtcaatgtacgcacacgattaagcgagatggacagccaagtgggatgactggacggatactcatcaactcgtgacgaatatccgtatcctgcccgtgagcacacggagagtagtgtagtgttcctttttcgctcgcacacaactgccaggtgacgtcgcggcaaacgtttccgtttcccacttgctgatatattctcctgcactctgttggagccagtcgaaaacggaagctccaggagaagattttttttaaaaaaaaattgaaacggcggctgcagaagcgagttcctgaagttgacgaggcttgtgaatgatcggcttctggaaagcgcgcaaaagcaagcaaacttttagcccaaccgataaaccatgtgtgcgcgaccgagcgcttcgttgcgttccgacccgagtcggggcacgccacgggtgcacatacgtgatgcacacgtacgcgagcagcgcgaccgcgtcacgtttcttcgtggccaagcctggcgcgctagctacctcctaccgctacctcgctcgctcatgcggcttgcttgcttggctctagttagtagtttggcgcccgcgcgcaccaaccttgacgtgaacgactctatcacacctcattagcgcatattaaccgcgtactctctatatataaaacgagtacgtccgccaacgtgaagggaatttttagctcgtcattaagagcgaaagaaagttacttggaattctttggtttgttgtaatgacaatcacgagagaagaagcggagagcaaggagatggagagcctacgggtgcacgccagcgcgctgctctcgctgtcgtcgcctgcagcgtcggcgtcgcagccgacgtcgtcgtcgtcgacgacggagggggtgttcgagtgcaagacgtgcagcaagcggttcccgtcgttccaggcgctgggcgggcaccggacgagccacacgcggctgcaggcgaagctgctgagcgaccccgccgcggcggcggcggcggcggccgagagggacagggcacgcgtccacgagtgcgccgtgtgcggggtcgagttctccatggggcaggcgctcggcggccacatgcgccggcacaggggcgagacgggcacgacgaccgtcgtgctcgcggacgccgacgactcgggcggcgccaccgtgccgcagccgccggagcccatgccggacctgaactacccgccgctggaggacgccggcgacggctcggagcctgagttacttaaccttcttgtataagttgcatcgatagatatacatgtgaattgaattggcgtctgtacatagatatggtggatggattctttaccaaatttgatcgaaaaaaagaactaaattttggagcgtgatgatcatagcatgtaagttgtaacaaatgattgttaactgtaagataggaattctattcatttgttctcttctgtacaaaattacaaataggttgattaattagttggtcggttgtggttgattctttgtaaaataccaatttactagtataaatatactgacagcttattgtttcaattgttttgcatccttgaaaaatccttgtttccatgatcgtaataggaagtgttctttcccaacccgcaagaaagtaagaaacggtcgatcagagaggaaaaagtgcgaaaacgctaatccatggttccattccatggaggaggtcaacatttccaggcgtatctggacctcctagaagtccaatcgtattagtctgggctgtgaaccgatctattacaaaccgtgtgggctgtgagcccaagtcaccaactcatattttgtcacttgggctagactatgtaacactgacgcgagcccaatacactagaagtccaagattttgatcagtgcttgtattcctaatagattacttgcacactctccagaaatagttctttagtacataaatgatgcattcattctccagaaaatgatataacccaagacaccagacagtggtcagaggctagtcactagaggcatatacagaacataattaatggctaacatataggagtatcaatttcggaattatcatcccgtacaataggtagtatgagatcaccacaccggcgcaagcctgaacccaagcccaaactcctcatcccccgtgccttttgctcccgtactgcccgttcccgccggagatgaggtaggcgccgccgtccttcttgcccctgggcctccgcgggatgcatctgtcgtgcatgtccacggcctccgtcgacggctccaccttctgcaccctgccatgccgcgaggcagagatagcataccatcatatcaccaactcatcatcatcatattctcatcgtactccatgacgccacacagaggcaggctagcctggctagtagtattgggttctttttaagcaacggcgagcgccgtgcagcagcagatatgatgataactacgttatcaggttctgggttagggctctggaccacgcttaaagcagagttcaatgacttcaaattgctgacaaaggctggtgctactgctgctaggagctcgcgtcatattcattagttactccgatccctcacctcgtcacacacgtgattgagtgcggcttatcattgacgcgatatggctctcaacgagctaatcaaggcttttcgatgaaggctcgcatggattaattagggcgggacgagaattcaagccccgtccctgacattccccattcatcccgtcggctctgtgcgagacagctccgcgagacctacttccatttatgaacgcaaccactaatcaggtacactactcctcatatcttgcatgtacagcaatggcatttgcagaggagttcagtgccgcactagcaattcttaactgccgccacggcagtatggttcaatgcaacagtaccagttcatgtgttattccttacaactacgactctacgagagatttagaggcaaccattcaaccaaccaaatggagttctaaactgctacggcatggtaactaactggtcgtaccgatttggatactggcgttgaacattgatttgcattgatgttttgcgactaattaaccagctatggatggattggtgtacctgtcggcgttgtaagaggatgaccgccggagaacggcaatgtcttgggacgtgtcggccggcgacgagcgcttcgtctcgacgaggctaccgctgaagtactccttgtcctcgacgatcttttggcggtagttcgggatctcggtggtggtcgacgcgagtgtaggtgggcgcggtggccgtggacggtagtgcgcggcggtgcgagccatcaccggcgaggcgagcgtgctcttgacggagacggacccgcacgagatgagctgcatgagcacggacgacgccctggtcctcccgccgccggtgacggccgccatgacgcgtccgtccgccttgatcagcgcctcgagcgtctcggggctcgtcgacgccgtcggcggcgacgtctcctctctgctcagctcctcctgcgccgccgcggccgcggcgcgctgggcgtgtctaccgcggctgctgcggtaaccgtcctcggtctgcgtcgcggcgtccgcggccgccgcggcggggtcctcggccttgtacaccctgtactcacaaagctccgacgtgtttattcccgcgcccttcttttggcgcgcctcgccggtgccgttctcccacccgggcggcgaggacgtggccgtctcctgcgagcccgaggagcaggacgacgcggcggccgcgtcgagcagcgggagctggatcgggtgcagccgctccgtgcccttgagcacgtactctcgcccagccaccgggtagatgtagtcgtcgtccgccaggtcgtgccacacgaacccgttccggtagctcctgcaatattgccacaacattgaggacgatcccatgtccaatgctcgcttgcacctcactggcaagcaagccacaacaagaacaagttcgtgaaaaaaactaaccttttggacgcccacgagtacatgcgcgccatccccttgcctctgagcgcgtcgagccggtcgatcacatctacgcacagcaacgacgacgacgacgtcacggaacggcggcgaatgcagcaacaaaaacaaaagaaaaaccgaaacgcgcgacgacgagacgatcaagctgagcacacgcacgtacctcggaggtagagcccgtcaggtgaggcgacggcaacctccatgaaatgcgggtgctcgaggtgcccgttcctcgagaggtagtacacgacggcggccctcgccggccccggccttggccttggcggccgcgacggcgccatgtcggggcacctcgcctcctgctgcgcctctcgccacggcagccgctgctgctcccctttccccctgctgccagccaccaccactgccatcctcgtcaacctaacctacccttgctggctgctgctgctgcccccagcaataatccctgagctatatgcagcgagctgcaatgcaaggctgcaggcgtcgtcgtcaccgctcagcagctagcgcttaaagggcgcgagtgcgacacaggggaaggtgcaaaggagggcgcagcggaggcagtgatgagtggcattcaaacgatgccaggaccagctcagctgtgagagagctggggcagagtgtgggttgatggaggcgagagcagcgatatcagaggatttgtagtaatagaaaagcttcactagctctctggttagttgctttctcctttaggttcttgaagtcaacacactgctgcattgtgtatcactactgatgtatggtagactgtcctattgttaagtactggtacctagagcttaattaccggtgatgttgactagtagtagtactaattaaggtgtttgcagtgtgggggtgagaccagtggattaagggtgggtaattattgtgggggactctagagggtggtgaaatggcagctggttcggcgctgccaaagcagttcttttaagcgaaaacgtttgactaacgaggcccacacgtatggggcgcggcgacgctgaccaagactagtcgctgggcccgtatgtcagtgagccaatcgaggacttctccctctctcttaagactcttgctaacgctctgtgagtccaactcccagtgcactgtaagtcctggatggtttgttaatctgattgctgtctcttaatgcctgatgtgtccgtagacaaataagccgtgcatgtgaagccttggagcacgggttgggtttccccgctgatgctgcgagtattaatatttggaagcatttgcgtgcatgggaaggctgcaatccctgtcctgtccatttgggcctccttccaagtcccaattaaactccctgcccctcccctgccctggtgctttgctttgccatggcacagagatcagcgacgcgacaagtgatactaatcccagccacgtgacagggaccatcctgctgattaacacacagcagcggcaaacacccggcgttaacctaacacgggccattaagcagcgtgacccaccaccgcgaggccccacgcgtcggcgagacggctgcctgccgctatcgcacgcgaaagcagaggcgagagaggtgtttcgcttcgtcagggttttgcagcggaggaggacaaggggggaaggctccaccgactacgagatggcaaaatggagggggtgtgtagcctatggcgcggacagcgagacagcacggcgtacgcgcgcgaaaccggagaggagagaggaggctgcgtttgcctcacggagatgggggcggtgcggtgcggtgggtgcccgccaccgccagcgccacacctcgccgcgagcatcgagatccgcgccggccggcgtctcagctcgcgctgccggttttcttttcactcacatgccgcgctcctgcgtctcgatcccggccgcagccttcgcgctttgttctttaccgcgccccggtaattgaagcctgctgattactggggtctactactcgtctagtactcctgattaccggaccagtaattcagtacggattctactgattcgtctgaggccatgcgtgcctactgtcaggtatgcaatcgatccggtcacgcagccgaggtgtgtcggaattcggaagcgagacgcgcgcagcgagcgacaccgtacgcacaggttctccttttaatatttgcgtaggtcgacgtctgtccgtatcggttcgtcgcacatgtccccgaacgtattaggtcgggtcggtcagtggctcagtgcgtaggtgaaacggaggctggaagcttgtgcgggttgtgggcttgtggctgcctgcacggcactgcggattgaatcgggaccagtgcgcgcgttgaaaacatgagacgtctaggtcacgaggccaagaggcgccccagcacgacaaatcatcagcgattcgtgaacagcaaacaaacgtaacaccttaacacgtcatgcagtttgccgacgaatttgagcatgcatacgcatacgcttcactgctggtccatagcatagagatcattctttctcctgtgctggtcaggcacagctgtaataacggatgatagttccagcgcaagaaagatactaatgccgcgggcgataggagtacgtacggtgctacatacgggtgtagaactagcgtgtttctcgtgtcgagctcaccaaaacgacctttttgtgcttgtcctgcctgcttcgctgacctgtatagcttgacctttagaatctctcgtgtttgcttcgcttggcccacaagctcacgggcctacgaaggaggggggatttagtgaggcccactgggccgaaaaggccgtcggcgcgggagcacaaacctagcggagtggacaggtccgaaccgagttccacctcccaaacccctcaaccctcgccgccgccgccgccgccgccgctcgtcgctctgctccgccgcagccatggggaagttccgcaagctcggccgccacgccgcccaccgagtatccatgctcaggtaccatttggcctcgatccttctctctcgagcgcgagatccgcatctctctgtgtgtgtcggagtcatggacatgtctgttcggcaggacgatggtgtcgcagctcgtgaagcacgagcgaatcgagaccaccgtcgccaaggtacgtactctctcctttccgcctaggatctggtcgaacaccttgtagagtgggggcgcctcggatttatgtgctgggagtcgtggttgattccaggcgaaggaggtgcggcgcaaggcggatcagatggtgcagctcgggaaagaggtaaaaactgctacctgtgaaacattctcctgttgccatagaactataacctgaaaaaaattactgtttagtgccatccatgaacctatgtagagctttggattgccgcatttttttttgcacaaccgcgcacacagttctgtagtacgagtaactagtaagcatggatgagtacttgattagttccatgagcgtgacattttgtttactgttaaatttcgtacaagagatgaattgactattgagggatgtagggatgtgtcttcacaagaatggcagtatggaaacaatttactctctccatcttgaaatataagcatttctgattttgtcctaactcaaactatcctaagtttgaccttatagaaagaaagcaacaatatccacgatatcaaatgagtatcattagatccattatgaaatatattttcatactttacctattagacatggtagtagatgttaatattcttctctatacacttgatcaagaacaaaattagaaatgcttatattttgggacggtgtgagtaatgttttacatcgtggttttaatcagattcaaatgagttttctacttttgtattttattttctctcttcgttatgagatggttgaaatgttcaggtcatatagctaatcaatgattggttgtctgataaattgtctcaagtttctgttacatactaggcgatccatctgaatgatgtcttcttgttttggagtcgatgctacataagccttcctgtgattgtgccattctgcatgttaccttaaacgtcttttgatctggctggaatgttgcattgatttatttaagtctattcttaaaggtattcgtccagaaacttatcttttatttgcataaattatagggcacattggatgcagcaagacgtgcttctgcttttgttcggggagatgatgttgttcataagctatttacagagctagcctaccgttacaagtaaaactccttcatgtgttgtgtatcaatttgatttgtttctaccactgtttaaaaatatgtcatgttagcatctcacataaggaataaagtaaaatgcctaccatggtctttgtacaatgcatctaaaaggtgtaggattttatgcatcacaaaattgtaatactagaacgctatgtactggtagcatagggtcataatatttttaggtcgatcctaatgattcttttgtcccttttgaatttaggaaccgagctggtgggtacaccagactattgcgaactaggatacgagttggtgatgctgcaccgatggcatacattgagtaagcttctcttatgatttttaaaatggaaaattgatcagtgacctttccattgggttattagtcagttttttttttgcggggaattagtcagttttgttattcgcttacttttactttgtgtttgctattaaaaaattactaccatgccaccgacttgtttttgcccctgcttcacgtggaacaatcaactggttgagtataaaattcagcatcatgcagtgttttttaaatgaaagaagctagcgtgctaaaagcatcttcaaaccatgcaaagttttttttttctaaaatgctgagttttagctggctgtgccagaaatatatcatcatatcaaattcccagaaatcataacttgctgttttgcagcccaagtcactcgctgtcttcatctgcaggttcgttgatagggaaaatgaacttcgagaagccaaacctgcaacaccacagccacctcaacggtctcctcttgatccctgggccaagtctcgtgctagccaacagtgggcgggacctaaaatcagcgagggctctagaaaagaaggcttatgaaaataatattcatgtgttgagttccttgagactgtattcaattttctgtactaggctatgaggcaccagcttgtcattttggaggagttttgtcacgagatatattgtcaatagaataatttgaacttggctgcttacttttaacaaagcctgatgccctcatgagatgtgtatcatgtatgactgcaaatcattcattgagatatgaaatgcagaattatccatacctgtattattcccggaagaatatcggtggagtactggatttcctatagctgatgtatatgagtcccccttgccaattcgtgattgggttagatgctattcgttctggctattgtgtgtacactgtatacatgtttcttttctgtagactgtagctactgacttcctacatgtccggatcctctgacgtactttattctacgtcagagggacgttcgaccatggatcgccgttccttgcgcatccgacggcaacaaccgttttagtctcgtcacttgtctcaggccccacagcgcaatgtctctgcctgctctccggcccattcattgatagggacagcggtgccgcgccggccgccggagagctcaggccgccgcacactgccgccagcggggaggtcggactaggacgcggtgctagcgccgtccgtcggcgaggtcgagggcgacggctacgcccgccttggtgtttgctgtttgtcccatcgcacagagactgctgttctcggaaccgtcgccggcgaagttggattggaatcgatctgtagccgatcgaacttccatcatcaagttgccttttctcatggaagaggcagctggttgaaaatcttgctaaggcattcgtgctgtcattaacttgtcccagaaactaagaaactacaagtaacctgaagaataaaattcagagctaaccagaagaaaagaaaccaaaactttgccaacagattcacagtagaatgcgacatagcaagtctacaattgcaataagaaaataccaaagaagatggtttttttccttgaagaagagatcaatcgagtgcagatgttaaccaagtaaagaaatctcatggcatgaaatgaagagaagatgagtaacttttctgttctatttgttccccgtatagctctccgacgacggttccgacaacagcagccgctgggcggagccatcgccctcgacctcgccggcggacagcggtagcgccgcgttccagtccaacctccccgccggcttcagcgcgcggcggcctgagctccccggcggctggcgcggtgccgctgcccctattaacgaatgggccagagagcaggcagggacatcgcgcttgcggggcctgagacaagagacgggactgaaacggttgttgccgtcggatacgcaagcaacgacgatctatagtcgaacgtccctctgacatagaatagattacgttagaggatccggttcaatgttcaggagatgttgtcattttcggaagtcacaagcaacacaaccaaaaaacgcaaaagtatgtacggagtagatgctagcagcagtggggagatcattctcaagcaagaattccaaaatatagcgactctggatcagatttagtgcatcttccataaaggattatgatgtgtctcatctaattcttagttattatattttgtgacgtggtaatatttattatgttttgaataaatacaaaattcttcaagataggagcaaaccctgtaacctgctagtagtctgcagcaccaacgttctcttcggccgattcggcgattgcatcagactgaccaacaagatacagaaatcctcatccaccacatccaaagcggcaaagctcgtccgctccaaaaggcccgactttcctgcgatcagatgcagcaccttgggggttccctgaggaccctgacctagcccacggcacagctggtggtgccgttcacacggttccctggatccgcccacaatctgctcgacgaaatgccgcaccgggacgtcgtctcggccacggcggccattggcgcgctcacccgcagcggccggcaccgggacgcggtcgccctcttctccggcattcttggggacggcatcgtgcccaacgagttcaccttcggcaccatcctgcagtcggcgagcgcgctgcgcgaccttcgcgtcggtgcgcagctccacgcctgcgtcgccaagcttggcctctgttccaacgtcttcgtcggcagcgctctcgtcgaccactacgccaagatgggctccgtgagggaagcccagggcgcgctgcaggacacccgcgagccgaacgtcgtctcttacaccgcgctcattgcggggtttctgaagaatgggatgtctggggatgcagcccggctgttccggtgcatgccggagaggaatgtgatttcttggaacgccatgatcggcggatccagcaaggcaggactcaacgaggaggcagtcaatctgttcctggagatgtgtcgggaaggcgtcaggccgaacgagagcacgtttccctgcttgctcacatccgttgccaatgcaggggcgctcggcgttggcagaagcatccatgcttctgctatcaagttcttgggtaagcttgatgtttttgcgggcaattctcttgtcagcttctatgctagatgtggcagtttggatgacagcgtcctggcgttcaaaaagatcaagaacaagaacgtggtgtcctggaacgcgttgatctgcggatatgcgcaaaatgggaggggggaggaggctttggatgccttcaggaggatgaaagctacaggcttgaagctggatcgtgttactcttcttggcttgctgtttggttgcaaccatgctggtctggttgatgaaggttactcattgttcaggactgccgagatggagcagccgggtgtattgagacctgagcactatgcttgtgtggttgatctcttctccagggctaagcgatttgatgatgccaagcggtttcttgagaaccttcccttcgagccaggcattggattctggaagtcgttgataggagggtgccagattcactggaatagggagctggctaagagtgtcgcgaagcatattcatgcactggatcctaaggatacttcttcatacatccttctatctaatgtttactctgcagcaggaagctggcaggatgtgtcaatgatcagaagggaaattaaagaaaagggactgaagaggatcactggttgcagttggattgaggtccagaaccaggttcatgtcttcttcaatggagaccgcagacatccaaagagtgatgatatttacatgatgcttgaatcttgtctgaatagcgaggaagatgaggactgccttgtatgattatcagacaccataaaaaagacagctcgaggaatggcattccaatgaaagctttttcggatcttgagataaatataaagttctgggcacatgtacagcaagcttgtctttgcatatcaagtatttgcttaaagattaaactatgagccctaacagcattagcaagaaatactgaaagtctgaaacagacctcataagatttaagcatggtacctggtaacctggagatgaacagaaatgaccacatgcaactctcaactctggatctgttgtggtgctgaccattttctttattttttgcctcacatgattggcttcttgcacaaagggaaaattgatcatatgctacaaatactgtcaaaattgaattgttagcgatagaactttcctgttcaaatttttttttgaatggaaccagcacgtgagtgtgcttttttttttcctgttcaaattgaaattcctttggatgagaaaacatattcaatcataccgagtgcagaattgcagactaggagtctaggaccatcaagctccagcctcaaatggtttaatagtagacactacacaaaggatagattgtgtagtgtgtacaaaatcaccataatactggtgtcttttgatttaattttttcgggcgaaattctctcatttttggaaagaaataaacttgtttaaatcgcaaatcaaacgttagcgctgaaaacatcagtgaaaggaaactgatctggccacatcaacacttgcaaaaccatgacatgagatgagaccaaggatacacttctaaaggcctgtagagtacttaacatgtgttcaaaacattctatattattctgtaatctaaatcccataaattcggtattattcactctgatacatcacaaactttttccactgatacaaattacaaaatcctccgtaggtagcctctgcggtcactcatttgacatttcctgcagcccgttcaaagcacaaaccacaaattcacaggaattcaagcaccaagagaaacacattgaaagttgtgataagatcagcgattcatttatagcgaatttcaccgatactacattgttccatgtgggaaatctaagagcgctctaaataaacatcagaacagataaacatccaacgaacatgaacagatcacgcgtcttaagacgacgtgaacttggtgacggccttggtgccctcagagacggcgtgcttggcgagctcgccggggaggacgaggcgcaccgaggtctggatctcgcgggaggtgatggtcggcttcttgttgtagcgggcgagacgggcggcctcctgggcgagcttctcgaagatatcgttgatgaacgagttcatgatcgacatggccttggacgatatcccgatatcgggatgcacctgcttgaggaccttgaaaatgtagatcttataagtttcgacgctcttcttggccttcttcttccccttcttctcgccgccgccctccttggcgcccggcacccgcttctcggccttgggcttcttctccgccttctcctccaccggctttttctccgcgggcttcttctccgccttgggcgccatcgggaattcgctgaagatgaaccgcgacgacgacgagtagaggatttgggatttggaggcgagaggtggattggatttgatttgctttcgccgtgtggggaattaggatggggcgggtggggtggggatatataggagtgtgggaaggnacgtgattggtgggttgggtggtggcgcggatcgataaggtggtggggctcgcggccgttggattcgttgtacggctggatcttgacgcgccccggcgtggggatccgtgatgtggcggctccgtgggtggggttaggcggtaagctggagtttgggaagcgaaatgcaagcgggaaacccgtgttttggccaaagggaggaggcgattcgagttggaatttttcaggggattttggcgggccgcgcacggcccacgacgagcattgggccataggcggggggagaccaaccgccgctgggaagatggtcgatccgccggccgccggccgccggccatccctggccgctcgcttctccgccggcttacttgccggccggtacgatccatccctactttctccgtatccactctacatctctacagccagggccacgcccatcgctggatctccttctgcgaagatctggtttagatctaccggtggcctgacctagatttgttgaatcgatctaacacccccctgatctgatggtaaagcttttgtcggttgtctggataatcgtttagatgctgtcaacacgctatttgtagggttcgtggcatagttgttgatttgagtgagtttcggtcatttgggtgctatggaatcgtgctggtattacttagaacggagcgctgagtttgatctgacacgaaaattaacctaggcccggttggacctggtaattgcaggtttgcagcgcacatgagcatgagattaaggctcatggcatatggctgtatcacaaattcacaaatatttgctttgctttttcacaacaatgagttgctgctgcatgcattttagttctcccagcaaaccaaaacagtactatctcatcagctgctatgctttgctagccgttagcatggaatgattgtagtgacaaaactttttttttgggggcatatatgttccttatttcagttattgagtttggttaccttgccgatttcacttactacttgtttgtcatgtaccatcaacatacctttactggatacagaaatatttgtttgtgtatagtgctggtgagacttactccctccgttccataaaaaaccaacctagtactggatgtgacacatcctattacaacgaatctggacatacatctgtccagatttgttatactagaatatgtcacatccagtcctagattcactttttttgggacggagggagtatcttttaggaattgagagaaattcacctacagtttaacatgttgcacagttgtgcatccttgtcatcctgtgctgtttaatgtttatttatgttgtttgacagttatttttctttcagtttcgacagtctactgttgatgtttgttacctgtatatatataactatgtaactatctcccaaatcttaataaaattggatggcccttccttcggccaccctggcaaaataatgtttatctagtctgtaattttaaaacgtctgtaagttgaagagtatgcatttccttttgtttcctccctatagaaacagttcaatgcataccctttatccatagttattacattttgcttcagttcttggatgttactaatgctagctagaacttatttgcattggccttgttagttgtttcctctgcctcttgaaagctaggacatggatgcagatggcttttatgtatcaaaatttaattgtgtatgcaagccaacaacgatcatatagcgaagtggatatcgcgttagattccgaatctaaaagtcgtgggttcgaatcccactatgatcgatttcccttggcttttatttttccttcttgtttctggtgttctgttttcagctgacagggacatattggcatcatccacaagggcacgaggtattcagagttcacttttgaatatggttggtcccagaactttgctgcctttggagaggattggcacggagtgcagagttctgctcatttctaactcttgggagtcttaccatccggttttaccagctgcaaccctgcaaatacatacaagcttgcatgcttggaacttcatggcttatcgatttgccttctgtaatctgctggtagcaattgtgatctttctttttaccggaaatgggaccatccaagcaaggtttgctcgacgatggtccatcagcattatccaaaacatgaggctgtggcgtggtgtggttgctagtttcagaaaatctttttacgttctacctgtgagaccatagtagattcaatccagagttattgtgttcgtatgcgttgcgtggagaaaacatccgatatatatatttgtctgtggtagcttgattttggaaaatttgctagaacaaaaaagggatgtatatcatgcggcgtagattcagtatcaggaaaccctttttttttttttgagaactgcaaactaaaaagagtagtagtttgcctcgagaggaaacgaaacacggtaagccaatatagatttataactgatgaatgagtaaactccagcaagtatttttgtacagcaccgagtattgctccatttataagaacatattacaaagaacggactgaaaccagtttgcagacattgtgtttcaacgttcaacagctagcagatcaggcaggtgcctgcttatatgacgtttgttacgaaaattgtgatgagtggcagtatttcaaagtttctcaacgtttacagcccaagccacacaaatacaaccagagctttagaataggtgacaaacatgtcccagtgctattcagccttcctgggagacgaaaccgcgaccaccaccaggcacactatgggaagtacagagggggagaagtgaattgctagtgtcaactgacatttggaaatcgacagccaaatcatgcacatgtgacgtggtatggttaactttccccagtactgccggtttcttcagagcatttcttgtgatttccttacaaggcgcctaacctttttcttgaagtcatccctcttctctctccattccttctgcgcaagaacagtaggcagaagttcagaacaaaggtccaccaaacagcaggcaaaatacactacgcattgtcctgactacaattttctgtgtgtttaaaaagtcattcaaatgtctggtgtgtaaattcacagatgtttcaaggactatagcagtacctgagaaaattctcagggctgcaactaaccaaataaataggtgaatatctaagatgaaaggtacatgcagaatccagtatgcaaatgttgataataaagttaaatggtttttggactggaagttagattattttgtaggatctgccaactctgtgttttccctattgacaagtacttcaactcttcccccatccctccgtgacagataaaatgccatatacaccaaggcccaggaggaacagagttctcaatttccatagcaaatgttaagtgaacttacagctgcttcaatatttgctggtgattcatcatttggaccagaaagcatcgaaatgatgctcagaactatgctctcaacctgtaaatggaaaacactcattaaaattacaagaatcaggaatatgatgattagacagtaaaaaatggctacttacaaaaagctagagaagataaacatatgatcatgacaagatcagtgacaaaacaaacaagtaactttgcagcattgttcaaaatatgactattattcaaatgcaagattcaaatgctacaattacttttgacttttcagtataccagaagctgagtttgatatgtcaacgatggaatttgtagtgatgtttcaagctatcatactataaattaccgaaggttacaccaactctacatataaggcttcttatactttgaagtttgaaaggatttactatctgaactagataatatcagatgcacaaagattcttatgcaagtttaataacttgctagtccaaagaaaataacgcattgcactttacagtaacaatattagagataaaaggattacaaaaacgaaactctaggtggaaggcaaaaaagttatcatgaatatccaaaatgcaaaacaaagccatcatcattgttcacaattttaggaaatatttgcagtgtggtgttatgcccgtgtattgcattgcagatgcttaacaaactcccaaatttgcatcacaagctctttcctttgtcaaagcttattgattatttatgtaagaaaattcagcagacaataccctccaggcctccacgcagaatatatgtcaagttgtcaacaaaatggaactagtgcagaacagaatgaaaagggaagaaattgcttgcatcatagacaccataattcgtaccgtatgcactggtgtccaacgctcactcgcaagctcataaccattgggatcatcaccaggcggatgaagaatagaaatgcatacacgtccatccggataaactggcaattgaccaatattatgctgtgttaaaattatggatcatggagttacagaaacatgaagttacaatgaggaaagctgaccatttggatgccacatttctgaggtaaatctgacagttggaggactgttaggataattctgtggaaagctcattattgcattaaagtaacctccatcactgaaaataaatgtcattgtcacaaggcagtttgagaaagaacagtttagatcatcaagctaacagcccaaacaccaaagatgaatagatgacaaatcagcaagcacatgaaaagggctctatatctgaaataaggactgttatcagttaccacttactagaagtttaaaccatagtagctaactcattttgagctcatatcaaatgtttacacatttgagattctggaccatggaacaagcaaaccagtaaattcgtttaatgtgtaaagaatccttctgtccaagccaagaaaacaccaaagagcgcattatttgaaagtagaaaatatattgaacgcatatgcaagctccctgacaagagtgcacgattccattttaagcttaccgagactattctttagttttctttcaaataactagctgggtggcccgcgcaattgcgcggctagcatccgtacaaaactatctatcttttacatatgattttacttaaaatttgttaaacaactatctcgttgtcttgggacattggaccgaaccttatcatctcggtgtttctacttttatagtttataagagtcacgtcggtcgctaccacttactcctttgtcacatctccgttatttgcttgctcgatctactattgcttctattcattctccttagaaccttaaaaattatatcttgtagtttttagagtttattggcttgtttggtttcatttttataatatttagaagttccgtcaaatgctgccaatgtacttctctacggccagtccactatcctctctttattaacattgggattttaaaaatcgaacataattatctagaaagtcccgtcaaacgctaccattgtactcctctacggcccgtccactgcctcatctctttattaatattgggattttaaaattcgaacataattatctaagaagtcccgccaaacctttagcggctttgccaatgtactcctctacggctcgtccactgcttcccctctttgttattattgatattttaaaatttaaacatgattatcattggagtttatttgttaatttctagaaatcctgccaaaccatcaacggctttgccactgtactcttctatggctcgcccgctgcctcccctcaaacgttgtgacagtgctacttaacaacatgtctgtgttcctcctcttaatcttaattgggattctatttggagttctgtttataatttttagatgtaccatcaaccgtcatctactactttacaggcatgttgtttctcctttttattatcatttgtcatcattgtattctagatggacttttttttttgaaaattctatattctttattctggcattttatttataaattgtattcctgcatgaactcttctataatttttagaagtcctgttaaacaccgccactgtactcctttatggggtgcccactgcctcttctctttattttcattgggattttaaaaaaacaaacataattatcgtgttagttcagcttttactttctagaagttccgccaatccgttaatggctttgccaatgtactcatctacagctcgcctgttgcctcccctctttattgtttttgatattttaaaaattgtacatgattatcattgggtttattttttgtttctttctagaagtccagccaaccgctataaccataccgcataacgatctatccatcgttccccctcttaatcctcattgggattctatttgggttttttttcaaatttgtagatgtcccatcaaccgtcaccactcaatttctttacaggcatgaccatgatccaactgcttatattttttaatccgagaatttgtaagtcttgagagcaaacgtagagacttctttttacattactttattaaaataatagatagaatattttatttatataaaactacatcgatcaatatacaccattaaaatttagatcctttaaatacttcactttttattattaatatggtgatttccgccgcttctcagcattgccccattctcggagtatgagctataacatatggaccctaaatacagagaaagctattagggaatcttgttactaagaattttattttaaaaaaacatattgtctctaaagattatgcgatagtgcaaaacttgaatgtggttgaaggagtttggatgcccagttgttttgtctcccctacacatgattttgtacaggacgtgtcacagttgtgcatatttatgatttctaattttgctatgcagacatgacgtgtttgtctcgtgtcagtaaattaagtttcctaatttgattttgatttcaaaggctactgcatagcatgcaccaaaattctagttccacgctctttcacgtgtccgattcaaaaagtcaaagagtcaagcttttacatatattttgattaaatctcaacccttatagtctagatttgttatgatctaacggtgtaggttttttctttttccccgattaatgtgaaaatttctagcctccacggtgaacgtggtgccttcttttcgagctgtcttaataatataatagatgtggtgttgtagtttgcaactagtaaccacactcattactccatctattacataattaaaacagcagtatggcaattgtaattttacaaataaacctgaaagatgcatagcaaatgcgattgtatatctaatagtctatccccattgcattggaaattcagctagttttaattatgtcacatgcaggttgagttgaacctactgccagttcttcgggttcctttcctaaaacagcatccctgtacctttatgttaatccatttatcactcattagattggactattgtatttccagcatgtggtccaatagtgcaaactagctgctctggacggatttctggattttaaacataaattctacgaaagaaaaatccattcatgcaccaaacaccagatgaaattagaatgtaacttggttgatacatcggtactacttgaaacaagagtgaaaaacttgccaggtcaattaccggcaagaaagcactaataaataagctgaagcatatcttccccaaaattttatgagggcataaactcttacattgagaacatgagctgcccagtttatccccattaatagaaaaacacagtcagtctaatcgatacataggtttccatttccatgatgtagtttaagaatctgaccccagactgtcatgaacctttacccacacatatgcatatagaaatatgcgcaatctaaatgtgaacatgcaaactgccaccacttcaacaaacccatcctgcaaaacgagctacccatgcctcatccacacatccagttcaaaccaaactcattgaaatgggcatcaaccatgaaagctagtcgtaggactgtggtagctatgcaaaccttccaagaacctaaaatcatcgcaaaattcaatcggaagccaacctcaagccacggttagaaacgaattcaagattctgcctccaattcgcgggtatacacgaaaaaactccactcgcatggcatgaacacggatgaggcagatgattcatggaagcatgcatcgaattggagagagaatccaactcactatagggtgtcaggcgggccgatgattgtgacctgccactcgaagacgttgctgtcgtcgactaacccagccgagaacccatccacggggtgcttcgcgagatctgcaccaatcaccaaaccacaaacccaaccccgaaatcgatcaatccacggatgaaaaaaaaggggcgcaaacagaacaccgacgaacgaggacgaagcgagccgcatggatccgcacctttcagctgcttctgcaggaggaggctcgcctggctgatggtagccgccatgagatcggcgtggctagggtttttgcggcgggcgcaggagaataattctcggcctctgcaggaagcggcgacgcgaatcgataggcgccgtggggcgccttatttatagagagacggaggaggcgacgaggagagctcggcgagatgaatcaggaaaggaagaaggagagagaggacgataagggaaggaaagagggagaaaatgtggagcagcagagcaggcggataaaatgggaagcaccgttttgggtaaagggcttttcggttgtttaaccgtttaactatgatgatgttttttgtgtactatttcagagcaagtaataattcttttagataagcttttgtagtaattcaaagctagtcagattctgcagcatcacgcaaacgatcgtgtagctttgacatttcgtaattccgtccattctcgaatgctctccgagcaggcccagaatgcaggattgtagtaccacgcatctgtcaactgcttcggattcatcgccatgtacgcgcatcccggggggaatggccgacatgccgcttgtgccattgaacagagtccacgagcgaaggatggacacggtatggcgcccgcggccagttgacgaatcgagcgaagcgcgagcgcggaggggagcaccccctggacgctgccgttcgcggtttggagcacgcgacaccgagtggtaaaccgtaaacgcgaaaactgaacgagtgagccgacaagatttgggggggcgtaggcagtcacgtcgggttcccccgcccgtcggtttggctgcgatatgacgagtcagccgccgatcgaccgcctgtgctgtgcggtgccgtgcggtgatttccccccgcggcaaccgacgcgcaccaagaacagagcgtacgcagctcggattgaacggtgaatcggtgatcggcttggttgccgcaggtagaggggacccatgtcaccactcacccgccgtctcacgctcgcccacgcgaattgctcggtcgaacattggcgggaggcgagctcatcgtggtggtcaacaggctttcgaaagattcccgtcctgatatctcctttcacagatacgctcatactcaattacgcaagcacagcaagtagaccgtggttcctacatgtgtcttatacacacacgtttagagcaagtataatagtgagtataagcctactataaacttacgtggagaagagatgtaacaaaatattaagagtgttggctcttatgcaagagctagcttaacacaatttcaaaaataaatacattaatgcatataagtgtaagatagagaaagtagaagaaaattatagttaacattataactaatctactatatatgttggctttaaaataagataatagtagaaattgagctatactattcttgctcttacccgcatctagcatctaagtagatgcatagggtagacggatataaaacaatcacgcacaacaaagaaggacaccgcttttgcacccaaaaggaaagaacgagacccaccaccactcgtccactgggggctacgaaacctacaaattcggcacccactttccgtcccgagagacgcgataggacgggctgttgatttcccggaccccggacggtcccgcgcgactcccaccacccgcttcccttccctggtccactccagtactccaccaccaccacccaaggaacgcgcgatagcgagcggatctcgccctcgccttcgggtcctcgcgatcgtatcgcatcgcatcgcatccccgcccgcgcgcgaggcggagtcgcacgcgcgttcccgcgccaccaatagtgcggtcaggaacctgatgacctcgcggctgacgcgccgggacggcgcacacgctgacccgacccggcggagaggccattcgcccccaaattggcctctgtttcccgcaatccttttgctgtttcggggaatcgtttgccgtgccggggaaagccggcgtcgctctcatctcttgctggtgcaagtcgctgttttcttcgtcaggataacgatggatctactgtttcgtaggcttggccttttcttaaccctgcatgtagcggcaacaccccccgctgataatggtatggacgatgtaggcgggagctggagaggacacatgaacagcaaagagcgtttcaattctttccaccacatctgcacagttgcacgcgatggggaccgtcaggtatggcgtgttgacaacgagcgttttaattcgacaacatatctggcgatgacaacggagagcgccatacgaccaacaagtcaacaactcatattaatgcatcgagatcaaaacatgtttactttgttgctaataattaatcttttcgaattttggtagtattttatgggtcaaatttggagccttgccatattttggtggagtttttgtgaaagaaaacttatggaattatcaacttttagtaagtcggtaatggtaaggctatatttagtttattataaaaaacagaaatactagaagaaatactagaatgcaataatatagtttatgttgctgacgtcatgtttggcaccagatctattccattccgaaatggtatagcgttccctagtaactctataagaaaattggtagatttacaattgacaaaaaaataaatttgacacttgcatggaacccttagaagacgaaactataggcttccgttgcagccacactacgttatgtctaaagagaaacaagcctggcccattctacggcttcgtacgaacatgggaacatgtccctcgttgtcaccaaattacagaatcgtctctcaaccaaaaaatctgatatatggcatccctcaacttacaaaatcgggttactctaggcctttaggcgatattgaccccctattttatccgatatggcagctgagttagatgggacccacgtgggcccttcacgtcagcagctcaatattctctcccctctttcccatccaatcctcattcctctctttagggccagcaacgggtggggtggcggttagcaggagaggcgcacctctcacaccgactggtgggaagatactcgatggcagcggtgggtagggtacacaagcgtggcacgaggcgtgggatgagagccacgtgtcgatgctccagtggcagtagtcccccgctcagttccgggtgcgggcggtcgacgtcaatgcagatgatgtcgaactgcaatctttcatctcctgcgtgttccgcgtcatcacgagagaggagcgcggcatcgaggactcctcttttggggacgtcgtcgacaggtcgatgaccagtgttcagaactgcacgtgggacgcaaatggagtcagaaacgacaaaagatgcggggttggagtcgggggagagggggccgtgctagtagaggaggaaaaggccgaggtgggagccgtagatctagaagtggtagaggtcagggacgaagtcgagggagaggtgtggcaaggaggcggtgagtggctcgaagacatggagggtatgtttcggtttctcctgtaaagcatggaaaggaggcttctatcggtaatcaccagagcacgctagtggaaattatgagaggcgcacggcagccagtggggagaggccgccgcagctgtgtggagtccattgtcgtgccacgcgtgtctaccccgctcgtcgctggccaccgcatgcttctccctgccggccaccaccccttgcccctccccagccacgttggagagaagtaggataggaaaagagggggagaagattaaggtgctaacatgtgggggccatgtgaggctcacgttggctcagctgtcatgtcggacaaaaccgaggtcaataccgcctaaagatcgagggttacccggttttataagatgagggatatatacaggggcagatcaatttgtggggggagggggggctcaattacgcagtttcttcaacttccagccatttaggaacctttaatttatcattcatggtgaaaaaatcgaaaggggtgctccagggatatccatgggtcttgtgggtttaggggggactcaagttccccctgcacccacgttggatccgcccgtggatatatatatatatatatatatatatatatatatatatatatatatatatatatatatatatatatatttcggttaagggatgatattataattcggtgacaagatgagggacctttgatgtactttttcgtacgaacatgtgatggcatctctatcatgggcctttcgttattcatcaaacatcaaaagcccatcagattcgacgtctgaaaccagcaaatatgtttttgctagacccagcagcatttcgaatccgcttttttattttcaaagatcgagctccgcatcatctcctcatgataatctagtggtgcacagtggatagctaacggctgcctcaaggctcaagccctcgacaatccgtttgctaatggcactactcactgtgcttatcccatttcatggacactagtgacttgcggctgcctgataccaatgtaaagtgtaagctactagtggtacactttgctacaggaaaaagagtgctgccttagacactagcaagtcacgccatgcttaacctttcacctcttcccacgcactaccttagacactagcaagtctagttgtacagctccctactagcttcaattcatctatagtcaatctaatagccaattcatacaataattgtttactatactattaatatatggtcccacctgtcatacacacagtgtgtcttggagtccgtgctgcagctagctacagatctgtaacccgctgctcttctctctcatcgtttatatcattaaaatatatttatagctggctaatagcctgctattgtacctgctcttagagcaagtttaataatagagccaactatgagcttatagcttatattagagttaacatgtatagtaaatgagctataagattatctctttttttctcctcctctctctatctctcacctgtgcatttaatgtatttatcttgaagtatgtgaaaagctagctcttgcatgaaagccaaccctctccatttttcaaattctctttcctccacataagcttatagttggcttatagcctactattatacttgctcatagagcaagtttaatagtatagccaactactagctccaattcatctatagccaatctaatagctcattcatacaatagttacatactacactattaataactggtcccacatgtcatacacacactgcatcttgaagttcgtactacagttggctacaaatctgtagcccactgctcttctctctccttatttatcttcttaaaatatgtttgcagctggcttatagcctgctattgtacatgctcttaaagctgaccctcaccatcaacttgaaaagaggatggaccaagcttatacacttgtttgatcaatccaatgtttggagaccagggttcatcagatcatgatactagggtgattattcgggtttcaaaagagagcacaacgctaccctctttaatttcttatcctaaacaaactatcaatacgtaaagcagtaggatgtatggctccatgctaccatccatcagattttaaatctttctttcatcaggtactaggaaataaatcgtgattgggttgtatacatccaattggatgtaaaggccaggtttatcccattgtgtaaaaaaaggatttaaattgtgatatcgacaaacatgattacattcatccttgttgcaagctggaagctctactttccttagtaaaaacacattggctatttgttcagaaggtgccaattattgtgtcaaatgttgttggtgttccatatttcaagtaaaatgaggctaacaaaattttagaaatgtgcatatgtgatgtagggctagtaggagtagactaggggtctaggaccagccaaaattactgcagagaggcgccaaagacgcagagaaacaatccaatgcgctacctgaaaaggcagagcggcagcgccaatgggcaagaaaagtttaaaaggagaaaggtataagacgagcccgttaccagaagcagagccagagagaaggggcatacagggaaagggtctggggcttggggtactccttgagttggtgccgtgccattttactgcatctcgcgtgccagtaacgtggtacttttttttaaagtgaaaaaccgattaggagattgcgccttttcagcaatctatggtacttatgtttagggactaaactagtctctctcaaagacttaaaaatttatgtttttaagagagcggctaaagtttagccctgcatagaactatagaagtactattcaaggttgcggcagccggcagtcgagtccagagatggtggcggagataaggacgtgcatttcagaatttcagtgagaacatgcaagttcaaaccaaactcaaattactatatgtatatttacaattaaatttattatttttgttacgacttgtaaaagttgaatttgaatttgcatgtttgtggagtgatatattacatgttgatctatcttgtcaattttttcgaaagtttttcataaccatttagatgacatgcaataaacgggtgaacgtccattcgaactgttaaaacagtttccaatagtggagcatgtttgtaaacatctgaacacactaggaacatgttatttcaggctggaaacctggcagtaacaccattacagtcacagacatccctgcagccaacacaagcagcagcacaccgattacgggctaatcgaacgtaagtaacgactccagcatctaaacccgcgagctaatcgaacattagaacacagtcacagacaccccggaagggatcctaccgagtacgccttggcgcgctggattctagtggcagaagatgaccttgagctcgcgcggcgcggcgcactcgtgggtgagcgacgggctgtcgtgcgcgtaggtgaaggcctgcgggcactcgcgcttgaagaactccgagtacttggacgagcggcaggtgcgcgggctgttgtacatgttgcggcagcagagctcgtcggtgcggaaggcctcgcagccgctcttgcacgccacgacgctccccgccggcgtgcgcagctgcagctcgctggggcaggtctcggtcaggttcttgcggcacgccagcacggggcagttgccccggccctcgtgcggggtcaccgacagcccgacgttgaagccgtccaccacgctcacgccgtaggaggtctggtcgttgccgtggtggagggagacctgcgccagcgtcgcgggcgccgcgccgccgaggcccgcgcactggagccgcccgccgcagtcgcccgtggcgcagtggagctgcgcgccggcgccagtgcagcccgtgcgcgcccagatgcggccggaccaagggtgggccggcgcggcgaaggagcggtgggagagcgccgggaggaagaagccgccgccctcgaggacgtcgtggccggagttggcctggattcctggccacaccgggtatgggcagttgttcacgatggtcagcgtcatcggcgcgtagtcggcgaggatgacgccgcagctcaggagcgaggtggcgaccaggagaagcagcttggcagaagccatggcggcgagctgaccaggtctcgagctaatgagcagactgtgatggagtggtggtggtggtggtgataggtcaggggttttagggggtttttataggcgacgtggtgccattgttgttgtcgtggtttggcatgtccaagtataacacagagggaaggtggcttgtttttttgtggagaacttctaaattctgaatgggtttatcaaaacttggaaaaactatttgcattttcatgactcaggacttatcttcttggaatggtatcattcgagaaggttatctcgaagttacctatccttaaacttcttttctcaaagcagcttttcacaaacaatccgagcaaatgcaaagctagcatcgggccattttacacctagcgggaagaaaacggtaataatccgcgagaaccgagggtagtggccggccggtgttgccttcctggcaataatcctatagcaaggcacctccacctccatggaccatcatggcccatgccaatatggcaatgcggtatttttcttcgtgacctgtggataagcatggcagacagagacacagacataggactggcattgggcaaacaagggtagtccactggattggatacgagggaggagacgtaccagctttctcacacactgttcttccgttgttctccacctcgggttccctggcgctccaggggaatctgccaagagcaatacgcctgcgacgtggacgatatcatgccatcgtgctgaaagcctgaacaccgggatcgctttcgctttgtttttgctttttactgccttttcggttcttttttcacattgagccgtgtactcctctgcccccacatgttatcctagtgctccccctgtcaggctactacactttgttactccccatcttagcgcggattgcagtttaatttgacgctaactttcaaaaactctcgctttcattctgatgtttacttggacgcatgctggctgggtagcccttggtggcttcgtccatgtcggtctgagtaaggtggtatttggttggaggaactaaagtagggctaaactttaatccctttcacaaaaatttagtctctagttcccaaacaccccttaagactagacgctgtacgtatatctcgtcggctaatgaaactcccgtactcaagtcctttgccttcgcaagccccgcggggttcatctgttcggatctgaattgttcgaaacgacatagcccatgtgcttgttggtaatgtcgggagtggtcacccggattgagtgatgctaccactaggagctgaaatggcactgctcggtatctgtaaaaactgggcagcatgaagcgcgctccaagaagaaacttgttaccaggctgccagctactgaacctgagcggtaggggtgccgacagaggaatgccgtgctactgacaccgtgcgtgcgagtcctccaagtaaacagcacccggcggaggcttccgtcgtgcgcggtgcgggatcggaggacgaggtccggcggcgtttgtgtttcgcgcaccgcacggccggccggccagagctgggccgtggtgcatacggttcctaatcaacaccgtagatttgttcgtttatccgcttggactctcctaaccggctaaccgtccctctcagccgtaaaaccggatataactacaccttcaactattattaaaatcgtttaaaatgtctctctcagttgttttgagagcggtttttgctaacataatatccaagtggtaacccagacatcaaatgtattgaaaaataaagtgggatccatatatgaattaaatttgaaaatatattgttcattcaatttttctcaggaatattcgggatgtaaaaacttgtgcaaaaatataccgtcggtgtcgcagaaccgttgcgtgaaaatgacatgcgaatgatgtcgcggacggtatcgcgcggtctcgcgcggcaacgacgcgagaccgcgcgtgtcagggttatggataccacatacctaatagtagttgactaagtctcggcaggacccaccacataccatatcctatacggaaacaacctgcggatataggagtagttccggataaggaaagacaaccagagttctatatggaacgacaaggactactcggattgtatccatattggtttccctagttctacttggacaaggggacacctatgtgtataaatacaagaccccctatgaggagaggggacacacccaacacaatcaacatacacggaacaacagaagccacaacatacaagccaacatacgctaagacaagccgccggatatcgacttcacggataagcacggctagtcccctacggtgtctctgaatactatcaggagagacgaaagcgttatctctgatctcgccggacacggattcgaggaggaagactaccctattattgactacgagtcaaaccttcagaccgccatgtcgacaacagttagataggctaccccaaatattgtactggtgtgattatggtgaataagatcaacgaccggcttcggccaacaggatgtagggttgttacctgacaattcaggggcccaaacctgtataaaaatcatcgtctctgtctcttttacctcagtctcgcgtataccctagcaccaacgatccccatactatgcaaataccggaatcgcgacatcaaacgtcgacagtagcgcgccaggtagggggattttggtgcttcaggatttcgacgggatgggtttaagagatggattctccgatgataagctactcgacgacttcagctgagggggagatctaacctaaccagatcggaaccatcatcgtcatcgacaacttggtctatcgaaaccatccaagtctcaagcttcgcggcgtaccaaaaaatgtcagatcatatgatgtcgaacgagtacgcaacaaggtaattggtagattggttttttaaattgatctactaatttcgtagatacatccagcatgtatctacaaaggtacgcaatattttatatgcaatttatcgtacctatttttccaatctatacaatattgtcagatctataatttattatgttttcctagagcatgtcttttatacaatatctgttgcgcgagtgtccccgatgttaaatcgactacggtctaatgctaggggctcgctctattttcttctgtataaatcatgcttgtttatggtttacataatgcctgatatttacatctgctcgttatgtcctgataatgctagaagatccatgcagttttttggagtacataatcgatattctctgctatattttgtcttctagaaattatttttcaggaacaattgagcactcgagtaggttgtggtcgagtacacccccttgtcgaggacgttctcgataaggctgagtcgtcgcacccaacttaccaatgaagaccgacgatctatctcatagcaccggccatggccggactactcgagaaaaggttgttaacggataattcctcgcgaacgtcgtcggcttgatcacctgacatgattgcgaacggacatctggatatactacaagttgggtgtgtgagtcatgctggccacatgagacgcacatgtaataaaccaactctagcacctccattggtgttcgagagataattctacacgttcgctggtcctcgaaccagtacgtagcaatctctcgcaccgcaacctccattgatgttcgagagataattctacacgttcgctgttcctcgaaccactacgtagcactctctcgcaccgcaacctccattgatgttcgagagataattctacacgttcgctggtcctcgaaccagtacgtagcaatctctcgcaccgcaacctccattggtgttcgagagatgattctacacgttcgctggtcctcgaaccagtacgtagcaatctttcgcaccacaacctcggatggtcgaggtacgactacagcaataacgcagcggtcctcgtaccacgacttcaaatgatcgagagacacctactcattggttctcaaccagtcaatcgtagcgatctctcgtacatttacttctagtggttgagttacgactactacttggttcttgaccagaggtgtagcgattctcccattacctctacttcaacaaagttgatatcaggtacacaatatcgccaagtgttttacccagagatcccttaccacaaaagacacctagagttgaaacctattctcatgtccctttacgccgtcttgacaaggcctccgaggaacctaagggaacttcggctggggacgcccagagctgataaggccttgtcggatccttcagagacgaaagaaccatgtaagatctggtcgtgtaagagttctcaccgtgcgtattaaccaagccgtgtaatcggaaatggattttccaacttcacggctgggggctaggatcagtgcttgttcaaccgaggcaggtcaaaggtccaagagccttatcctccgagaagaattctccgacgacaaggctgggggctagggagagtgtataactcaaaaaaccgactgatcgaagtcggaaaagagtagacgctcatatacaaaacattggtatgtaaatttaattcattatcagttttctatacattctataacatgttaccctttgagcgttcgctcgggggctatttctatctaatattcttttctgagtattgatttcaggaaaattctactcgacattgtcaaagacttcatgtctctctggttgtacaccaagatcgactaaggcgagtacggcaaatgttgacaaggctccgtcgcagactctacgcctactcgattactcgagaacggttggtggatctcgacaaggaatgcggaatgaagagatgttgtacccgccgagataaaatttcttgacttcaatccaaattctcgattacagcaagacgtgagacttagtcgtatgctctgtactttcttggttgacatcggagattgactcagacaaaccctttaggtgcccgcacgaggctgataaaggaagtctaacgttatctccaaactcaccgaaaacggtcacatgagctcgataacagttactccaaggcctgcacgcggttgagaatatgaattcgttcatttgcattgaagtcaggggctactgtcagggttatggataccacatacctaatagcagttgactaaatctcggcaggacccaccatataccatgtcctatacggaaacaacatgcggatataggaggagtttcggataaggaaagacaaccagagttttacatggaaacgacaaggactactcggattgtacccatattggtttccctggttctacttggacaaggggacacctatgagtataaatacaaggccccctaggaggagaggggacacacccaacacaatcatcatacacggaacaacagaagccacaacatacaagccaacatacgccaagacaagccgctggatatcgacttcagggataagcacggctagtcccctacggtgtctccggatactgtcaggagagacgaaagtgttatctctgatcttgccgggcacagattcgaggaggaagactaccctgttatcgactacgagtcagaccttcagatcgccatgttgataacagttagataggctaccccaaatattatactggtgtgattatggtgaataagatcaacgaccggctttggccaacaggatgtaggattgttacctgacaattcaggggcccgaacctgtataaaaatcttcgtctctatctcttttacctcagtctcgcgtataccctagcaccaacgatccccatactatgcaaatatcggaattgcgacatcaaacgtcgacagcgcggtctcgcggatcgctcaagcaaccagtgacactgtccgatgggctccatttgattagtaattaattacttaattaaaaattaattagtaataataagtgattaattatcctgacgctaattaaatcgacaaggcacggtatcgctgtttgcttgagcggtctcactgattgattgagcgagaccgttcacgcgcgataccgcgcggtctcnnnnnnnnnnnnnnnnnnnnnnnncgcaacatcttttccgcgtcattttcgtgcaacggttgtgcgagactgatggtatatttgtgcaaaagattttacatcccggatatttctaacaaaaaatgaatgaacaatatattttcaaatttaattcggatcaatatatcatcttctttctctactaacgtctctttccccatttcttcttcttgacacccagtgtagcaggacgacagctgacagtagcagaatggtaggacaacaatgggtaacaacagcgatagtggtgggctctcctctctctccccgaccccttctgcactagcttgccacggggaggtacttccaccccctcccttagcgacaccatcaaaccaaaacagcatgtggtccctcaattacacaacaatggagctgctcatcgggaagtagacgtggtcagagctcgcaacacctgcgaggttggcaagctgctcttcctcatcgggttcgacgggaagacccctaagctccctgtcggtgacatgggaccggggatatcttgactagaggtttggggcagccgcggtcacccgcttggcctgaccccctcggggggggggggggggggtcgggcccgagggtgatgaggccgcccctccctctatctccccgaggggtcgggccgctcccgtttcgaccccccgagggctgggacgccccgaccccctgggggtttggcgccacgtgtgtgggttaggtgagcacagcggcgctcacctaaccgcgtttattgcgggttggacgagcgcctcacgccgcatttaatgcagcgtagcgcatgcttatccggtccgtgatcggtcgcagtgtgtgaccggtcacagaccggtcagatcgcgggttagggggcaacaggcggcctgacacacgcctcgccccatcccgtcggaatgatgagagcctccaggcactcgtccctagccggagccggcatgggaactcctggagttggcacgtcagccccggtcagatacattccaggcttcatcgcaaccattgcaaggaagtcgttgtatgaagaagggcagacgtgtagcatgctaaactgacacgtggaggacaagaatgaccggtctgtgactggtctgacgccggtcgcgtcatcagcaaacaaccgtgcttccacgttgcacctgcttccagcggagtggaggttggtatgacccatcccatcggagggtcattcggacagcagccattgcaaatctccgcccattaatgagggaggacagggttatcccggtgtcagacaaaggtacaagccaagttttggtcaaagtaggatgggtccccacccaaaaggagggtaggtagaaatggtgtatgtggtatccccttgagatataaaaggaggaccatgcctaccaaagggggaaagaaaaaaaagaaaagggggaaggggacctgagctggtagactggagaaaggaggagtgagaggggctctagagtttgaactctcttgctctccagctctttgtaactccttcatacacagatccaccagaacacaggagtagggtattacgcttctcagcggcccgaacctgtctacatcgcccgtgtcttgcgcatttactctctcgcgaaccattccacagatcaagggcttagaacctcacttagcacccccggccgaaccggcaaaggggggcctgcgcggtctcccggtgaggagccccacgctccgtcactcccagtgtgcgtctctgactcgtgccgcgacttcctcaacaagtgcctccaccgtgacgccggcaagcgatggagctgcgatgagttggtgcaccaccccttcctctcctccacggacacccatgacgctggcaagccatcgcccctccccctacctccccccgccccaccccaagccgttcttggctgggggcaaccatgtcggatttcgacttcggcgacttagacgacatggaggcgcacaacaagcgtgaggtgatggtgcatgccaaggaaaggctagtggagtgggcatcaaatgcaagcgcggcggggggggggggggggcgcgttgtcaccgccattgtgttgaagccggctagaaggaagggccgaatcccgaattgggaagaggaaggagatcgagaggggtaagggtagaagagagagaatgacacgtgggctccacattcttaattggtggaagggccaagttaacgtgccaagccagtgaaaaacaccatgaaaactgttaagggagtcaaattgcatcgattttaatagttggagggtcaagatatctgatattactgttgagggatgcgaataagatccgaccactaattaagggtgtcaaagtggacttattattttatcggctggtttattttgggccgcgaaaaagtgggtgttggttgtccatctgggcagaggcctgctatgtttgggttttggtctactcttagtccattacgcttttcgaggccctcgtgcacgagcatattctcaggcccatctaaaaattgcccgaccaacggttgggctgcgggcgtgatagaagtccacagaacaaacccgttaactgtagaacatactggactgttcaacgtcacggagggcagggtctcaccaactcgcgtcacccgccgacgaccccactctcccctcctggcgctggcggtggcctctgcgtaccatccagacccttccagaactcccatccgatctcaatccaacgtcccagattggcgcaccccgaacattctcgaaacaccttcaaccccaataaaaccactccccctcgcctccgtcccccaactctttgcaaaagaattccgagctcgcaaggcgaagaaatctcgcaacaatctcatcagatctcgagatctcatcaggtttggtttgttcccgtcggatttttcttttccactgttcgatcttcctgttcgtgcgagatggcgaagggagagggcccggcgatcggcatcgacctcggcaccacctactcgtgcgtcggcgtgtggcagcacgaccgggtggagatcatcgccaacgaccaggggaaccgcaccacgccgtcgtatgtcgcgttcaccgactccgagcggctcatcggcgacgccgccaagaaccaggtcgccatgaaccccatcaacaccgtcttcggtacgtgctcctgctatttcttccttttttttttgagctatcgttgttactagtccttttgcacgctctagttcgaatctagattgaactgtcatctggatggctggatgcattcgttattaagatgttcctgggttgcgctgatgttgatttcactccgaaacgaagacaaacattgtatctgtgctctgtttgggtgtgctaaattgctaatctcataaaaccaaagaataatgattatattaaacaagtatcatgcatttactacaactctcagggtctgtacttgaatggttgaacattgaaattgataggagttgctagttgtcaagaaattgataggagctgctaattgtcaagagattgaactgaacaatttaaacattgtatctatgctctgtttgggtgtgctaaattgctaatctcataaaaccaaagaataaggattatattaaacaagtatcatgcatttactgcaactctcagggtctgtacttgaatggttgaacattgaaattgataggagttgctagttgtcaagagattgaattgaacagtttgctagttgtacatgttacattttgttgcagtggtgcattttgttctatggaattttcgtctggaaattctgcttgttggctagttagtaatgcggtggtaaatcacagggagtaggcaactcatattctcgtggaatttgctttgagcgaaatatatacccacaatttgtttcgagtacattgcttactgattataaattaagctggctttactgcttgtgtgcctgctgtactctgctttagttataagctgaattttcatatgaattcaattgaacaatctgactcataatctcgttcgtcttgaaattctgcttgttggctagttagtaatgcggtggtaaatcacagggagtaggcaactcatattctcgtggaatttgctttgagcgaaatatatacccacaatttgtattagtacattgcttactgattgataaattaagctagctttactgcttgtcatgcctgctgtactctgctttacctgtaagatgaatttttaagctggctttactgcttgtcatgcctgctgtgctctgctttacctgtaagctgaattttcatatgaattcaattgaacaatctgactcataatctcgttcaattttgaatgcagatgccaagcgactgataggtaggcggttctccgacccgtccgtgcagagtgacatgaagctgtggccgttcaaggtcatccctggccccggcgataagcctatgattgtggtgcagtacaagggcgaggagaagcagttctccgccgaggagatctcctccatggtgctcatcaagatgagggagatcgctgaagcctacctcggctccaacatcaagaacgccgtggtgactgtgccggcctacttcaacgactcgcagaggcaggccaccaaggacgccggtgtcattgccggcctcaacgtgatgcgcatcatcaacgagcccaccgccgcggccatcgcctacggtcttgacaagaaggccaccagctccggcgagaagaacgtgctcatcttcgatcttggcggtggcacgttcgatgtgtcgctgctcaccattgaggagggcattttcgaggtgaaggccactgctggtgacactcaccttggtggtgaggacttcgacaaccgcatggtgaaccatttcgtcctggagttcaagcgcaagaacaagaaggacatcagcggcaacccgcgtgctctgcgccggctgcgcacggcctgcgagcgcgccaagcgcacgctgtcgtcgaccgcacagaccaccattgagatcgactccctgtacgagggcatcgacttctactcgaccatcaccagggctcgcttcgaggagctcaacatggacctgttccgcaagtgcatggagccggtggagaagtgcctgcgcgacgccaagatggacaagagcagcgtgcacgacgtcgtgctcgtcggcggctccacccgcatccccaaggtgcagcagctgcttcaggacttcttcaacggcaaggagctgtgcaagagcatcaaccccgacgaggccgtggcatacggcgccgctgttcaggccgtcattctcagcggcgagggcaacgagaaggtgcaggacctgcttctgctcgacgtcacgccggtgtcgctggggctcgagacagcaggaggtgtcatgaccgtgctcatcccgaggaacaccaccatccccaccaagaaggagcaggtgttctcgacctactccgacaatcagcctggcgtcctgatccaggtgtacgagggtgagcgtgcccggaccaaggacaacaacctgctgggcaagttcgagctctccggcatccctccagctccccgcggcgtgccccagatcaccgtctgctttgacatcgacgccaatggcatcctcaacgtctctgccgaggacaagaccaccgggcagaagaacaagatcaccatcaccaacgacaagggcaggctgagcaaggaggagatcgagaagatggtgcaggaggcggagaagtacaaggcggaggacgaggagcacaagaagaaggtggacgccaagaacgcgctcgagaactacgcctacaacatgaggaacaccatcaaggacgacaagatcgcctccaagctctcggcggacgacaagaagaagatcgaggacgccatcgacggcgccatcaactggctcgacagcaaccagctcgcggaggcggacgagttcgaggacaagatgaaggagctggagagcatctgcaaccccatcatcgcgaagatgtaccagggcgccggcgcggacatgggcggcgccgctggcatggacgaggacgcgccggcgggtggcagcggtgcaggccccaagatcgaggaggtcgattaagctggtggtggtcctacgtgattccggctggaagggagtctgaaccgtgtgatgtggctggcgtcgtgtgatcccctgtgttttttagccgtcgagagtttcgtgcgatgaagcttttgtaagtgtgtatcgccgtatggttttacctgaacttgctctgaaatagtttaagctttgacctaaatcgctctgtctctctctttttgtgcggcttgcggcttgcctgcttcacgagttcgttcggtcgcagtttcagacagaggattagccgcaagtttgttctattgcccttatcttttcgtcagacaaagttaaagttggtgggatgcaatgactagcgagttctgtcttcttttttttttttccattcttcctcacactgaggattagccagttgctactgttttctttacctttattcctcaaaacaggaccaattttgagacgctgttttcttttcctttattcttcaaaacaggatcaaatcaatcttttgcggctgcgaccaacacaaatgaattcagcttcttttgatatgcaacgcaattctgccctgacctgattgacccaaactctaggggtagggagtcatccaaattttaggagcaataggcgaattgcacgtccgtttcatgtttctaaacctaagggaaatatcaatcaaaatgccgacttgttttaggaatcgacacacaaaaaaaatctttgagattgactaagattagtgccatagtttagtttaaacaaattttgtaggcagttgtataggttttcactgctgctattcacaagttctttgccgatcaacaattcactgctgtatcagagtgtccttgacggtttgacacagctgagctaccaaatcatggttggcttctgtagtcagctgctttcgaatttgcaagcctaactggaagatgaactacttctcctttagtataatcctataaagagttgcattcagtgagttcttgggcgcgcatatactctgcagacccgcagcaatgttcaccatctcacaacctatactaccatatccaaaaagaccatctaactgctagaattcaacgtatctctgcaggagaagatcaaggcaatcctgcatatgcccattcctgtgttgattggcacatgacacatgcaactaggttcttacccaccaatcatatcttaatgctaaacaaaacacccacaatccatgatccaagaatggaatagtaattcagacaatttatttctggttaattcaacacagtacaaattctagaaaaagcaatctagccatattctacaaaggagaagagcatgagggctaaaaagacacccatcataacatactagaacaaactgagtagccttcagcagacttcgctgaagaggcctagtgcagtacgacaaatactcagaaagcaaaactcccaacacagtcatgctcataccttctcagccatgtttgggcattgatctggtggtcagaaacaagactatatggttgatagaccttccactggttatgtcaggagtagatcgttagctgcaaggtgaggggggcgcatagagactcttacttcatgttcttctggctcatttccacgtttgggaaccatgatctcaagcactgcagcggcctcatcaaagtatgcttctagcttagcgtcttcagggatgcgagttgctagaggtatttcacggacaaattccccatgagggcagtgctcaggcataggatcagcaagcttgaataccctgtcatgccttctgatgtatggcgtctgggctgtactaacacaaaggatctttactataccatgagtaagactgttcctccatgaaactttcaccttctgctgatcaacaaatggtaagctgaccattatcaagtagccttggtcatcttcataaatcgacttggcggcagtcacaggcccgcgagcctttttcatcaccccagaaaattcgtgctgccatgaaggctgcactactgaatgcatctccacatcttgttgtgtcctctcgccgcaagagttgagtggcaagaagcattcctcatccatggcatgcggaaacacctccttcctgcgcttgctgctaactggggagagatccatgccatcttctcctgagtgattggagggtgatgacaaattcaagccagatccattaagcagcttctttgggtgttgatgaacgttgcccttcatgacaggatgtggcctgtcaagctcaatctctgtgtttggcatagtcctccatgtcccaaaatcacaggcctcctgcgggattgcgaaattgagctccctccctgtaagctccacccacctcctcctgtctacctcagttatgcttgcaagatttggtgatctcaccacctcaattccatgaatacactgtgggtttgagagtccacggtagtgcttgcgctgcatccggtgtgatcgcacaaatcccctgtcaacgctgaacgggaattgcggctcaccagggcgggagtgcccgttcatgtagctcctcagctgcatcttgccaagggcattctccggccgctccttgaagacccacatgtacatgttctccatgtcgtgctgcaccatgaacatgtcgagccggagatccgtcttgtcaaaccctgacacaccgttggcatcccgggtgaccttgcctttgcacttgtccgcgagcaggggcttgaagtagaacgtgaagaagaaccaggcgccccagatgctgtccccgcgcttggcggccttgcggttcccagccttcggggcactgctcagcacggcgagcgcctcggcgtcgtacacctgaatctgcgggccgaggctgacgtcgagcatgtcgcagaggtcagtctgccacggctggttgatgtccggcggatgcgcgccggagagcgacacggcgtgggcgcgcccggcgccgtccccgatgcggggctgcaccatgaccccgacggcgcggtcgtcgaggtggccggcgggatccatggagagaagggtgcagaggctgtggtggccaccgccaccgccaccgccgccgttctccatggacagggtggtgacgaggtcttcccccatggcttggtgactcgcgcctcggggtgactggtgctaatggcgacggcctccgcctctgccaccgcctgctcctctctcctctcctctccctcctcccccggccgctatctaatcggtggcctccggatccctccgcattccaggacggcgtcccacagcaaccaatcgtgcacgcactccatgaatcccaccatcaattcccccccaacagtttccgccacaaatcttcacccagctctcctcccccccaacccaaatccacacccccaaggagaccaaaatgccgcccaaaccaaaaacagagccgccgcgcgcggtggacgatgggttagccgccgaggtttacctccaccaccatcaggagtctgtactagtgcgggggaagcgtgaagctgcgggagcaagagcgcggggaggaaggcgaggacatggggaggggaggggtgcgcggcgaggtgggagaaaaggggaagaggagattactcgtgggggcgaccgcttataatggcctctcagatccggaagcgccctccaccggatgcggccgaacacgacgacgacggcgccgcccgtcacgcctctcacgccgttagggcacaagccaaccccgtctgttttaaaccgtgattagcttagtgcaaaaaccggccaaacagactcaatctagttatctacccaaccaaacacggttaacttctcgtctcggttgttcggctttttatcacacagtgtctagacggtgaggtgatggccgggcggcgtttaacgagagctttcccggatcttccccgtgtgggtgccttttccggtgcaacagatgcgacccaccgcgcagcagcgcggccaccacccaccactatgcaacttctatttggtgggtcaggttccgcgatacttgtcccctcccctcccctctctcctccccttctcccacattgctttcagcctttcagcaaagcgcgattctttctactgctactactctacttgcgaagtttcactgcagccatcgctgtctatggattggaggcaaaggctgcgtgcttgatctactactactaccaggttgcttagccacaaaaacgaccgaaattgcgtgtcaaatcagcgtggcgttcggacatcttatcaaggttagtatctttgtggcgattcttcttcttgtggcagagggtctggtaatatcaaggttagggttgatagactcgcattgcttgccgttcatctgctgtcgatctatcgggttgtttggcgcatctgtccaaatgatttccatgtaattttttcctagatggactaactgtgataagtacaccgtatatataggaaagttttttatttgatctctaacagctgaaaaactcctgtttttgccactagaccttaaaaaaatctcctatgttttgctttcaacaatcatatattccaaacagagcgttagagcattatttagccatgataagcacacggtttcatgtttctgtggtactgctacagcgccaatagattagtactcctaagatgtcatttggcaagtgggatgcttaacatagttactcaactatatgggagcgtatcctatgcacacaggctctcgcgtgtaaaccaattaaaaattatcacaaaaaattctaggaaaattcatacatgtacgtgcaaagtcacatcttcaaattcattctacatagataataacaaaaaagataaaattctgacaaaattacaaccttaaaactgtcagattttttgtttttttgttacggctaaaatataatgaatttaacgttaagattttaaccctaggtgtaatacaattgaaagtatgtatatgattttttctagattttttggtgatattttttagttggtgtacacttgtgtacacgtgaaggcctgtgtgcataggatacgttgcccaactatatacacacaacaagagaattatttgctttggttgttgggatatcgctaggtcccaccaaggtttgaaatgtagcggcattcatgtttgacttgacgagcttatctctgtactctctagccaaggctgtttgctcgtttatttatcaaagaggaaaaactaaagcaacctatcgcatctctgatttctctcttatcatggtggttggtagagtagaacagaagtggtgggcctttgcgctaataacacaatcaacttatgatatgattaaatttgtgtcctgttattgaaagttcgtcatttgaatgtcgtaaaggtggattagattggagattggcctgttgaagctggtgcttgtctgatagcgatggttccaattccatcttagaaaaaccttgcatcatttataagttataaaccccccacaaacggctttaccactcgcatttttcctcttcttttttagtgttatatcttttgtactttaaccctactcttaatttgaacagaaaatatgcactccttcaatacttaattgtgtgagcatctattatgcttctttaaatttattctacgattagtttaatctagcgtaacaaagaaaaccacgcacacttaaccaattgtggtattttagtaaaaaaaaatcattttctcctgacgacaaaggaagaaaataaaggaatttttgcttgcttcagctttagtgggctccaatgtaggttgaaatgcatctttctcccgtcacaatcttcagtcttctcaatgcatgataatatatgattttacctctgtattacctcatcgatgacgtgtcacgtgttaccctgtaaattcccttgttagcaaggtagtaaattctgccccatataattaattagaggcctccctatccaagttgagtgaattattgtactttgtgccacaatatgcatcctcattggactatcgttcgtggatagtacatcattagtcgtctgaattataacccctaaaaacgactattaaaacgcactttctagagcgaacaagatttggtggtcccaaatatattctcaaccaaacacacggtgataactgagaaaaataccgtgcgtgagctcatcgccacatgccaagttagcaattttttttgctcataattgagcgcattatatataggccctggcaggaaaatggcggattagatgtctaatcctgtggtgggagtagcttttagggtgggttttttttttaccgcatgtatatttccctcccaaattgataaacgttgttttttgaaaaaacaaaatctatataaaagatgtttaaaaaaatcaaattaatctattttaaatttattctaactaatgcttaattaataatacgctacttaatcacttttgttttgtgtgtggggagctaaagttcacaaccttcgactacgaacgcaaccttagtccataatagtaagagctctcctccaatttgaaaccaccatagtctcgttaacctaaacaataacttaccatacgtgcaccccaagtcccagctacaacccacgtatctagttgtacaataaagaaatttgaaggttaaatacttgtacaatgatgccgacgagcttatcatcctcttgcagctatggtgttcctaggggaggttctgtcctctgtgattactccagtgaaaagtcgtctagccgattgatcggtgaacgacggtgggtgctgagctgaatcgtgcagccgtgctcagcgctcggcgccaaggctagtaaactgcacgtgtggctgtctcggctgcgcgaagtgggcaggtgttgaacagggcgacgcgcctcggcgcattgcaatatggcccaacgaccaacgtccgattccgatctctccattttgcattcgctcgatcagttcgtggcgtgtcgagattctcggctgcttgcgcgcgcggctggcagtgggggaggcgaacctttatttagttcacgttaaaattagaaatttggttgaaattggaacgatgtaatagaaaagttgaaagtttgaagaaaaaattgggaactaaacaaggtctaagggtgtgtttagttcacgctaaaattgaaagtttgattgaaattgaaacgatatgatggaaaagttggaagtttatgtgtgtagaaaagttttgatgtgatagaaaagttaaaagtttgaagaaaatattagtaactaaacccggcctaacccagaaaatttatcggcaattcggcgttcggcagcgtatcagtatcatcagttgagcacttgagcacactgattttgtcagcaatgtagtaactcggctcgtcggttggcagccggttacccgttccggcaaagcaatgcatgtttatttccacttggagatgaactatactaataaatttcagattaggaaaaaagatgttcaaagttcttccacttgggaacagaacgatttgcagttaacatttgctgctacctgtgtgccgctgactgttagtgccgggtcgccggcgagaaagtggccggagcagagcacgctgggatggacgtcgcactcgcacgacgtgctcaagcggtctctgtatcgcacacatatcacactgtgtgtggcgatggcgctcgagagtgggaaaacgacacgtcgtccactccggctaggcccgatataatttcgatgcccataattgccgctgttgccggtggttttcgttgagaagaaaaaaccccacgaatgattgcccccaaaagcgcccaatgcgaaagcgaaaagtgcaggtctctctctgaatgaacaagcccccaagcagatcgaacagacagcagcggttgcggtggtgcggtgcgtttccttccattatttcccctccttgttcttttctctcttttttgcttggtcgatctgaagtctcaactgttgccgtgttctgtttcgctctgttcagcgcacacacagatcgaacacaacaagacaagtgggaagctgtagcctgtagtattattgccggtggcgttgtccgagtttgtgagggcagcagaacggcacaaggctacggcaagtgcaagcgtgatgtggcctgcatggaagcttcagaagagagctcccccggatactagctgatgctgagcggcatagtggtgtgcactgctggtggcagtttaagttttctttgtttctcgatgcaaatggcacatgcacttcaccacgtcttctgcatttcatgactgtttctaaccggaagaaattttataagtgccatgtcttgactgacgatcatagtgactgaatttgctaaccaactgagaaaattcagaagagggcagtacaactctacgagtacactagtacactgctgcttaggtcaaagtaagacgtgattcaactgagaaattcgatttggctcggccaactggttgcaaaactcaggtctcatatgttggttcagatgcaaactgatgggttgtctgggatcagattctcaggatcctcgtttttatttttccacaagtactagcgtgtacgattaacctatcatcctgaattactgatgagcactagtagaaaacctactggcattgtagccagggccggtcctatgattttgagggtcctaggcgaattcatcacgatgggtcctctaagctatataaaaaattttatgatatatatagacactaattaattttacttgcaaaacaaatacatccatatattaaatcttaacatgtctggtaattatcgaaaaataaagttgatcaaatttgtaccttggaactaatatcactaccttaatgaagaatagaatcgcatcatatccattatttctcatgaaaagatacttctcgagcatttcttgatgcaaaatcatcaagaacaagtcgacgatgttgtgcgcttgtgcggttgtgccctgtgcgatgcgatgtcgtctgccgagttgccgacgacgctacaactcctatcgtctctcggacgtttctgcttccagatagacaataggcaggtactagactactagtattaggtgttggcccctccaccatcataggcccccgaccatcatgggcccccggcggtcgcctcggctgcatagccctagggccggccctgatcgtagcaaggtacactcacgaacaacagtagaggagagcaaaaaggccacgcgttttttttaagaaaaatgatgacactgaaacgcacgtatgactcgctcaccgggcttggaaaatttggagtgagcacaacaggcgtggcggacctctcagtagacctctcgcgaatacttgctacagtaaagttttccacttccctactcctctctctttcctccggcctaaggtggcttctcgccgatgaagaccgggaaaggggtcaagtccctcttctcctattgattcaggtttttcccgtggtctttttccttttggttctcgaggtggttgttggcgttggccgtccttgtcccggcatctgggtgagcgttgtcgggcttcttctcagaggcgatttactccatcgctgggactcttctcctgggtactacctagggcgcctccagatatgtacaaagagaggtatcgcctgcctacataaacatctccggcaaggtctttctaaggaaggggccttatgcttgatccctggcgacgaattttcacttggtggctaaaattttcaggttgcgccaagggggcctcaaccgggtacgcctcctgcctttttcacggtgaaatacatctggctgtgatctttggaatagttatggttttttaccgatttctctcaagaacaatggtgtaaatcttaattggtgttgctaatatttcattttgctcgtcaacgtcgtaacctccacgtgtgggaggcctcttcagggatcgagtaatggcgccacctcatgcaactcacctgatttcacactccaccggaagtgagctccaaatattttccatcggtgacgaagaccaaagaagaaggatttgattgttttttcaattctttttaagttttttttttgcaaattgttgggcaaaagtgtaatttgcccattcacaaggggcttcttttcaaaactggaagtgtcccagtagcactgtaacaactcatgtattttatgtttctaatctactttatataaataaatgcatgagttttaaaaaggaaaaaaatgactcgctcgccaggccttgttgcgatcatgctccatcttttcttttgctttcatgttcgtgatggccgttactcctattttctcagtggaattgtatttaggactggtgcagtagcatacacttatgttgagtctggacccacgtatcagccactgatcaatagcctacatcctattttatatggacattattgggagggtgggagtgggtggctgtgggtatggagggaagaatctctctcgcacagcgccacccaagttgaaagcttgggacaggtgcagccgcatgggtcgcgctctccgccactacgaaggagaggagtgatcaacctcagctacaccgttcaggtgctgcaaaaagcggcgtaacgtccctgcttcttgtactggctacgctgcaataattctgtactataaccacttgtcttagatctgataagatcgcgaggcctttatcactttgatctctggtcgtcatctgtcagcgacttttttctctctctctctcttttcatcttcttttctctcggaaagaccaggcttgatcaattcatgtgcatgtcttctttgcaggatagcggtccaggacattctgatattttagtgaacagaagaaagggccagttgcaaattttcccacacttaatgtattttgattttgcggggaaaaggtattttaagaaggcttttcatcactagttcactacaggaaaccagcagaaacatatcagacagtgaacggcacgaactagtagtagactataatatcttgtgcataagctcggcacatgattagtctttattttagtaacatgattgaggagccctctagctgtctggcatgcaaaagaactccagaaatgatggagatctgaaggaatctttcgtgctgtttttaaaatccatcaacttctgtacaaagcagaaataataaacctttttttccccctcacactttctgattgtcgacaaatttttgtcaggcagatggctgcctggccacttgtctgctctttcctgtggatcacagagtaaccgatccatgtgaaactcttcagtcctaaaatgtcgtttggtctcttgctgatggaaagtttataagctgcatctggtcgaatagctcgatgttagctgcattgatgtctcttttgttattctctttgggaagcatatgagcaacttcatacagatacgttggtattatctgttcagatcttcctcaaaatgtactactactactactatttagacgtctgcacatatgctgaagacaatagttaattctaagcattgctggtatcggcagttttcagcaaggaacacgaattagtcgctatctcaatacacaatttcccttcctcaatcccaaccccaagctgaaagcctgaaactcctggatagaactaagcaaacactgaaaagcaaacctttaaatggtccatcgcatatttcagatgtgagactagtgagcactagacttttgcgatgttttggcttcagtttggtctagcttctagcaattgcaatttcttccagaatcagaatctctcacaaacagtttagcttttaatctagattatgaaaacttgtagtatagaatccagaaaatgaattacttaaaagttagaaggtgagaaacctaacctttcaaattctcagaaactaactaccgactagtatttctcataattttaccttcacaaacagacccctagtacccataggccatatcgcgtgcatcaggagaagcaatgccaatgcagtgattgttaggttcgcgtcgtcgtcgtgcgtgcatgcgtgctcgcgtaaccgcgggacagatacatcgcccaaatcaagccttgtgtcttttcgccatgaccggcaaaccgacgacaaaacatgtgacgatctgtaaatatgtgtgcattgtctaacaactagtcgatcgatggtggatggttggatgccgcaccaataaccaccctaaaaagtctaggcgtcaacaaataagcgtgcctcctttctgcccggcctctcttttatttcctcatctgagaagtactgcgatgaagaacacgacgcgttactttctttttgtggctacaaaatccttagatgattggttttaaaaaatgttgtacgattgcacttttcgaaggagctagaagtacccgttgaaaatctagctggtgagactaggaaaatatgattttgatttcgagtttatttttcacattgtataactataaccttttaaaatctgaaaaaaaatctatttggaagagcttttagttataggagaacccaaacatgcctatatctgtttttcttccaaaaatctactagactttgtgaagtctgcccatccttggaaagatatctagaggtatcatattttctagtataaaattttggtacctctaggtactacgtatcttaaggtatcaaaaatttttagtataaaatttagttacctaaaaatacattttcaggactgtaaaattccactttacggaaagacattttggcccatctattattaaattactaggaaaaggagcctccacgtgcgctctcacgggctagaaattctcatattaatcggataaaaaaacagagtccatatataaatacaattttaaaatagctgaaattcgaaattaaaaaataaggaatattaaaacatgatactagagtccattccggtatacaatttagaaccaatgaaaattccgtattattttttaaaaaaagataaaagtagatgttagagttcatatagaaatacaatttagaaataactaaaattcggaattaagaaagggaatattgaaagaagagtatagagttaatatagaaatacaatttagaaatcactgaaattcggaatgaaaaaataaagaatattagaagaagagtatagagtccatctaggattacaattaagaaataaccgaaattcggaataaaagaaagaaatactagaagaagagtatagagtccatacagtaatttataattaactaaaatttagaataaaaataataaaattaaaagtagagtttagagtccatatagaaatacaattaaaaataataaaaattcaaaataaaaaaataaatattagaagaaaagcctagaggggtctagagtccacataggagtattatttagaaataactgaaattctgatttctaaaataagaaatatatgaataaattttatatgtaacaaaaaatcagaattaaaaaaatgagtattggaagatgagactaaagtcaatacaatttagaaagaactaaattcaatattaaaaataattaataactatcacgtacatacaatacaatatgaatattacatattgatagtttggtaaaattagtacaaaaatttaaattatgttatcattttaatatattgtaataataaaagaagaaaaaaatactattatagaagagaaaatatagggatgctagctaagttcaatatgaagcgtgcagagtggactagtggaaactgataaggcaaattgcgggcaataatttcaccatagtcatggcctccctttcgtcctccgtcagccaagacttcactaagttcagtagaactgtagatgagcaggaatcttgtagcctagctccttgtcaagttatccggagcggtaaattattggttaactagcactttagaagtggacaagttcggtccatctgtctcttttcgaataacttatcgcatgcaacaacaaaatgaccttcaactaaaaaaacaaacaaatgaaccgtcgccggatgtctcatcgattgacgtctcaagagtgttcttgtagaagatgctttgctctatggaaagtccgcttctgaagagaactcagctactacaagggaactcgccgtcgccggccgagtttgatttctgttggggatttggccctggtgctgggacttgggaggctggggccgtcgaattgggtcgcgtagcgtgaaggtgtgcgggccttgagccctgttgcttctccatcactgcccattgtacttgttactgggccattgtttgagtggatcagttttttggtccaaactcgagccccacagaaaaaaaaatcttcaacatttactctgactaaggacattcgtaaaatatctgcaacactcagtgtcgaagtcgactacctgtcaaactcaaatcagaaaaaaaaagatcacctatgattaaaacaaaaatcacttgagagcacgaacaaattgtgagagcacagccgcctcaaaacatgcatcattccattccaatgaaacacttcaagttgatgaagcagtacaccttccaatcccttaaccaattaaaccatgcaatgatcgatgcaacaatgcagataagtttcaaaaagcacgacgggttcgtccactcatgaagatatcaacttccactccactccactccactctacgctcactcactctcaccttcacgctcagcggcctccagaatggacgccgaagaagtcgtagaacggaggcgcctcgctgctggggctgtccgagctctccgactcccacgagaacgacgcggacgcggacggcgtcgtcggggacacggcggcgcaggcgctcccggcgcggagcggcttgtgatccggcagcacgaaggtgggctgcagggggaacagctggagggtctcgcgcccaccggcgccgccgccgcggcggccatggccttccgcttccgccgcgccgcggccagccgccgccgcgaggtgtgcgctgctcggcggtgcctgcaggtacatggtggtggtggccggtggctgcgccgtggacttgtcgtgcggacacacttccatccctgggtacagcaacggcgtctgctgctgcgggtagtagctggcgttatttgtcgcgaccggcatgaagcttggcgtcctgaacatcactgcaaggatcgaaagtgtgcatggatcagtgcagaacatggagtggagaattggcatttaagaattgaaatgcaaacacaaactgtagtaaaaatagaatctaataaacgcgcgcattatgatcaaatggatggtcatgctaagaacaacagatcaaacatgccaatgtcaacaacgatactcgaagctggattggatgacacgtgcaccgaccactcatgggacacattttcatgtcccaacattatgagatggaagggcagcatttcttggatgggaaaggaagcagctaaaggatgatgtggaaggttgtgtctggccgttttggccctagctaggaggatggtcatttccttctaccctcggtcatgcacagcatgacagcagcacagtgcacagaagattaatggagctacaaaagggtagcagcagaagctacataggcaggcaggcaacgttaaatcgtgtgaccatgaataggcagtctctctgttccactggcactgtatataggggggcagaggagaaaagacaggtgatacgaaacaatggaagaaatggaagaaaaaacggacggatttacagtaggagacatgaacaaggcatgcacatcgtgacagaatagtgatagctagctaagcaagcgtaatgcgattgcatgcaacgcaacgcgtgcatgcagaggataagtacaaatagacaactagcggcagtactactaccgtgttatacatcatgccgttgtgcaacaaagcggtcaaggtcaactgtgaagaatggatgttctacgccaagtatacttgtcatgccagccatgcatgtacaaaacgatttcgtatagatttattggcccatgcatgaaaaatgcaagaactgaaacgacagcacgagaactttgacctccatacgcatgaataccacgaaaaatgaatggatgccaggtgcatgacacccatgtgtaaagctaattaagcaagacatgccaaagagaagatttaatacgtgacatttaaagcacgagaaaaggtttggcttaccaccaccggcgttgcatgcggccgtcgtcgtcgtcgccggcggcggcggcggcggtggcatcgccgtcggcgccatggcgagagggaagggccgcgcgagtggcctgtggagcacgggcagcggcggcgggcggcggaacagcttgctgaagtagtcgaagctctgctgcttctgcttctgccgctgcgggccttgtggttctggaaccagtagaacacgttcttgccctcaatgtggccgtgctcccggagcctcgccgtgatctgctgtatctgctcggcggtcggcgtgcgcagcccctgccggtacagcccctccagcaccgcgatctgctccttggtcggcgtccaccgcgcgttcgccagcgccgccgccgccgccgaggccggcgacagcggcggcgagagcggagacggcggatcggagaagcctcccgcccgcccgccgccgccgccgcccaacgtcgtcgtcgtcgtctccatggcttgctctgactttggtcgcgctcgctcggctcgcccgctcgcgtttgtgatgcgtttgctgcctgcgagcggccgcgggtgcgtggtttttaagcgtgcatgggagtgtgaggaggtgggcgatgggtgggccgtagcgcgtgtgcgcgcgcgcgggcggcagggggaggcgtagctagcgtggggatcgtgtcgcgttgcggtcaaggggagcgtacgtttcgacgttttcgtgaggacgggaggagtcgcgtgccgcccctgtgccgtgcgccgcgtagatcaccacggcgagtggcgtgatccatccatgcgtgcatgcatcgtcgtcggtactccaatcgatggatcaagggcgtacgtgcccattgtgaagtgaaatgaaaagcaatttttcactcgtgaaaagggccttttccttcgtgtacgcgttttttttgcccagctggccgcatcgatcggaaaaaggagagagtaaagtgtgcgtgcgtgctgttcgacgtgggctctgaaaacaatgggggaagaggaaggaaaggaggctgcggagcggagcgcatgcaatgcacgcagctagcgcgcggccgcacagtgaatgcgtgccaacttgcctttccagaagagaagtagagtagcctagtcgatctagtgtaggaggcgcaagccgtacgaagcatctcctctcctcgtagtcgtcctcgggaatgatgggaattatttgctcgtggcaacagatttttcgttttacgggcgagatctcgtgtgtttagcccctttcggtagaggactagctagcatccatcgcgtcgctctattcatcgcgtacgtacatgtagcctctgcacgtactatgcgctgtactctgcgtccccgtataggctacttttgcaatgtccaagttagatcgatcagattcaatgcatgcacgagtttgggagtgaattgaagcttgcttgactgcttgaggccaaagtagatcgagttgttacatcgcattgcatgctttgactactacgcgatcagatcagagtgccttcaggataaacggatcaagcattttttttgttgggaaatgctcgtatcgtggttttgcgcccaaacttcagtctattgtcacagaaaatgttcgccgcggttctaaagacatcaatgcaggagattcatatcgatctcgcgcattccgttctgtgaaagcttaattcagtatacatcggtgtaaagcaattggttgcaggcttgcagcatgctgcatgcagctgaaatttttcgagttactggttgccgcatgcgtgcccgaacaaggatctctgaaatgataaatcaggtttattttgcaataacaaaagatcaaaccagcaagatacttcctccatctaaatataagtgcaactttagtacagatatgatataaggtgtatttaattctttgggtgtaaagtttttgaagtatacggacgcacatttgaaatattaaacgtagactaataacaaaacaaattacagagtccgcctataaactgcgagacgaatttattaagcctaattaatccgtcattagcaaatgtttactgtagcatcacattgtcaaatcatgacataattaggctcaaaagattcgtctcgcaatttacatataaactgtgcaattgttttttccccacatttaatgttccatacatgtatcaaacatttgatgtgacctttttgaccaaatttttttgagatctaaacaaggccatactccaatctaggaatacaaatctgaaaagtaaggcccgtttagttcgcgaaatgaaaatttttgggtgtcacatcgaacgtttgaccagatgtcggaaggggttttcggacacgaatgaaaaaactaatttcataactcgcatagaaaccgcgagacgaatcttttgagcataattaatccgtcattagcacatgtgggttactgtagcacttatggttaatcatagactaattaggctcaaaagattcgtctcgcaatttctcccctaactatgcaattagtttttatttttatctatatttaatgtttcatgcatgtattcaaagattcgatgttatgtttttgaaaaaaactttctggaaactaaacagggtctaagaagtatgctgtgtgcatgcaaacggaaagttttaaagacaactttactgcttgtctacatgttgtgtgcatggtaatcagctatcacgagctcacaaacaatgaagaggagagagaggccgggacctgaatgatcaatattgggacagagggacgccggccatggcttttactccctcaactggagacggcagctaggctgccataggtagggattgaaatggcgaggcacattgggaaatggagatagaggctgaggctgataccaaagcaggctagtgtagggcgatagatgagacgacgaacactgtatgcatgcatgcatgcgttgtgtttgggacatgcatgcaacgcacggcaatgggagagggcagaccggacggttcaggagtcggattttgagattatcgcttcccgtttccccgtaacgtgatgtgagagaagccgagacgctgcacgcctgcgtcgcattactcctcacgagctaagctagagactagagaggcagggacgaagggagaggcagacgagagggggaggaggagagaacggatcggagacgctgcaaattggcgcttgctggtgctgcgcgcattgggaaatgccatgcgtagctagaggctaaccacgcgcgactcgcctcacccaatcgggctccggtgagcagtggcagcgtgagcgtcgtcgtcgtcgggtgtccctgactagataggacatggattgactttgatcggcgacaaatcttcaagagagatccgaatacccggaaaaccgttcgccctgatccgacttaaaaacttcgacggccggccggttgggcaaatcaaaacaccggagcaggttaaccgcgagcgagccaacgctagcgcgaaaccacaaagatccaaagcccgtgctggttagttgccgtggtgcagtgcaggcgcaggtagacgccggtggaaggcgacgcgagacatccgcgtcaaagaaatcctagaattccgggcacgtagcgcaacggtgcgtgtgccatgatcaggagattgtcaaaaaaaaaaaaaaagacaacacttgagagctgttgagcagctgctggaacagacattctgaacggataaaaataataacgggcacgagaagcatgagtacaacgaagttttctgggcccaacatatattttttccttggttgattagcaccgtgaaatagtgcatagaggatcgatcagaaaaaaacaggccagtgcaaatgtgtgcatgttgttggtatgcatgctcaacagggatgcaagtgggtaatccactacccgtataaaaactcgcttgttagtatatttttcgtatgatagtttaaaatttagaagaaaaaattaactaaaagtgagataagcgggaaaaaaagcgcgcttgcccgccccacttgcatccctaatgctcaaggattctagaggtgaaaattagggatgacaattgtgcccgtttgcccgtttatccatgggtaaaaaccctattagggttgggtttgttctccattttatacccatgggtatcttattgggtcaaaagctatgcccgatgggtaaattggcatgggaatgggtaatcactacccatgcccgctttgcccatttacccgcaaaatctaacttacatgtaggctaggagcaaaatccactagaatacataagccacgtttttattttctacggtttcccttttatttcccttattatttctctccctttactctatcgccgctagaagagagacgacaccgaggcggagaatatttgatgttttaagttcaattcgaacttagaagcttgtagactttttgttccactgcttttgttgtggcgggtaaacgggcacgcccgcgggcataagacgcccgcgggcaatgggcaaccatccttacccgtcatgtagtaattgtaggatcaaggaggccgactagaggggggtgaataggcggttttaaaacttaatggcacttaaacaaaactaacctaagttgctaggcaaggtgaggtgcaaggttaactaagcaactaagttaagttttgcaaacctaagtgatatgggctcaaatatgtctctatgaatgtaaatagcacaaatgtaaatgcaacaaataaatgagacaagagacaaggaatttttcaccgaggttcggaaactcgccggtttcctaatccccgttgaggcgagcccaactccaccgctcaaccacgaagccaccgcacgcccccttcgtcaaggggtgggcaaggcgggagccggcccacggagaggactacccaagcctcgatcacttggggtagttcttccttcactccgaaggtggtgaactccaaaccactcacaaacggtgccgggcctcctccacaatctcctcggagaggtcaccgggcaacacctccacaagctgtctaggaggcggcaacctccaagagtaacaagtctaggatgcttgccgaggatgatcaagtgccacactagctataacaatgaagcaatgcacttggattggcttaactcactctctaacacctcactagataaactaagtgcacaagggtgtgagagctcttgcaagggttcaagataatgcaatggagtgccaaaaccttacccttgttgctggggagtgggtatatatacccccaaccaccaaaactagccgttggaaccgaaatccccaactttgtgctctgccggtcagaccgccgttatgaggccggtcagaccggactactttgtaacggctagaaaactagccgttacagggcaatcattgagcccactcaacctggccggtctgaccgcagtgtaggggccggtcagaccgccgtcggctcggtctgaccagttgcggctctggcggctctgtatcgccaccaaaaaccagaccagtgcaatagactagtggggccggtcagactggccttaccacgccggtcagaccggctaacagacccggtcagaccggcctaaggcccacggtcagaccgtaggtcacttttcagctcaaccgactgttagtaaaacggtgatatctcttgactcgggtatcggaatttggcgttcttggactctatggaaagcttattcaaagggccatccaacccatgaaaaatccatccaagaaacacaacttaagtcaaggataaagggctcacactccaaaggatatccaccggacatacccacaagatgtcactcactcctattggacatgcccacttctctcttggtttaggacttgagaaaactcatcacacttggttagacaagcccacaaaatgcacctacatgcatatgaactaatatggcataagatcatccacaagctcgcttcatagacccctcttgatagtacggcgcctatctagcaaatccagtctacaccaaacaccaagaccgggaaaagactaagaaaacattcttagctacattatacctttgccttgcgccatccatcttggggtcaagcttgagccgagatcaacacttgtgaccatccggttgaaccatgtttatgccgaggtcttgtccatcctttgtcaagactttattctcattacaagcttgacttcattcttgccaacatgacgatgtccttggcttggtgaccactaacccatggtgtcattcattagcctcatcataatgggacctattccttttcacacctcaaaggagaacattagtctcaacaaatcggttgtcatccttcacttgatgaccaaccggttgcatatgaaagatatagatatgtttgttgagtattcattaacatcacaagtgtcatatactcgtatgcaagctcaagtgcaaagatccgatataaataataggtgaacaacatggatctagaacatgcacaataaatgtataggatttgctccccctaaatatatgcatacaaataaatatacaagagatgcaagtgtatgcataattagagaatgaccaatgggggtttatcctatacatatagagaaggcatatgtagtaatgatgtagactaacataaaacatataccttcatgatctccatgttctcaatgtaaatgagactaaataagataacattcgagtaaacattagtctcacacttatatatcaataacatggaaatcatatatatgaacctatcaaaaagtaggagataagaagtggtacatatcattttatctccatgcatttcatccttgtcatgattaaggtccatcacaaaagaatgcatgtcttccacatctcattatcgggaaataacctagtagacaacttatgcaaaagagaggttaatcccataaacatcggtttatcatctatcaccaaagtaacaattacacaaattgtttaatccaagatctttcaatcttttctctctttggtgatggataataacccgatataaacaatatagagagatgagatgaaaaatgatttcaaatcaagaaagaaatcttataataaacaaaatatagaataagctccccctcaagatgtgcatacatatggatatgaaggaacgcatatgcacataatcaataaagatcaaataggaagctcacactatattttggatccacaagagagaccaagttagaatgtgtgaagtttaatacatacctctcatcatttttactttcatatccaaatgagactagtcaaagaaaggctcataaaaatgttagtctcatataattaaatttgtcattaatcaccgaaacagaattaaggcacttgaacttatagtaatgggtatacccacgggcacaaataatctcacgggcatgggtatgggtaggaactacccgtgcccgtcgcgcccgattgccatccctagtgaaaattctttattttgaaacacttgaaccggtgtaccgtccatcctctcccaccttcgtgtgacctctcgccatgtccacaatggcttcaccgacgaccctatttggcgattaaccctcaaggcctcgaatacgaaggagccatcgtggaggtgctgtatgggacaaatagggtctgtttgggagagcttattctgaaaagtagcaagtgagaatctagagaaattgagaaactcatttctggattctacaactgtagattctcataatctaaatgaaaaactgaactgtatggaggagctcgcagctagagattatagaagaaactgcagttgtcagaaactcccctaacagacccataagctatattgggaacaatgtgggcaaggaggatgtgggggttgagcttaacacgggcatgtagtgacggcgtgatccacgatgggatgaccaggggacggcggctagatctagttgtctcaaagtagattcagtccctccattctgggatccttccgtcatctcttgagttcccaacaccgttagagcaggtacaataacactattgaccttgctcttaggacagctacttcgccacgctcaagggccccgagctcgacactgttaacaacagaatttggtaatatcagcgtcggaggtgaagatgggatcgaagcggagtcggagataaggattgttgcgggaacaaagtaagaatcggctggagtccagatcggctacgactagaatcggctaaatctgaatcagactgggttaggtgatacaaccgattccggcaatacgacttggtgtacaacatcgggttgagtcgatatgcttcaagatgatttccgcacatggatagagtcctgagaaggcaattatatctattaattaggatgttttacgtaatttccttagagatatgcttagggcaaaagtctgccgtaaagacttatggtatcttagagtttgttagagataatagtcgcgtctggtatggacatatcttgtaattcttgggtataaatagaccccgagccctatgtaactttaagaacacacgttcaatacaatctcggcgcatcgccacccttttttgctttagtgttatttcgacgagttcttgctttcgggttgagctgcatcggtttcgatcttcaacaagaggtaaaacttgttatgacgacttgcgttctcgggattagtgcttccatctttatgacactctaatcttgtttatgtaattcgtcgagttatcatatatcctacataatccctggcaatattgatatctaacctacaatcggctaacgtccgtcaatagaaggcagccgattaagttaaataccgatgttgacttagattatataggatatctaccactctatgacacatctaacggcttgattgtctagatattgtccttcttttcatacttatacctacatcagttaagtttgatcttatgagtcgtgattagaatctcaatctctagcctgcttctcggttgctgattagggtagcatcggagtttcagccgatcttacctgatttaactactttttatcttatatgcttgattgacatgttaaatctgccctttacgttaagatcttcctgcatttaagtatattaggctgttgtttagtatattctacttgctttaatatcttaatataaagtggtatcggagtattagccgatacatgctagatctatctgatcggctatgctatgaacgtatatagtctcattattaatatatattttgatctaagtgatttatactgtctcggcatggcgaccgatctatcccaatcacttgatttaagtatatatcgatataaagattatatattagtaatatctgcaaccgatcgagtatatttagtcccttcttatttattaatggctgccgatcgatgcatatatgacatcggctcaaagataaatgatatgtcatcggcactagccgatcggctatcatttttagatttaaccgcgatttctttgcttctacttcttgttggttacaggatcaaatcaactggcatgctagcacacccgaaggcgagctttggacctgcactggagttaagcagatctcccaggcctcgtgttttctgtcaacacgcttttggcacgcctggtgggacaactaagaagtcagccaacaatcctccctcatggccgaaaaaccaccaccaccaccatctagcccaggctctgttaaggaaaagatgctgaagttgggattgactgacgtcaatgaaggaaacgtcgtgccgatcgatccagaaaaattcacacctgagcagaagaaagagtttgaagcaatgttgcggcaagcacgggatcagttcttgaactcattcatgcagacccgcaaggggacacttgttcagaagtacaaaataaaagttgttgctgatgatcctggaaccagttcttctaaggatggagatgggaaacaagctctagacggctccgctcagccgagtatcaaaggtgctgccgatggctctctaggaaatcaaggcaacaattctcaaggggtccatggaggacaaggtgacggggtgcatggagttcaaggtgacggtgctcaggggctgcagggaggaaatcttaatagtgacgtggcacaggactttttcaataacttccaagatcaggttgattacgctgtacatcatgctttgatcaatcagtctggggtgatagtcaataccctgtcaaacatgatgaagtcaatagccgatggttcaatagctgaacatcaggctgcaggcccgatctatttgcaaggaggtgtttttccaaattatcggtctttgattaccgacgttcagtcatctactcaggcagttccctccgttacacccacaactcagccgacggcaccggcaacaactcccctacctgctacatcagctatggcgccaggccagccaatgaatcctcagctgttaatgagagagcatccatagcatagtgggcaggttgcgaatcggccaacccaagatcaggttgctgctatgtttttgccgcctcaacatgcggttgatctaatacagtagcagccgattcagcaacagccgattcagcagacaccccaaattcagcaggttgtgcaaccaatccagcaacaggtcatgcaaccagcacaaccaatccagcaacaggtcatacaaccagttcagcaaacaccaccaaggcagcagtctctgcagccgatttagcaaacgccgttgagacagcagatcgtctagccgatccagcaccaaggtttagtgagcgcatcggccgggtttgcaacgcctggtggtcagcctgtacaacaacttttaaaccaagttgtcccagaacatttggttcaccacgtacagccggatggcatagtaatgcctcaggttgttcctgagcacttgctgtgcaatatccagccggaccctcacaattaccaagggggtaacctaaattatcaatatcaacctccttccccacaagcccaatatcggccagggggattggctcaacctcagtttgcatcgcaatatggtcagttcgagcccatgcagcaacagtcacaaggcgcaactcagcaacgaccgtgggccgatgtaattgctgacgtaatgagggaacagtttgggcttaaaccaaaagagatcggaagcttgtatcggcagccttaccctgagtggtttgaaagagttcctcttcccaatcggttcaaagttctggacttctccaaattttcaggacaagatgatgtgtcgacttatgagcacattagccgattcctagctcaatgtggtgaagcatcggcggtagacgctctgaaagttaggttattccggttatctctgtctagatcggcttttacttggttttcctccttgccatatggttcgatcaacagttgggccgatttggagaagcaattccacaactatttctacagtggggttcatgagatgaagttatctgacttgacgacgattaagcagcggcatgatgaacctgtgcacgagtatattcagagattcagggagatgaggaacaaatgcttcagcttgagtttaactgatgcccagttagccgatttggcctttcacggtatgattgctccaattagggagaagttctcatctgaagactttgatagcttgtcacatctgatacagaaagtaaccctgcatgagcataggtctgcggaagttaggaagagctctaagagagttaatcatgtttgtccgtacatgtatggatgatgaggatgatcctgaaatagctgcagccgaatgggtaaggagtaaaaaggtcgtaccatgccaatgggtgaaatgttctggaaaagaggagaagtataattttgatattactaaagctgacaagatcttcgatctgctactccgagaaaagcaaattcaacttcctgctggtcatacaatcccatcggctgaggagttaggcaaaaagaggtattgcaaatggcataattctaggtctcattctactaatgattgcaaggtttttagacaacagattcaggtggccattgaggggggcaagattaggtttgatgattccaaaaagccgatgaaggtcgatggtaatccttttcctgttaatatggtgcatacagctagccaaacaaccgatagggcccgcgcaaggggttttcaggtgaattcggctaagattatcaacaaatattagaggaagtatgacaagcagcaggagaagcattatgaagaatacgatgatggttttgatcctcattggggttgtgagttctttagattctgctggaatgaaggtatgaggttgccatctattgaaaactgccctgggtgcagtgatattgtcgagagctcaagccgatcatataataggggtaatcggctgaggcagacaagagtttctattcatcaaagattgggtcctgtgaatcaagatcatggctaagaagacagtgtggtcaggaagaatcaatggtgtccttctggtactttcacaaagaatcagaagagaagggttcaaagattgaggaacagagaacgccttcaggaggttgaacaagaaattaatcatcggctgaggaaagcaaagccaaggcaggagtggcgtgttaagaatcaggttcatgtagccgatgatgttgcagccgatgaggcaaagaggttggcaaaagggaagagtgttgtgacggcactgattaacatggtctttaccttgccagccgatttcgggattgatcaagccgatgtcgacgaggtggaagaggaatcggctaagttggttctatcaccagaacaggcagtgtttgagaaacccgaggggacagagaatcggcatcttaaaccgttgtatataaatggctacgtcaatgggaggccaatgtctaaaatgatggttgatggtggggctacggtaaatttgatgccttatgctacgttcaggaagttgggtagaaatgccgaggatctcatcaagacaaacatggtgctcaaagacttcagtggtaatccatcggaaaccaaaggtgttctgaatgtggagctgacagtcggcagtaaaactattcctactacgttttttgtcatcgatgggaagggttcttacagcttgttgcttggaagggattggattcatcataattgttgcattccttcaactatgcatcaatgtttgattcaatggcaaggcgacaagatagagatcgtgccagtcgacaggtcagttaatgttgccagtgctgatttagctctttgggagatggatagccttgattgtttatctggaaaagtctgggatagagattttctaaaagtatccgattctgatatacaaccaattgaagatggagaacccaagctattattttgagggcgtcgtggggggttcagtcgtctaccctaaggatacagtagatgatctcgatgacaagcaaggtcaaggtttcatgtcggccgatgatttggaagaaatagacataggtccaggcgatcggccaaggccgacatttattagtaagaacttatctccggagtttagaaccaagctgatagaactcttaaaagagtttagagattgcttcgcttgggagtattatgagatgcctggactcagccgatcgattgttgaacatcggttacctatcaaaccaggggttaggccacaccagcaacctccgaggagatgtaaagccgatatgcttgaacctgtcaaagctgagattaaacgattgtatgatgctgattttattcgtccttgccgatacgctgaatgggtttctagcatagttccagttatcaagaagaatggcaaggtcagggtgtgcattgatttccgagatctgaataaagctacaccgaaggatgaatatccaatgccagtagccgatcagctggttgatgctgcatcagggaacaaaattttgagttttatggatgggaacgcgggatacaatcaaatctttatggctgaagaagacattcataagacagcttttgagtgtcctggtgcaatcggcttatttgaatgggttgtcatgactttcggcttgaagagtgctggagctacatatcaaagagccatgaattacatatatcatgatctaatcggctagttggttgaagtctacatcgatgatgtggttgttaagtctaaagaaataggggaccatatagccgatttgaggaaggttttcgagagaactagaaaatatgacctaaagatgaatccgacaaaatgtgcttttggtgtatcggctggccagtttttgggatttcttgtgcatgaaagggggattgaggtaactcaaaggagtgttaatgcgattaagaagattcagcctccggagaataagacagaattacaggagatgatcggcaagataaattttgttaggaggtttatttctaatttgtctggaagattagaaccttttataccattgttgagattgaaagctgatcagtaatttacttgggaggcagagcagcaaaaggctttggatgatattaaggagtatcttagctctcctcctgttttgattcctccacagaaaggaataccgtttaggttatatttatcggccggtgagaagtcaatcggctcagttttgattcaggagttggaaggaaaggaacgagtcgtattttatcttagtcgtcggctcttggatgctgaaactcggtactcccctatggagaagttatgcttgtgtctgtatttttcgtgtacaaggttgaggcattatctactatctaacgagtgtactgttatatgtaaagccgacgtagtcaaatacatgctatcggctccaatattgaaaggaatggttgaaaagtggatattttccttaaccgagtttgatcttcggtatgagtcaccgaaggcgattaagggacaatctatagccgattttattgtggaacatcgtgatgattcaatcggctcggttgaaatagtaccgtggactttattctttgatggatcggtgtgtactcatggctgtggtatcggcttagtcataatctcccctaggggggcatgtttcgagtttgcttatactattaaaccatatgcgactaataatcaagctgagtatgaggcagtgctcaaagggttgcaactactcaaggaagttgaagccgataccattgaaatcatgggggattctctgttagtaatcagtcaattggcaggagaatatgaatgcaagaatgatacattgatggtttataatgagaagtgccaagaactaatgaaagagtttcggctggttactttaaagcatgtttctcgagagcaaaatattgaagctaatgatttagctcaaggggcatcgggatataagccgatgatcaaagatgttaaagttgaaattgcagcaatgatagctgatgattggaggtatgatgtacatcgatatttgagtaatccgtctcaatcagcttctaggaaattaagatataaggcattaaagtatactctgttggatgatgaactttattaccgaacgattgatggagtattacttaagtgcttgagtgctgattaggctaaggttgcaatcggcgaagttcatgaaggaatttgtggtactcatcaatcggctcataagatgaagtggttgcttcggcgcgcagggtacttttggccgacaatgctggaagattgtttcagatattataaggggtgtcaagattgtcagaagtttggagcaattcagcaagcaccggcgtcggctatgaatcctattattaagccatggccgtttagaggatggggcattgatatgatcggtatgataaacccaccatcgagtaaaggacataagtttatattggtggtaactgattatttcaccaagtgggtggaggcgattcctttgaagaaagttgattctggggatgccattcaattcgttcaggaatatataatctaccgatttggtattcctcaaactattactactgatcagggttcaatcttcgtgtctgatgagtttgttcagtttgccgatagcatgggtatcaagttgttgaattcttcaccttattatgcacaagctaacgggcaagccgaggcatctaataaaagtttgatcaaattgattaagcggaaaatttctgattatccgcggcaatggcacactcggttggccgaagcgttgtggtcttatagtatggcttgtcatggatcgatccaagtccctccttacaaaattgtttatggacatgaggctgttttgccatgggaggttagaatcagctctcgaagaacagaattacaaaacgatttaacggccgatgagtattacaaccttatggccgatgagagggaggatctggttcagtcacgattgcgtgcccttgcaaaggttaccaaggataaggaacgtgttgctcggcactgtaataagaaagtggtacctaaagatttttcggaaggagaacttgtatggaagttgattttgccgattggtactcgtgatggtaaatttgacaagtggtcgccgaattgggaaggaccgtttcaaattataaggttgtatctaaaggagcgtatatgttgcaagggcttgatggtgaagtctatgagcgagcgctcaatggcaagtatttgaagaaatattacccaagtgtttgggttaacgcataatcggctagtattgccgatgcatgacagccgatgtgtttccatcgccttgagatggccgatatggttatatcacccttagttgtttttttttcctggtgtaatcggttgtggtttgccgatgtacaatggccgatatggttatatcgcccttagttgttttttcatggtataatcgattgtggtttctataattttatcaatgcttttgacattgtaaaattagggggcacatatgtatcaaaatgaaatttttttgagcaaatttcgaagtcatattaatcggcacaaaggattgtcaagacagtaaagtactagagcatcttagccgattacaaagatttctaagtcctattacataaaagttattgagacaagtattgctggatagccgaaatagctttttgcctaatttgttcaacttcctcaatagcttgggcaccttgagcatcagttccaggaatgatcttcaaagacttagtcagatcagcaacattcttgatagccgatttaagtcttgctttttgttcttcgacagaccgcgggagatcggctagtttcttgtgctccagatctaattcggcattgcattcctgaagttgtgccaggagctcaatcttgcgagcctcgagccgatcaatgttggatttgatcggaccttctgaaagctgatcaagtttggattttttcctcatgcacaagttgccgattagcttggattgtagcttcaatgtctttacgttctcgccgttcggtcagtcttaacttggctttctccaatttgaattgatgttgctcaagataaacggctggagtaaggatatcgactaactcatctgggatcagagcttgaatttcatgtagctgagtcctaattgaggcgcaatcaactaccaagctatctagtgatgatgcctctagccgatgagaaatattttccagagttttcttcacgtcatcggataaaggggctaaggctttgcttatggtgtcttcttctccttcatcaagataatctttgatgtcaaaagaaaaaagatcggctaagacctgcagcgacgatttaaagagagttaggggtcaaataggcatagccgatctgaatgttttttgtcaaaagaaaacctactgggatagtaggaacagttggttgaatttcttcttctatatggtgacttcctacagctgatggagtctggtcacttgttgattgctgtacagaaggagaaggaggaggaggaggcttaaaaagaaacaagtgttaggcaaaatcggctgagagttaattaatggaaaattgaggttatcttactggtggagctggtttagatgttgtcgcagccaatttctttttcacagcagtcttctttttctgcaattattaaatctttaagtaatcggtcataagatacaatgattataaaagggattaaagggagctatttactcttgaaaagtggactggagcagaaggagttggaggggtttgtttgggtgaagccgatggtgttcgttctgtatcgcttacttcggctgcggcctcgtcaatgtcatcttcaataatttcttcatccagagcttgttcaatggatggatctagagcagatagatcatcagctggtgtggtcttctttgtcttagtcttcttctttggagctggggctgaaatatttatagccgatgatctggtctttcttttcttgcgggcatcagctggttctctgataagcccttggagaagagctgaagacttgggggcattatagccgatgacggggggagatggcccacctccgttggggatcagtcctggggcatactcgatatccctgccgctgttgctttggtgatggggagaagattctgttgtctgtaaatcaggaggaaagttagctaagggctaatcaaccaagtagttattcaaataaaatcaagtgagttaggacttacttgagggacaatatctggaaagagatctatcatatacttggaagccgattgatggaataagtgtagcttccattcaccccaccatctgtcaaataatttgctcctaaaggttgccagctttatggtgtcaatgctgcctagaggaggtccttggagattgagcagccgatccatcattaaagatgatgagatttctcctcggcattggatcttatcggcaaagaataagccaattgggagttggcccattccaaattgtctggcagaactcattggatgataaaactcgtaggaaacttggatggttctcccttgatgaatgccgactggaaggatgcatggggtgattgcagataagaagatttctctgggcttctgatatctgtcattgttgatgtcttcgaatttgaagtcccatggattttctagaagtgttgagtctccatagagaaaccaaactcgagcatccttttggaacccctcataaaagctacaaaaccaatctttgagcagctcggccgatagctttgctcctgcatcagttggggtagaggcgtactctccatatgatgtgcatctccgatgagtgagttcctctccgtcatcgttaacagtcggctctaatcttgggaattcagtttctgttacagatggccgatcgacgaacctcatgactaccaagtttagccaggattgcagcagccaccatggtccacccgctccgactactgagccgacaattagcttagccgatgcattatttagcatttggtacaagtagccgaggaggattttgcctaaaggaaattgtctttttgtctccaaggcttcggctacgaactgccaattggttgtaggaccgcagctagacccacaaaagagaaacttttctaaccacattaataggaaagccacatgttctcgaggggtaactggaccctggcctatatatgctgctacatagcctgaccagccgcctatgctcttggtcttgaagtcatattggttctttgtattcaaactcatagggttggccgatgaggtgacatccagacccgtgatcatgctgatatctatgagagttgggatcatcggcccttgattaaacgaaaaggcattgatggtgtttgaccagaagtaagaagcagctgccatcaggggttcatctttggccgagtttgctatagtgaggtcaagtgcttggccgattccaatttcgtcccagtgaacccttttgcttgctgacacacgtttgaaccatgtggtccaacttttctcgggtggaactttctctagagatggccaagatttaaaggtgttattccaatgacctagatctgggttggttagtctgaagggaatcctattggtttcaccaatgataaactcagtgggatcaggattgccgactgggccgagaaagtagtagttttcgtgtgataagcttggaatcgcgattcagttagagagatgctacaaatccaagacaaccgagagaaagagagcgatataagataggagaaaatcgatctgctgctaagaaaggggatctagccagtggagacttacctcagcatactcggccgatggcacatcagatggattggtggaagacgacatcgctgcaggcggaggtctcgctggagatgaagtcacccgggagtcgcttttgcgtcggaggaatcgccggagagagagagaggataaagtttcgcttgagcggtgaaaacagaagtcacggtgtgagatttctcgagggtgacggttagtatttcaagcacggcaataacggtcggaaaacagcaaagtgcgaaacttgctcgaagtcagtacacggcaaatccggaacattaccaaatatcccggacttggggggcatgtgttaacaaccgaatttggtaatatcagcgtcggaggtgaagatgggatcgaagcggagttggagataaggattgttgcgggaacagagtaagaatcggctggagtccagatcagctacgactagaatcggctaaatctgaatcagactgggttacgtgatacaaccaattccggcaatacgacttggtgtacaacatcgggttgagtcgatatgcttcaagatgattgccgcacatggatagagttctgagaaggcaattgtatctattaattaggatgttttacgtaatttccttagagatatgcttagggcaaaagtctgccgcaaagaacgtatatgctataaacgtatatagtttcattattaatatatatttcgatctaagtgatttatactgtctcggcatggcgaccgatctatcccaatcacttgatttaagtatatatcgatataaagattatatattggtaatatatgcagccgatcgagtatatttagtcccttcttatttattaatggttgccgattgatgtatatatgacatcggctcaaagataaatgatatgtcatcggcacctagccgatcggctatcatttatagatttaaccgcgatttctttgcttctacttcttgttggttacaggatcaaatcaactggcacgctagcacacccgaaggcgagctttggacctgcactggagttaagcagatctcccaggcctcgtgttttctgtcaacagacaccctccgaatgcctgcatgtcgtcgtgcgcgccgcattctgtgctgtccacccacgcccaccgcccgtcctcgccatgcacgcagcatgtgcgagagagaggaagaggggaagtggagtatgatgactggattgccacgcgtgcgccacgttggacaaaaccaatcttaatttggtctagggggttaatttgtccggtatggaaagttcaggatagggtttagggggctatcaaattttagttatttctaaattatatttctatacaaactctatactccacttccaatgttctttattttttaattatgaattttcattatttataagttttactcctatatttcttattttaaattcaaaacttcagttatttctaaattatactcctatatgaactctagacacttcttttaatattgcttattttttttaatttgtgaattttcattatttctaattgtatttctatatgcactctaaactcatcattcgatattatttatttttaatttatgaattacagttacttctaaattgtatttttatggactctagactattgttccaataattttcataatttctaattttagttatttgtaaattgtatttctatatttactctaaactcaacttttaattttattgtttttattttgaattttaattaattctagattcctatatggactatatactcttattctaatattcattattttaattcctaatttctattaagtctaaataggctataaacttacctttcaatatttctttttttatactccttccatccacaaaagttacacctattacttttgtcgccaagaccaaggaaaaattgaatcatcttgaatgttacaaaatcaatgagtgaatgcaagcatgcaactaatgagtatttagatgactccttggattgtactccctctggttctatattaattgacgttttggacaaggttgaggttaaacttttataactttgaccatctataactttaaaaatattaagtttaaagaaactagaaaaacatatatagatttgtctttcaaaacactataataaaagtaaacatgcatttatttattttatatattataatagagaaataaggtcaaagatatatcttgtagagcgtatcattatccaaagcgtcaatcaaaataaaaccagagggagtaatcaaacatttaatttatctcctcaatcatcttgaatgttacaaaattaaggagtgaatgcaagcatgcaaccaatgagtatgtagatgactccttggattgtaatcaaacatttaatttatctcctcatttaagtctttttttttataattacacagtacaacgcatacactcacaacgcacgcgcacacagccttatgaaggcacgcacgcaaaccctacccctatgagcatcttcgaagactaagccggcaaatccttgagattgatgaagtcaaacgcacgctcattcacacctatgaacgcacgcacgcaaaccctacccctatgagcatcctcgaagactaggccggcaaatccttaagattgacgaaatcatcacaggcgcctcgctaccacttaaagcacaacactgttaaatcgtagaaaattcgcttccatggagagtcgaacccaggacctcagatgctactgagactcttgtaactactataggctacaggcattttcgctcctcattaagtattgaatgcaaaaagactacaaaacttatttggaaaaactcaaatgtaaaatatgtctaacttttatggatggggggagtaattccgaatttcaattatttttaaattgtatttctatatggactctatattcttcttccaatatttattattttttaatttcaaattttcattatttctaaattgtatttttatatggactctaacctctacttttaatttttcttatttttttaattccaaatttccattagttatattgtatacccgtataaacttcagtcttccttttctatattcattatttttaatttcaaatttcatatatttttgaattgcatttatatatagacttttttttattaatatgagaattttcagaccatagagcgaacgtggaggcttttttctattccttaaataagttaataaattctatagttttatagtcctccaattaccaaagtgggtggtaggatttgtgggaccaatgaatatacaaagcttattgtgcatcaaccactcgatgagatgagagagagaataatatgtttgtaaacatcagcgcccgatattttggcaagagcattattttggatattcctaaaatatctgtaggatttatggaagccagttcatgtgttctgaatggccatatagaaatttgttcttagtattttctacaaaaagtatcgtcgtccgattatattcccttcaagacccttaaagaaaaaaaaaagcatgagaccacacctcgcgaacgtctgttttaaaatcttccagggttccaacgtaaaccaatgcacatgacacattgacaccatattcttgcattttcccaatcccattttggataatccaaatctaatgcacatgacaccatatttcttacattttcctaatctcattttggataatcctgtgtttcagaggattagcatccacaaatttttggttaatcgttgggccatttcgccattggaaaccaaatagctcccaatcttacagcccaatagaccgttacgatcacgtcaggacacaataggcaagaacagtttcaaggacaaaactccacagaatcaagggcaatagaaccctgagaaattgtgacaaaaccgatgtatcgaaacatgtgccaaaatttcaatgctcctcaatagcattgcaatgttctcaacggcaatacagcacctcgatctagagcttactataggtccatataaatgaattacaataaggattgcaaaaagatcttcaacttgaaacttctatttcttcttgtcagtagtaccagcagacctgcacaacaagagaagggatttagtttgcaaattctctttgtcaaaggtaagaattggccagaaaatgaaaaatgaaacaaaacttacatacaactgaggtaccaaaacaacggagaaaatcatttgtactgctttgaattataaagctataataaataacagaacagaagtatagggacacaagttgggcggacaagcgggattattttatttttcccggttatcccacttatagttcactttttcttccaaaatttgtgctaccatgtgggaaatgaactagcaagaaggtatttatgcaaatagtggtattgtccacttgcacccctacatagctacagaaaaaggaccaagttaatttagagacaagtccaatatttgcagaatgcctcttatatacttgggagtacttacacaaataaatctcacaacaatgttaccgataaagtgctactccctccggttccataattcttgacgttttggacagagtgtagtcaaacttttataactttaactatcaactttaaaagtatttagtttaaaagaattagaatagcatatatggattcatctttcaaagttctataataaaagtaaacatgcatttatttattttgtatattataatagaaaaacaaggtcaaagatatattttgaataccgtgtcattgttcaaaaagtcaaaaattatgaaaccagagggagtagaacccattctacaatacgcacggaaaaaaaatagcaactaaaaaacagagaacatcaacaatgaaattgcagaatgcagtagtaaagacacacacctcatcttcctgatgacacccgccatctcctctctcttcttctttgctctcttgtgggtaccgagctttctcttagcgaccttcagtgcacgcttgtcctttccaaccttcagaagctcagtgattcgtttctcatatggagcaaatcccacaacctccctaatcaagcccctgacaaaattcactctcttggtacttttctgcaataagacaagaaaacatattaatgaaagaatataaataggaagcagctatggtgtatggccgtattcatcaggaagacagcaaaagaaatctctggtcatagactcgagaagcagctatggtggagattgtagttctcctcagtaaagtgaatttttttttcacgtcataggctcaagagatcacaagatcaactaatggtaattcagaattttctatttgacatgaggtgacaaagcatcacttcatcgttcatttgtcatttcaaaatattgaagctgtggaagttaaaaaatagattttaacagaacatcatttttatttgcttttatagctttgctcagaaaggtaaaccaaagatccacacaactgcacaagcaaaaaacattcaatttttgtttacattgcacagaaaccgaatctacattactggataataaaaaacaaaaaacattaaaatatttagaacaagacaaaacagaggtaaatttagtgagatattttagaaacaaaatcatgaggtgatt

SEQ ID NO: 5774 - DNA, 2226 bp, Oryza sativa
ccgtcaccaccgtcgcagtcacccaccaaatcactttctatttgtgtttgatctgttgccgatagcttttgtgagttgccttgtatcctgccgccactagaaaggaaatagaaccctgattcgagtgaccttccttaaaacagtcatatctttttcatacggactcgaaattaggcttataatatatccacggacatctacaaaaaaagttacatccgggttcagcaaatttaaaatcgccaaattcctcttgcaaaattctgtttttgtggcgagaagcttcgggacctattcgcatagaactttgaaaaaattctacaagcttcatactttgtccgtttgagataagattttctgtggttggttctagtgtgctcctggttgtgaaaaaaatatcaaaaaaataataaaaaaataaaaaaaaagttgtgcctctctcctcagcactagagagagcaagcaaaaaaaaaaaaaaaaagaggatccagcgagcacaccacaccattccccctttgtcaccaccttccaccaccggttcttgttttcgttgctgtttgggtttgtgttttgtggcgtcctttgtggttaggctcgcgtctctacttcgactagcctaggaccagcactgtacactatacccttgagcgattattcaatttgctttggctaacgtggtttctagttttctcttgagcattgctttcagcccaccaacagctccaccacaaacccgactacagcttgcaggtcttgttgctacagcaccgatacacctcgttccacggttgctaacttgtggtgttgctgtccccctcctgtgggcaaggtaagaactggtaagagcttgtgagacaagctgcgagtgaagtgagagtgagcgtcttgcaaaagctacatcccaatagttgtgtagggcttacattacatcctccattgttttgttgtccttcatttctaaaccatggcaggtccaaaggataaagatgaggagggtgcatctcattccccacgcaccaaaggcatcatccaatactttacaaggcaagtgaagcagcacacggaaggacttgatatagatttgcaggtgacaaatgagaagattggacaattggagtccacgcagatctccaccaacactaagcttacagggctggagacagcggtcacccgcattgacactagccttgctgctcttgtgcggcattttgatgctctcaatgctggaggcaatggtggcggtaatgacgatgacattgacggagagtacgtcgaggataatttggaggatgaatatattgctgacactgaacaagatgatcgagatgctcgagatcgtcgacggctacacaacaatcgacgaggtatgggtggtcgccgccgacgcgaggtacgcaacaatgatgatgctttttctaaaattaaatttaagattcctccttttgatggaaaatatgatcctgatgcgtacctctcttgggagattgctgttgaccaaaaatttgcatgccatgagtttcttgagagcactagagttagagatgctacgagtgagttcaccgattgtgcttcggtttggtggatagaacatggcaagaaaaatcctaataacatgccacaaacttgggatgctttgaaacgggtcatgcgggctagatttgttccttcttactatgcacgtgacttgctgaataggttgcaacaattgagacagggtgcgaaaagtgtagaggaatattatcaggagttacaaatgggcttgcttcgttgtaatttagaggaaactgaggacgctgccatggctagatttttgggtgggttaaaccgcgagatttatgacatcatagactataaagattacactaatatgacccgattgtttcatcttgcttgtaaggctgaaagggaagtgcagggacgacgtgctagtgccaaggctaatttttctgcaggtaaaacttcatcatggcagacacgcaccactcctccggccagccgtactgcttctccatcttccacacccacaaccagtcgagcagcacctcctccatctagtgacaagtcagcgacaaaggctgctcagccagcaccgagtgcttcttcaatggcatccacaggccgaatgagagatgttcagtgccaccgttgcaagggctttgggcatgtgcagcgtgactgccctagcaagcgagttttggtagtcaaaaacgatggtgagtactcctctgc

SEQ ID NO: 5775 - DNA, 2187 bp, Oryza sativa
ctgtaattcggaattaaaaataaggaatattgagagaaaagtccatataagaacccaatacgagattaattaatattcggaataaaataaaaaataaaattcaaaattagcaaaaagaaaaaagaaaagttcaagtaggaataaaatttaaaattaactaaaattcggaattaaaaataaacaatattgaaagaagaattcatataaaaacccattacgagatttattaaaattcagaataaaaaataaaataatatccaaaattattagataggaatacaattttgaaattcaaaaataaaaaaatatttaaagaacattataaggtattaattaaaatttgggggaaaaaaatctgaaattagaaaagaaaaaagatttcagttaggaatacaatttataaataactaaaattggtgataaaaactattgaaagaaacacatgacgagataaattaagtaataggcctataaaggagtagagtggtggcggttgatacgacatataaaaattgttaataaaacaccaaatataatcctaatgacgattaaaaggagggacgacacacaggccatgaagcaaacggacaaggtggttgccgggacttctagaaagtaaaaaaaaaacctcattgataatcatattcgatttttaaaatctcaatgataataaaaaggaaaagcagcgggcgggcgtataggagtaagttgtagagccgccgacggttggcgggacttctagaaaataaaaaatgaattccaacgatagttatgtttgatttttagaatcccgataacaacaaagagtaggcgacagatgagccgtagaggagtatagtggcatcgtttgacaggacttctaaaaattataaaaaatgaaacccaacaagacaataaactctaaaaactacaaggtccaatttttaaaggttcgaaacttctaaaaagtaaaaaaaacaacgataatcatgtttgattttaaaatattaatgacgataaagaagggaggtagcgggtgagccataaaggagtacatagcaaagctgctgatggtttggcgggacttgatgcaaacccgctagggtttgtggcccgatctttcgatgagaggtaagggataactcgattagatgaagtcgacgttcacggcccgactacaactatccaaagacgctgcgccttagcaaccgatacaccgtctccaatggtcgccacgaacttgtggtgcacgtcaacccggccacgagggcactcgtcctgcaagcaatcgaagaacaagcaagaacaagtaggataagcactgaaattgctagataaagatgaaagtttcactatcaaacacaatatggtggggttccgattacaggcagacgggcggtttagccaacacgcgcgctgcgagccggtagcaagaagctatctctatcatcaaaacccgcctgttcttggcggcgactagaggtataaaaagaggggaagaacgaccatagggtcgtgctccaaccctaggacgcacccctaatgggcccaacatggatacacagcccattgggccaaaagaggtgacgcagcaccatggacagaaaatagtcgggagtaaaatgataattgcggccgctccagaacagatatggacatgtggctggatccattcgaaagtagacttgataagctttccatgaagtacttgcacgcccaaatcggagttcgcatgaagtcgtggcgggcgtcagaagttggcgctgccctgcagtccgaatccaccccgcgcgaatcctcttccctttggatcctctccatcgttcctgagtaaaacacgagtgcacgcgtctccgaggtataaagacgaggaatatgaactcaagaaagaactcacctgataatttagttgacgtgcacgagcgcgggtaataggaccatcatgctgtatatggggggacgtggatgtatcgatggtgttgatgtcctcatcaggacttctagaaagtaaaaaatgaacccgaacaataattgtgttcgatttttaaaatcccaataacaataaagagaaaaaacagtggacggtccatagaggagtataatgacagcgtttgacgagacttctagaaattataaaaacgaaacccaacgagataataaactgtaaaaactataagatccaatttttgaagataccaaggagaatga

SEQ ID NO: 5776 - DNA, 3917 bp, Oryza sativa
gaaacctctatgacaattcccaaattcaatctttcaaattccttgcataattccaatggcaactgtcgtccttccgtagcattgcaatagcctttcctgctaagagcgtctgctacaacattagcctttcccgggtgataatgaattcccatgtcataatccttaattaattccaaccatctccgttgtctcatgttcagatccggctgagtaaagatatactttaaactcttgtgatcggtatacacctctgtacgagtaccgaaaagataatgacgccaaattttcaacgcatgaactactgcagctaattcaagatcatgagtagggtagttctttgtcacaccctaaaaattcaaaaaaatataaattgttgtttaaatggaatttctagaatttattttaaaagtcttgaaaagaaaatctaattttaattaataaattccaatataaaaagggccagataaaatttcattaaatactttgcttaattctataattcctagatttttctgggatttatttgagctaaggaagtatttttaataaatggaattgcatttaagaaataatttaaattgaaaaagttttaaaaagtcttcttttggctttgggccgaaagtcggcccaaaacccttctctctctcttcccccggcccaagtcggcccagtccgcagccgcccgcgcgcgcgcgcgccctcgcagccgctgacaggtgggtcccacctgtcaggcccgtcgtcctcctcgggccgaaaccctagcgcgccgccgccgagccgccgccgctgtttcctttcaatccggccgctcctttccttctccggccgaattggttgaggggaaatactctccgggatctcctctacctttttcctctttggaatcttcggccaaatcgctttggaaagcttggaatcgagttcgattcggatcgggttctctctctccaagccgcgagtttccttcgccgttgccgtcgccgtgggcctccgccgtcgcctccgagcccctttaaaaggatccccgtgcccttctctacccgccgccaccctcgccttcgcctctcgtcgccggaatcgtcctagcgccgtgcgccctagtttagtcgtcgccgccgccgctccagccaagctccgccgtcgctccagccgtcgccgtcgctcgggaagaccgccgtcgtgttcgccgtcgcgtcgccgtcctcgtccgccccttcgccgccgtcggagaccaccggagcatcttcgccgtcgtcaacccgaagagccccgccgtttcctcctcgtcgccggcgccgtccgttgcctctccgccgttgttttggtcatcggtgagttcgccgtgccgcccgcttcgtcccggtgtccttcgcttgcgtcctcgtgccgccgttcgccggcgagcatgcgccgcccgagccgtccccgtccgccgtcgctccgccgccgccgtcggtgacgtcatcgctggcgtcatcaagcccctctcccgtgagccgccgtggacccgatcaatctcagccgtccatcttggatcggttagatctcggccgtccgttcgcgtgaaccgccgcccgtgcgcccggtccacccaaaccctagcgccgctgacgcaataaatccccttttccttttcaaaaataattcattattgcgtcataattcaattttaagccgatttaggtgttttaatccgatttaatctttaaaaattcataactaattcatcttagctccgatttagttggttcaagtctctaaatttttctaaaattgagatctacacattaaaaatatccacatgtactgttcaagcttgtttatgtgctgttttggtgattttgttcttttctgcttagattccgtcgtttccggagagtccgttttcgccggaagagagtttgaagagttccaaggccagcaaggcaagtcacacagatcccaaacaaccctttgagcatgttgatcctatttaaagctattgttttcattcaactactgcatttattttcgaatgtcattgggtggaattaacctattctttgttatagccccttttgttcttgtttattctattccttgataccttgggttataataatttgactggttgaactttatttatattggttcaactagattttagatacaattgcttagccctgcttagaaacattagctcacttttgggataacttgattcactattatttcatgatggtttaatgatagttcacgatggtcaatcgtgattagttaattaattaatgtgccaactaaaacctggtaatggtgggttgtgagcacatggttttgaaggtcgtgctcatgacaattaaggaccggttcacgagtttcggttgtgaaacattaaccgtgccaaccacaagccagcatgggcaacggctttatcttttgtgtagcatggttcattgcggagcaccagactgagaagtggcggagataagcccacgggggtcgctggggagtccatgccttgtttataagggggtgattatgatccaggaaggtgcgctgcagtggattgtgttgtatgaggggtattgtcacaactcctttccgaggtatcgtggtgatattgaggcacatggtgacatgatgtggggttgtgtcttgtgggtacagtggtacacctctgatcagagtaaaactattcgaatagccgtgcccgcggttatgggcgggtctaacaatgtctttcgtgattagtctcacacttttcaccatagtaaatgatgctataattggtaataatttgattagctcctggtttggaatggtatattcctggtttggagatagagctgtgcagccgggatggttgttcagaatggttgggcctatgcaacagggtatgttgtatagcgttggattaatattgcttaattaatacttaactgttttaaattctcaaatgtttgctaaatgctgcttttgcaaatgaaaccctattatgccgtcctttgttatcctgtgcacttgcatatttgttgcgtggcttgctgagtatgtcatatactcaccttgcaatcattcatcagaggaagagttctgcagtgaagctgatggtgtggaggattaggtgtagccctggtcaagctgcctgtggagtggagccgtctgcgccgtttattttattttccgctgcttagatccttattgattgagaggaactatctacctctgtaataacattttatacgcttatagagtagtaattgtactctattatcaatttgttattgtgtgcctcggctgattcctggacgagggttcacacacatgtaagcgtttggaattttggatagaaattccgggcgtgacaagttggtatcagagctcccttgaccctaggttatgccaaatggttacccatagaagccctctaaaaatattggaaaagtagaactgttcttctccctttctcttttaattaaaccaaactaatggcacatgcactttataatctcttttaatggttctcatttaaaatttattccagtgttattagtactgtacatctattactgtactgatggctcatttaccagcagaagtttttattgttttatttaatcttacagcaataaaatgaatttagcaagttgattttataacttttctttttatttcttttgaaacctgttattcaaaagtacaaaattcgtttccaactgtttcaacttatcttgcaaagtttggtttacttaatttatttacccttttactttgaatttccaaactttattaaaattaatccaaaaaattgtgctattaattggatagatgtcttaactccctcctttcacttgcctttagatgccgcgctacaagcctgagtacctgtttggtgttgaagggtttgtccaggagttgcgtacaatgtcctttgt

SEQ ID NO: 5777 - DNA, 7856 bp, Oryza sativa
ctgccaagtgggcccggccgtcagccgcccgcgcccgcgggtgcggctgacgcgcgggacccacggcgccgaccgccgccagccgcgtgcgcccggtccaccgtggaccgtggggctgacgcgtgggccccactcccgtggacccggtccgcgcgccctctccctcggctgacgcaataaatgagtttttaattgaaaattaaatgaagaaattcgcaaatatccatttaaagagcatataaacttcaaatggccatatcttggccatttgaactcggaattggaccgttcaagtctctaatttttccttaagaagtcaagaacccatttttgtgctttgttcctgcttgttgtatggagtttattagagtaaaagccgtttcttttccgttggtcgtgtagacgctgcagcttcggaagatccgcccttcgtggaagttgaagccggcgtttgggaaagtgagcaaggcaagtcacatcacccttgagcatattgaatcccagtttataaaattatttcgatttaaattattgcattatcgctttgtttaaattcccgcgttatcactgttttatttagccatgcctatttacctttgttatgacattattattgctattgttattattaccttgttcaccctagaataaacaaaaccccaactagtgggtactctattcctggttccactagtatgaatttaggtagatgcttcgctgattaattaggcaacattaggtggttttataactttagactttgggaattctcatatcatttggacactatggaattgttggattatggtggaattggacatacacctctcttcctctttcaaaacccctaaaacctgttttcggtggggtttgggtgcatgccagttatgggaagtagcaccccggccactataaggattaagctcgggcctctgttgcaaagcactaccgtactaaccacatgtctaatgggtaaggcttaactcggtgctcagtctagtcctgaacaaaaggacacggatagagatggatgaagtcgttgcgacgatggatatctctgaggcaaatgaaggctacgcgagctgcggctcggtaatcgagatgtctaggcaaatgaagactacacgggtcggtgcccgttagtcgagatgccatggcactggactagtacgcgggtggtctcacccctatgtgtgtggcgcacccggtctagatcttgttgctaggggctcaaccctggcctgcctgtcccgggataccggccgtaggcagggttgggtcggtacttttgttcacggctaggatgggtgaagggttatgtcacatctttacgacgggttccaaggccatggaatgcggagtaaagatgtgtcttgtgggtaaagatgtacacctctgatcagagtaaatctattcgaatagccgagccctcggatatgggcaagcctagcaatgtacccaagtcagtgttttaattcttaaaatttgctcaacaactaaaatatggaatggttggcctgggttggcttgggacgagctgggacccaggtcgggttgccagttcggtccaaaccatcgtaggccttgggttaaggcaggttcgtgagggttcacggccttgtttaataatactgtgtagctctaggatcgtctttacaaaatggctttgggcaactgagtgacttttaaatgctgtttactgcaaaacttaatccctatattattactcccttgtacctccattgcattaattatgcatccgccggtgtggcttgctgagtactgtggttgtactcattcttgctcaatctttcccctcttcagtaagagaagctttgaagaagatgtcttaggtggagtcctggcttataccccagttgagcgcctgtgaagatggagccgtaggcccgctagtccgctgctgtttatttttgattgtcaggcctgaagcgcctttgtaataatgtaaatattatcgatataataaagatgtgtcttttatatcaggtttgtgtggtgtaccccggcttttcctgggacggggatcaatacactagcgttcgggaaaaggcaattttcccggtcgcgacactaggatcgacggcaactcctcctgctgagatgacgtgaccaaggaactttacttcagacaaccaaaattcacacttgctaaacttggcatacagttgatgttctcgcagcttctccaatgcaaggcaaagatgttcttcatgctcttctttggttcgagagtagataagaatatcatcgataaagactaccacgaacttgtctaggtattccataaacgccttattcatcaagttcatgaagaaagcaggggcattggtaagtccaaaagacataacagtacattcgaacaatccatatctagtggtaaaagctgtcttaggtatatcttcctctttgattctcaactggtgataccctgatcgaagatctatcttggagaaaacggtggcacctttaagctgatcaaacaaatcatcaattctgggtaacggatacttattcttgatagtcacatcgtttagtgcacgatagtccacacacatcctctgggtatgatctttcttttccacaaaaataactcgagctccccatggtgatgaactcggtctgatgtatcctttctgaagcaaatcatctacttgccttttgacttctgccaactcattggctgccattctacaaggtctcttatggatcggagttgttcctggtaccaaatctattctgaactctatatcccttttaggcggcataccaggtaaatcatctggaaacacatcaggatactcccggactataggaatctctttcaaagttatttggtttagtcttgaccttaaagactcagaagacaatgcatgaacagtcacaactcgaccatcattgctggtgagggttacttttctgttagcacagtctatcacacctttatgtctggctaaccagtccatccctaggataacatcaaggtctttggattctaacaagataagattggccagaaatggtactccctgaatttctattcggacagaggggctacgttgcaaagaaagtgcttgattacttggggtactaaccatcaaaggacgtctaagatcttctacttccatcccatgatttcccgcaaaactcatagataagaatgaatgtgtagcaccagaatcgaaaagcactgttgcaggaactgagttaacaaagaacgtacccaaaatcacatttggagcatcttgagcttctgcagcagcaacatgattgacacgggcctttgatgctggtgcggtagagttgctctgggcagggacaaccttcacacgtcggggcttcagacacttgtcagcataatgtcctgggtctccacagttgaagcacactacgggcttactgccttgctccctcttgacaggctgttgctgtgtcgaagcggcaacagggcgtggagcttgattgtggatgttgttgccagcattgttgttgaagaactgacgctgcggacgaacaacagatgaagaacctccctgtggcatggactggggtcctaaagtaagacgcggcttctgattattctcctgttgtgtcttgaattgagcaatccggcgtttcttctgctccatacggttgtatttgtcctcctggcgaatagccttatccaccaacttctggaaatcaggataatccccagtcatgagtgggtaagaaagctcatcattgagtccttccaagaacttctcctgacgctcttcatcagtgcgcacatcttccggagcataacgagccagacgattgaactcgtgcaaatactccgtaacagagcgagatccctgagtgagcgacctgaattccttcttcttgagagacaccactcccgatggtatatgcgtcttccggaaagcagcggtgaattcaagccaagtgataggttcagcagtagtcctattaaggcggaagtgatcccaccattcagaggcagggccatgcaactgatgtgatgcaaatgagaccttttcctgatcggtgcactgaagcaaatccaacttcttctctatggcatgcagccaatcaccagcttcaacaggattagtggtactagagaaaataggcggcctcacacgaagaaattctgctaacttattctgaggaggtgcatggttgttcccttggttgagctggttctgctggttctggagttgctgcatcatcatgttcataagctgtgcctgttgagccaggacttgggcaagtgtgggattctctccattgttgttgttattgttgttgttggggccattcctgttgctgcgagtgagcaccatctggcatgggcaggagcacaagaagagaaaccggggaaaactacttaggacaggggattaatttttcttttattgatcttaagtgagtttcattattacaaaactgaagactctcacaccactaaactcaccaacttcctaacactcagaagcaaacaaacgcatgcacttacatcccaccactgatgtaaattacatgcgagacacacacaaccaaacttaaaacaagcaaactaacacaacgatctaagacaacgactagacatggcactctagttcttccgggcatcggagttgattgaaggctcgttcggctcatcttcatcatcttgagtagctccccactcaatcttggaacgagtgtgcttggattcttcttcatcatcacttatgttgatgaccggaggatccgctagggctggggtaacttctttctccaccacacggacctttggcgccaattggtagcgagggacaaatagagctctcttccttgcggtaagacgaaccctggccttctgcagcggtgcttctcccttcaatgcggctagttccttctccaaacgatccaccttgtcttctagcttgcaaatcttaccacgattccggtcttcacgatcttgagctgctaacacagtctccgcacgactttcatccatagcccatagcatctcaaccaaatgccttgtggtagcatcattctcaattccttcggtcttaaggtagctgccacggtcacttccctggggttggcgaggatgatagcgatactcagtgtcggccaaccgatcactgtagcgatcgcggagctctcctatggcgatccttgccacctcctgacatgcatggatgtagtttctccctccagcttcgaacattactgaggggatatcctcactattactgttcaaggtgactttgactcggcacttctcttcatgtcgatcatgaggaatctgggcataaaaaggggcagtcccaaatccaatgacaaaggacatcgtacgcaactcctggacaaaaccctcaacaccaaacaagtactcaggcttgtagcgcggcatctaaagacaagtgaaaggagggagttaagacatttatccaattaatagcacaagtttttggattaatttgaataaagttagaaaatcaaagtaaaaggtaagtaaataaagtaaaccaagcttgcaagacaagttgaaacagttggaaacaaggtcacaaattttgtgcttttgaataacaggttccaaaagaaataaaagaaagttataaaatcaacatgctaaatttatttaattgcagcaagattaaataaaacaatgttgtagaacttttgctggtaaatgagccattagtacagtaatagatgtacagtactaataacactggaatagattttgaatgagaaccattaaaaaaaagattatgaagtgcatgtgccattagtttggtttaattaaaagagaaagggaggagaacagttctacttttccaatatttttagagggcttctatgggtaaccatttggcataacctagggtcaagggggctctgataccaacttgtcacgcccggaatttctatccaaaattccaaacgcttacatgtgtgtgaaccctcgtccaggaatcagccgaggcacacaataacaaattgataatagagtacaattattactctaattaataagcgaataaaatgtcattacagaggtaaatagttcctctcaatcaataaagatctaagcagcggaaaataaaataaacggcgcagacggctccactccacaggcaacttgaccagggctacacctaatcctccacaccatcagcatcattgtagaactcttcctctgatgaatgattgcaagatgagtatatgacatactcagcaagccacgcagcaaatatgcaagtgcacaggataacaaaggatggcataatagggtttcatttgcaaaagcagcatttagcaaacatttgagaatttaataaaacagttaagtaataattaaacaatattaatccaacactatacaacataccctgttgtataggcccaaccattctgaacaaccatacccggctgtacagatctatctccaaatcaggaatataccattccaaaccaggagctaaacaaattattaccagttatagtatcttccattatgatgagaggtgtgagactaatcacgaaagacattgttagacccgcccataaccgcgggcacggctattcgaatagttttactctgatcagaggtgtaccactgtacccacaagacacagccccacatcatgtcaccatgtgcctcaattccaccacggtacctcggaaaggagctgtgacaataccccttgcctaacacaatccaccacagcgcacctttcccggatcatagtcacccccttataaacaaggcatggattccccagcgacccccgtgggcttatctccgctacttctcagtctggtgctccgcaatgaaccatgctatacaaaagataaagccgttgcccacgctggcttgtggttggcatggttaatgtttcacaaccgaaactcgtgaaccggtccttaattgtcatgagcacgaccatcaaaaccatgtgctcacaacccaccattatcaggttttagttggcacattaattaattaaccaatcacgattgaccatcgtgaactatcattaagccatcattaaataatagtgaatcataagttatcccaatagtgtgctaatgtttctaagcagggctaagcaatcatatctaatatctagctgaaccaatatatatagcccaactagtcaaattttaataacccaaggtatcaaggaataaagtaatcaagaacaaaagggctatagcaaacaataggttaattccacccaatgacattcgaaaatagatgcaatagttgaatagaaacaacagctttaaataggatcaacatgcttaaagggttatttgggatctgtgtgacttgccttgctggcctaggaactcttcaaattcttctcctgcgaaaacggactctccggaaacgtcggaatctaaacagaaagaagcaaaatcaccaaaacagcacataaacaagcatgaacagtacatgtggatatttttaacatgtagatctcaattttagaaaaatttagagacttgaaccaactaaatcggagctaagatgaattagttatgaatttttgaagatttaatcggattaaaacacttatatggattttaattgaattatgacgcaataatgaattattttggaaaagaaaaaggggatttattgcgtcagcggctagggttacggtggaccgggcgcacggcgatggttcacaggaacggacggccgagattgatcgggtctacggccggaccacgagagacgacgacgatgacgtcagcggcgatgtcacctccggcgacggctcggcggctcgggctcgcatgctcgccggcgaacgacggcgcgaggacgcgaacggagggca

SEQ ID NO: 5778 - DNA, 3130 bp, Oryza sativa
cgccggcgacggggacgcagaggttggtgggctttttgggtttgagcctttcaggtggagatggagaggccgtggataacagggatttggactggaagttacgttgcttgatgggccttataaattgggcctaaataaaacatgggtctatttgtgcagcgcgtttcaatttgggaaaaagtacaccgaaggtctctcaacttatcatcgagttacaaaatcgtccttaatcgcaaaactagatacaacgcatccctcaacttacagaaccagtgtaaactcagcgtagacctacgcgggtcccacatgtcagcctcttttttccctcccctctccacctttcttcctctctcctctctcatcccctctcttctgtgtatctaccagaacccgctcgcgtgccgcccaaggaggtggtggctggcggcgtcagcgccgtcaaggagtacatggccaggcagtggcgcgacgcccgcgccgaggaggcgcgccggggcagcgtcgtcgccaagagccccaaggtgtcgatgcccaagaggtggcttgtgcgcagcatgtcattgatgggtagatgggtgtccgacgtcacgaggtacaacaccgggtaggcggcgagagaggagctgtgcgcgagcctctgccggtgaaggagtggcacgcaagtggtggggagcagctgcgcgcgggggtgggtcgcacttcttctgcccatggcgaggggatagcgtggagagccgccgcccatggcaaggacgccatcaaggttgaagggcggcgcaaagatggaggagacggggaagagcaagatgtggcgcgcgtcctcctccttctcctcgaacccgtcgacatcatcgtcgtcgtccaccactgccccgctccgcgccgccagcttcgcgtgccaccgccttgcaggcctacctgctccacccaccaccgcctcgctccacgtcgtcggcttcgagcgctgccgctctgcccaccgtcgcccctcttcacctacctggtacgcccaccgtcggcttcgcgcgccgtcgtcctactccgcttggctgctccgctcaccgctactccgctccgccctacctgccgtcaccccattccacctgccttccccagcccaccaccgcctcgccggcttcgtgcgccactgctacgcctcgccatcgccccacttcgcccgccgccgccgccccgctccatcccgccggcttcgtgacgcggatagatacagagaagagaggggaggagagcgaagaggagcgaggaagaaacatggagaggggaggggaagaagaggctgacgtgtggggtcacgtgggtaccagctgagctgccacattaggcaaaaccagagtcaaaaccgccaagggacttagtttgtcctggttttgtaagttgggttatccgctgtatttggttttgcggttcaagaacgaatttgtaacttgatgacaagttgagagaccttcggtgtacgttttcctttaactttgttgctttactcttgcagaaccttttcttttattttctttttttccttttttgaaagaaagaacactacacagcctgtttaaatttgctgaagacgcttttgtttcgttgatgctaacttttgtggatttcacgccggaattgtaaaaagaagactactggtagcaaatactccctccgtttgatattataagttgtttggattttttttctagtcaaacttcaatagatttgactaaatttatagaaaaatttagcaatttctacaacactaaatttcattaaatgtaatattaaatatattttataatatgtttggacgaaaagtatttatgtattttttctataaaattatagagtttgacaagaaaaaaaaatccaacaacttataatatataacatataacggaggtaatagaagtgatggagcaaaacatatgaagagactttcgggaaggtataatgctgcagtctgcttgaagatctggattgagctccaagcaaatagcaatcccctcttttatccttcgcaaaaggaaaaaaataacctcctccttttctcttttcgagaatacacacgaggaccaataaagtatggatcgatcgatcacaaaaatttaaggaggtggaaagccctgaaacaaacactcgagtaagaaaatgctgaatatgtagtgcatgttggggaaactgttcggatggtgtccctcatttatttaaaaaatcatcgaaatagttatcagaaatattaaaaaaataacagcattcatatgttgaagtttaggccgggaattgttaaagaagactactatcaaagaggggcacggtgatggctacaagatgaagctaaggtagaacaaaacatatggaaagacttttagggcccatttgaaatggaggattagcaaaggaattttggaggattcattttcctaaggattttttcctatagagctctttgattcataggaagaggatagaaaaactttcataggattgcattcctatgatcaattccataggaaaataagcaagaggttagacctcttgcgaaactttcctttgttgagggtatcctgtgctataatcaaagggctcttctctcaatttcctatgttttcaattcctgtaggattggaaaaacatacaacttcaattcctacgttttttctattcctgttttttttctatcctgcgtttcaaaggggcccttagggaaggaattaatgctggataaagatctgggattgtgctcgaagcaattaacaatcacttctttttcaagaaaaacacatgaggaccactataatacgatacgggtcgatgacaaattgaggctggtaaataacccccattttaaatggaggtttaccgagacgccagtagtacggtctgagaaaacaagctatttatattatagacaggtgggagaacaaaatttccgaagatttcaggaattgtcatacttttttttgcacagaattatttgaaattttagcaaattttattttgactaaatttgaataaactttgaccaaattcaaaaaagttggaaaaaaacagaaaacttttggctgagatatttgcttgcctagggccggggggggggggggggttattttcgaaacaaaattgtaat

SEQ ID NO: 5779 - DNA, 1887 bp, Oryza sativa
ggcatgcctccgtcgccgccgattggtgtcctcgcctacacggctggcttattatgccgccgctgttgggcgtctaagacttcaccgccggcctgcctccgtcgccgccgagtagtgcctccgcctacacggcttgcctattatgccgccgctgttgggcgtctacgacttcaccgccagcctgcctccgtcgccgccgagtggtgcctccgcctacacggctggcctattatgccaccgctgttgggcatctacgacttcaccactggcctgcctccgtcgccgccgattggtgcctccgcctacacggctggcctattatgccgccgctgttgggcgtctacgacttcaccgccggcttgcctccgtcgccgccgagtggtgcctccgcctacacggctggcctattatgccgccgttgttggacgtctacatcctcaccgttggctcaccttcgctgccgtcgactggtgtttccgcttacacggctgacctattatgccgccattagtgggcatcttcgctttcaccgtcgaccgccttcgtcgccgccgactggtgtcttcattgttattgatggacgactttgttcccacattggccacttctgccatcaccaaggggaatattacaaagctaagtcatcatttattttattctttatatgatatttttccttttcctctgcctcactacaccaattggtcttccattgagtagtgagtcgggggctacagatgttatatcatattttttataatatttatcttgattgcttgcgacataatctgagtacaaaagtacctatcgagttatggagttctatcttcctatgctttccgtttggtttgccaatggatggttgcctttgggccgattcctagcacccgggggctcgttggatggaccgagtaacgcaaggtgctaagtattattcggaataaatcaaaagcatagagataagataatttattttctgctcttaataattgcaaaagtacccgagtagtaaactccgatccgtgaaactttgttccattaatgacgaactcatatcacccatatgcatgtttgggaaatgcctaggccgactcccgatgcttggggactatgactagtcgggcagagtgtttaaacgtacagagtcatctgctcggggaaatcaaaattgacaagaggagaaatacatatttataaatattttaaaatacttgattttttctcgagtattatatttatatcagatactactcatcctatatgattgttctgcaggatccagatccagatatgcataaaagggattcatggctttaagcttatctcttacgctccaggaatggatcagtcagaacatcaccgaccggcttgcctccgccgccgccgactggtgtttccgcctgcacggctggcctttatgccgccgttgttgggcgtctacgtcttcaccgaccggcttgccttcgccgccgccgactggtgtttccgcctgcacggctggcctttatgccgccgttgttgggcgtctacgtcttcaccgaccggccgcctcgaccgccgccgactggtgttcccgcctgcacggctggcctattatgctgccgttgttgggcgtctacatcttcaccgaccggccgcctcgtccgccgccgactgatgtttccgcctgcacggctggcctttatgccgccgctgttgggcgtctacgtcttcaccgaccggcttgccttcgccgccgccgactggtgtttccgcctgcacggctggcctattgtgccgccgctgttgggcgtctacgtcttcaccgaccggccgcctcgtccgccgccgactggtgtttccgcctgcacggctggcctttatgccgccgctgttgggcgtctacgt

SEQ ID NO: 5780 - DNA, 3465 bp, Oryza sativa
tctgtttgtatcttattaaaaaatagaattattacttattttatttgtgacttgctttattatcaaaagtaatttaaacgtgacttataattttttatatttgcattaatttttttaataaaatgagtggtgaaacattacatgaaaaaagtcaaagcgaccattaatttagaacggaggtagtactaggctatgtccaacggggcgcgcgtgtgtgtgacaatgacatgtggggacagggagctggggccgttgcgtcagttggttggggtgaggtgggatgttggtggaaagtgtttttttttggggcttggaacagcaattattggggtgcacatggggcaaggtatccaattctgcctattgaagattagggaattttatttagggaataatgtagggggtatttctcttaagtaacaggtgttctttccatttccatctttctttcttttcttttcatagaaaatgacagattaatgactaatgaggagaacaatgggaaatgaatacacattgtttcactggaaaaggagggtttcaaagcctttgtgttatattacttgtttaaatattttaaacacatcactaatcctacaaacttggacatagatagatcataaattactggtgatgatttttttttctggaaattattttactttcttattgcatcaactttacctatcattttcattgtcttttttcttaaaaggaaaaacgataatcaatcaaatatttggttggctaatagcgtttgaacgatgaaatcttccacgcgttgaagttggtggtcaccaaaatgtttgcttaggttaggaccatcaaggccctacttggacaaaatgttttggcacatccatattagcatgtgataccctgttcacttttgtctttagaagtcaaaaggaaatagtgggctgtgaacttcgttgaatctgaatcacttggaagaattatacttaccatatctcaaaatagcttttctttgtcttggaaaatatcctcttagacaaatattttgcatatcgatggaatgaaaattgacttgttgcaattcctcagtgatcaacggtgcaattagacccagtaattgcagtcaccttagttgaagctgggatataggtttcagggttgtcatggatcatctaacagtagcttatgtaaccaactttcagcacaaattttaccatactactgtatttcacacttgacagagtagttaacttgatggtttgcagtaatatttgtccttagggttgatcaagaaatccaaagttaaaagaacccttacctcaaagcaaagtcaaatgtggtcctttaaagggtcctcacattaaaccctgcattaacccttgttggaggttggttaagggtaagtattaagtaattacaacttgcattgtattgtattatctttgtatgagtgatgatgcctcaaaaccctgcagaattccaatgtggagcccttgccaaaaggttaataaaaaaaaggcaattgtcctggtaatactttattaactgtactgttgctcctgcaactagtttaccttttgtactcttacaacacacatggggtgtgggacttaccgacttagtaatctactacttctcagctaatctgaactctgaagaagcatataaattttacagatccggataatctgatgctatgccagtactaggtgtttgtcagtgtgttggtgtccgtattaattaaatggcattgaaatctcaaggaagaacctactggttttaatatagatgcagatactagcagcttaggacatgtgagaagtcgaaatgcagcataccttattcatgaaccattaaaagtgtgatttataggaagcagaagtatatcaaatgcaaatgcataccatggtatgtttctggtctggtcagagtttgttagaaagtggaaccactttcagcacttctttttctgaacatgcacagctcatgctagagaacattgcatggagtagaggaagaacttcagattgaaatggtctataaaatggcagctccataaggctgaaacattgcaacagacagcatatggttttagctctgaaggtaagagttgtaggaaactgaactctttcttgtcagtgacagtttcaggagctcagttttctccaacatcttatcttcggcgccttaatctttgtagtgactataaatatgtggagtggtagcttggttaggtatcacaaccataatctttggcagctgaatttgaggtttggatgggaccaaatcttactgcagacttgcagagcaagacaagatttggtttcctccaatatctcatgttcagttgtcagacagtgaatagtggtgcaattagttagctttaacttatgggtggaacaaccttggaagctgaatgtgagagttggatggggccaaatcctgagcttcagatcttgccatggcacaagatttggtttcctccagtatctcaccttcaattgtccaagatggccagatgcaacataaaatgtgttttgtttatagcattttctgtttagaaatgggtacagagtgggattggaattagagtggaacagatgcagtgtagggaaatatggctgtcctgttatttccaatgctgagcattctgcagtaatcaagttgctaaacagataaattagcagtagaagcaattacatttcataccagtttttttttttttaaaaaaaaaaacctttcatactcttcaatcttgtatttctatgtaaataacttttattcctcttaatacaaagatacgctcctagcgtattctcgaaaaaaaatactccttttccactgaacaagtagcatatgctaattcttgatcatctgcccacacaagtatcacattttgctgaaatgtgcaggcagcagcatacagcagttgccatttgcttaaatctaatttttggtagcttagctccatgaaagatgcacataaaacttccttcttttagttaaagactagctcgcagccatcaatttgagacaatttctcaccgcatacaagcataactcttttccaaattttctgaagctaatcagagataaagcatggtgctttttctttttacagtttcagactttcagcaatctcaccgtggagtcgtggactatacacagtcaatctccaaggatgcctcaggctctcttcgcgtgaagaaaataaatggaactaaaggaagggatgcacgaaccttggctgcaggagagttagctggaatggtcgattgaggtcgccggcgacgtggaagatggaatgcacgcgcgccgcctcaccggcaaggctaggagggtccgccagagcggcagagccacgaggtcgatgttaaatatgtgatccgaattaattttaggcttacaatatattcggattagttttctaataggactccatgtctttcctattaggtgtctctcctatatatatactcttgtaaactg

SEQ ID NO: 5781 - DNA, 7568 bp, Oryza sativa
cgacgaggaggtggacggggaggagctgttgcagaggttcaggcgggaggtggcgcgccgccggcgtcatggaggagatcaggtggcggcggaggcacgaggacgcccgggacaagcgcaagcgcaaggcccgctccgccggccggaggtttcgccggaggtgaggccctcgtcgatccatcggtcgattgcttccatgatcctgcctagattgtgccgatcaaagatgatccttccttttcctttttctcttccccctttcgttaatctgcagccttctactatcttggtgatccatttcatttgcttaccgttttaggtgctaattaatcatgcaatttccgtcagcttcgtgaagccaccttcgatctgttctaatattgggcatgctgcatcggaaaactacaagcatacgttgtttgtgctccattttaggccgctttgatatttcagcgaccaattcacttattacatgaaagcttcgtaccaatactgcctcttcagcggcgaatttttatctcacattagatcgctataatacattgggcttatgtgaatatcattagcatttcagctctctgatggtactgactgccatgttcttctgaatgtggtcattggactgtactggtcatcttgtaaattcattgtcattagcattttagttctgattggaagcaaattgaaattatgagataatcctcttttcttatcaagagagatgagctcttatgtttttgttccgataccactagtagttcttttctttttgatgattgcattgcttctgtcctagctttcaatacattgatcctattctgagcaccatgaattcatcatggccacgttcattatcatgtcaagataaggagctgccatattcatcatcgattgtacattagttatgctagtgatggattgattcaatgaaaaattgtgaatgatgtaaagttgtggatttgggaacatttgattttttgtggattggatctgattggagggatcgatcagggccgatgggaagctgtcgctggttgaggagcagcgtcagctgtgaattttttttagcactaaaaaagtgcagtcggacggtgtaaacttagtcccgtgtgaaaatcaattttagtgcaacaattgaggtatactacctctatatgacgtattacgtcatctagaaaaagaacagaggggagtatataaaagagtaacactggcccttggatcaatgtgcaatggagggtgtaaactatatacttttggtttgccataaaaaaatcctgatgataatcatagccaatttattcggttgtgtgttttctcttcggtctccacacaccacacacatgcatgcactgggacaatcgacaacattttatatggattaagagctcacgtacgtgaaatcagcaacattaaggtgctggtgcatctagcgtgcttgcgcacagtgagtggtcatggtgaccttattggaaatcaaacaactcatcattcgaagatatatatactggatcaaagtaaacagacagacaaataatagaacaaattaaataaaacaataagcatacatatacggtggttgatgtggccatggcatgttgttcggttagctggctagggtgccctagctaggggcgcttgagagagaggattgccttgaagatccccacaatcacgcggcgaggtgaaggtgagaagcggcagcggcgcgaggaagaagaccggagggtgaggggtggccactctggccatctccttcttggattcggtgggggagaagggagttggaggcgcaggaggccggcggaggcggtcggcgagtaagacggtagccagcggaggtggttgtggccagcaaaggtatttgggcagcgaattgaggtgcaggtggccagtggaggcgagcaaggcgatggctggcgaaggtgctatcgaggtggagttggctgttgaggtggctggagaagctgttggccggcggggttttagtggtgatgggtgatggccggtggtattgccacttggagaggtcgtcgttgggttggtcggttggttgctgacgtggttcgttcgtttggaaagctgcaggacacggtgaacaacagtgttgtcagtggcttgatcaccaacaagtgtacctccaagtttatctggggctcctcccgtttcctagagctcctcccctcctattgaccgttctgctttcagattccggtcgtggggagttccatggcgaggggcggggagctagctttggttggtagatttgcttggagttcgagagcctcaacactaccagcgctttgtttttcttgcgtcggcgaggtgcctggttcggtggagttggtgcatgagacctctgcgacgcaacctgttgatggtgtttggggtggagtcggagctgcatgcttggccgggtgtgacaagctggtcaacaataacccccttgctccttccttttggtagtttcgttggggttactatgcagttggcttcctagtgtctttgggtaggtgtgttgggggaaatcggagctgcttgtcggtgacaagctcggcaacgataaccctctcccgctttctatggtagcgctgtggtagccagggttgtcgtagttggcagggagagcgagctggggcgaatgtcctgctcgatcttgggctagagccaacgatggcgatgcctgtgggcgccattttccttcttgaaggcatcgtttctgtgctctactcatttcttcgggtgaaaaccttgctccgattttcggacggacgttgtttgtgtttcgacgctatcttcctccttggaggcttcgtcttgaagaccctgccctacgcttgtctgtggtctgttcataggaagtcggagctgctcttgggagcttggcaacgatagcctatgttttatcctctagttgtgccgtcgcaagttcttttttttttgttctccgtgtgggttttgcccggctttccccttcaaaccatgcttatgtgaggtttttgtgcccggtttccctcaaaaattgggccaagtctcttcttcttaaatgaaagcaggctcttcctgtcctcttctgaggtttttcctcaaaaaaaaaggacaaattcatatagatagaaattggaattcggatacaagcaagaaataattgttgcaacgtacagctagcaagctctgatctgctactcttgggacgtttatcactactgctggtgttgcttgatagacatgagtgttttgaagatgccgacgagaacgccgattatggagaacaccgtgacgatggtcttcaagttgttgtagatgaacttgtgtatagggatccacatccacctcttacgcctgtatgcttcaagattgtccaataaatagctgtgctgaaaaggaatgggaattagatcgacaaggttcttgaagaatacgagtgtgcgctggttgctgaaatcaccatgtaggatacgcttcactcgcagctcgtgcacgtcttcctcccggctcatcagcatcgcgaggagggatacgtaagagcagacagtgtcttcaccatccatgccagtagaggccgagcaaatctcgagtgccatcatattgatgagccagcatgcattttggtcgtccatgacgagaggtgccatgaagagcttgccgaacaaggcacctttgctgatgctcatgtcattaaaccatgttttcttgttggctaccaggttgatgcctatttctgcaagctcgatggcgctgctattctgtgatattgaagtaattccttcagggggttcgagggccatgcttccattaggcatgctcagccctgattggtagtaccgaaggaggccaaggagatgtgatggtgtgtagctttcatccaagacgaatgatctcttttctaaatctgtgtaggcatcaaaactggcgcttttttgagagatgaactctcccacgggaacagacctaaaggtcatgagggcatccagcaccacccatgggagctggttctctagcagaaagatgtccctctccatgctagcatcgttggagttgaaccaactttccaatgatggagcaatgtcgtcagttgagcaaatgatatactggagcaagaagcaaccatcatggaacataatagccgcaaagtcaccttcgcctatgcttgccaccgtgtcatcatccacgtagcagcttcgggcttcggctgcaaccaagaggattctctggtagacctcctcaaccgagtggcctgactccccgcagaagtagtaggcggccgcacgcttgacctcctctgcctccttgaggtggggtgcgccatggtggtaaggaccgatggctacagctcttgggacgaagtagcggtcatctgtgctaattaagcttcgaaaaattgaagggtacctgtggatcttggttttgatcttggagaagttattctccatcttttcggctgctcttttcagctcctcttcgaccggaattgctacggcttctgcagcggccgtggccatcgccgttggctgctcggcagtttccagtggttggacctgatcgctgctaggaatagctgagagttcttccatttgtggatttgctgtcatgctatgtattcctgctacagcctacactcaactcaaaacatgcgagcaattggtggtgaaacaatgaagtttaaggagatgaaagatcccatctcaaccaacaaatatagaataggttggtagatgatgcatgtggccaaatatagaagtacgtttgccaatcaatttgcttttgattatattagagagtacattagctagaagtagtgttccaaatctggtgtcacaagaacatgtaatgatacaagttgttaggaatccaattcgccaaattcaaacaatgaagttcacagtacaagttggtggtggaattgagatgaaggagctaaaaaatgggcaattttaccatcattgagaagatgcctagaggtaccatattttttattttttatatttgcaaaatttttttgaataagacgagtggctaaacgttgcaaataaaaactcaaaatcccttatatcgtggggcggagggagtactagtaattgtgttacgtgttgttcgtgtgctgtgtttcggtacctgcataaatcaccgatcaacggtgtattgttaagtgatcaacaagttcatgatgaaaaaaaccgacagtaatagtggcatcggtatcaaagtgaaagaaacattgataacactaagtcacaatatttgttaacaatatttaagccaaaactttacattctctataaattgctcacgggtatcttcaccaccaaactgtcataattataatgtattagcataccaatgaattttgatcgtccaggttaccgaccagtcgtttttttagcttacctatgttagttgtcatcttgttacatcatatacgtctctctattcaaaagagataatagaatgtactccaattttactttcatcctaaacatttattgcaattatatatcccactttataactggctttatatataggcacaaactctagcaatttatatgttcagtgcaacaaattaattaggaaatataaggggtgcagtggcaacaatccggaagttcctacgtataatagcgacctacggtgatagcagcttcttgcggtttcgttgcttgttttccacttgcatcagttgtcacatgtctcttttggaattaaaccccaagagatttttggatgagctgtggtcatataagagaatctcgatttgcatgatgaacgttccacaccacttgttggcggtgagccggtgagaaacgggtcttggtgatgcttcggtagaagcatgcatgcgtgcgagataatcggttggattgcggtggtggcgactggcgagcacaaatagatttgctaaaacctttctgaaatgtattttcagataggtaatccctccgtattttaatgtatgacaccgttaactttttaatcaatgtttgaccatttattttatttaaaatttttgtgtaaatataaaaatatttatatcatgcttaaagaatatttgatgttaaatcaagtcacggtaaaataaatgataataacataaattttttaaataagacgaataatcaaacgttggttaaaaagtcaacagcgtcatacattaaaatacggagggaataatttttttcccgtattatccttattggcttgacacagggcaatatcgtctaaatatatattgtgctgaagagtagacgagtggtcatttggagtaaattgcatacggcggatctacgactatgatgtatgcgagtttggactaaaaaacaaaatattcgatgcaacttatctaagaaggattgttttcatgccaggcttgactagatcatgaaacatccgaagcaccggaatgcccccatccactagctttatcggattattagccctttgaaatggatgactagacagattgtggaagattgattatagggtgaaatatattatatattatatagctaacaatagcttaaatcaagttgtttaagtaacactgatgtaaaaaagtttttggcaaaattattcttttggaagtgtggcacagataatcatcacatattacacgctttccagactgttaaaggtaaattttgtaataaataaaaaaaactttctatatagtttttttttctaaaaacaatcaaataaagctaattttaaatttacaaccttatatatttaattaatcatatgttaatgatttgtctcgtttcacatgtgcatgtgcttggcagtggcagagccgggaggagcagaggaaggcctggcctcccccaacaaattgcaaatttccaagtacatctagttaatcacaagatcaagtaagcattaatgctagctgccctgagtctttgggcctttgtctcaaaggccattggttgtgaaatttatgctagctgcctagtacatatggatgggtgtggaacactggaacaatcaagtttgatggctccaatcatgaatttgattacttaagtcctaactgtcttgttatacatagttcattgtgaaaaatcttcacattgctaaatgattggcttaaacatgattagtttgtattgttaaattgtcaaaatatagggtatatattaatataaaattactactgttaaattgttaaattatcatatctatcttctatctatcttctatctattatatactaaaagtccattaaactccctacaaacgctcttaagctgccacgtgtctccctcaaaacactctcaacttgccacgtggcgtaacgagaggaattcagcacctcgtagggcccgcacattatttccataaatatatgtacgtgtacacaaggcaagatttgaaatctatctaaaagcaaaacatgtacttgtcgtgaacggacatagattagttccatatttgtgtgtgagaggcaatattccaaatctctcaaagcaaaacattccaaatctcaaaaagcaaaatttagatcactaggaaagattattaattgcaacaaggattagttccatatacatgagacaatattcgtaagg

SEQ ID NO: 5782 - DNA, 6918 bp, Oryza sativa
caacaatttatatattttgaattttcagggtgtgacaattttcttgggggtcgtttaaaaattaaatttttggcttgggagaaaaacttcggggtgtgacagcctccctctagaaccgtgcagcccaactcaaccgacgagcgagccaacttacacataccactccacttttcgttctcgcttcgtataaaagggttaacccggaagtgatatggttgaagggaaaatgccttataaattggttccactcgtgctaaacttgcaaggtgatgctaaacatgcgcacacagctctcatgggctatacatgcctcatcctaattgagccaggatgtcacaatttttcgggcctggctaatgggcgatcgatcgcttatccccatccacccctatacactcctctcccccttcctcctccccttcttctcttccttctacaccataaatttaaaaaaaataaaaaaacagagttgggaaaatttatgtacaaacataatatatatatatatatatataatatttgaattcaaattcaaatttgaatcgggtatgtaaacttttgacttataaactttgggtttataaactttagatgtatagaaatactatatataaaaaataattgaattgaaattcaaatttgaatcggatatatttcaaattcaaatttgaatcgagtatataaacttttgacttataaactttgggtctataaactttaggtgtcatcggagcgggccaatttccttttgcccctcctatcacgccgcttagagcgggggacagactcgggggtagccgcagccaccgcgccggtgccgggggaattccaggcccatgcctcctccttccgagccaccttgtccgccagctggaagagctcggcggtggtcttggtctccttggagacaatcttctctagcatgcggttatgccgcacgccattctgaaacgcataaacgaccgcgtgggccggaatgcatggagtagtgttgccgacctggcagaagcgctatatgtacgagtggagggactcgtcgtccttccgctgcacagcgtgcaggtccgcctcttccccatgcgggcagctcggcgcttgtcccggcgtcgctcgatattgattcgagcgtcctgctccccgtagaggccatcatgacacctctgacttcccgaggcccccgacgatgttggagccgtggaccgccttgaggccgtggctgatcgacgggccctcctccttgccgacgaggagagggtaatggaagtacgcgacgtaccggtgatggcgggtcggccgcccgcggccagctgccgctgggcagtggtgaccaagttggccacatcatccaaccagcgctggacaggggtctccggctccaggttcacggggtgatgccgcagaagggcacccgccgcttgaagcgcgcctcggggtgagccgccgtcaccataagtgaggtggcgccgtgccccgacgcgttgtggcctccctccgcccgggggcggggagagggccgaaccatctgaccgagtggggtcctccctccgcgagggatcgtggcggggaggagttggagagttgtggcggcggtgacgagggccgcggctctcgctagcatcctcactcccagacggagtgggggtgtacaccaccgcctcctcctccaggacctcgactatgattgtcgagggccgagggaaacttggggcggaaggaaacgacttctctttaaagcgcgcgacctccccctacctggcgcgccagctgtcgaggagtgatcctctctagcgggagatcgtgagaccccccttttgtgagttcggctgggggaagaagctcgcctctggaaatcgtgtatccgtatccaaggcccctagctagcttgcacacagccaagttatacaggttcgggccgctatgaagcgtaatacctgtcgaaacatgatttcggcaataataaaagggggtagcgcacgagacctaaaagtggatggatgcagagacaaaggatttagacaggttcaggccctctcaatgagaggtaataccctactcctgtttggggatttgaatccgccgggtgtagtatagatctgacgatcaggttgtctcatatatgccccctagagggcctcctgcccaccttatataggatggggggcaggattacaagatagaaaccttaaccaatacggtatctgtttcctaaatcaggactttaggccattccgtaatatacaaggaaacgtaacacccaagtcatgatctgttacatattacatagatataagttatcccctataactagtcggataaccatgccgtgtgggtatggggtacccataatctccacagtagcccctgagaccttcacagtcggaaagataaccttctctcgaactagattactccaaagccgagtgcttcaatcatcttcgccatggtctcccgagtacttttaccaaatctgaagactgtggagggctgaaaaatatagtcaagtgcatcgactagatgcacctaataggtgtaacccccgactatgtggttaatcgaacaaaccaaacatatagtcaaagaataaataatccaaccaaccgagtggttttgataattatagtcaaccaagcgacttaatattaatatgtagcatatgcggtgtgaatccctgaataatatgatccaagtgatataccgactgttttgtaaaatatgatgaatgtaacctaaagttggctacattattgaaaattcacatagcaaaacagctataaagaagcttgtatgttgtgaataaataaattcccaaagtattgggcatacgccatgcgcacactgctttaacagacgtgctttagtccctaaaagacacatggtttcaccacacctggaaatatatggcatatgtggtgtaaaatccgagtaaataaactcataaaggatttaccaaccgcctagaaaatgaccacaatatataatcagcctaagccataatattggtcaataaaaaggcacacttacgtggcgaaaagcaatgatattgtatccaatcaattgcttaaaaacccaaacagcaccttgacttatataaaaaagtcagcgggacagctatataaagctttactgtttgacaccttttaagatgcattgtaccaactcctaaaaagttaagtaattgcggtataaaaggattttaaggtattgggcacttgatcacgcgcactttggcctaagcaaaaagtgcctaagtccctaaaagaacgtgacaggccacacctgaaaatatgggctgcagacatatcaggcctaggccaaaaaatatgccttcgacaccctttaaaggatgacgcatgtaacatgctcccgagtaataaatcttctgggtaatatagaccaagtgtagctcatatgaatagcttctgatctgaatgattatcccttatgggatactccaaaataaatataataattgaatcccgactggcgcaagtattcagttgatagcccttacggggaataataattggtccagtctttgagcatagaaaatagactcatgactatgaatccatgtggaatgtatccggaacaagtccaaattggagatataatcctcacgcttgagttgatgagcccctgagcatatagcttgtccttctgtcatagtcaaaattgtctattggcaatagctgacgcagtcggcatggagatgaaatgaccaacatgaagacgaaattgctcatcagaagtaacggaagatgtcagtggtagtaaagatgccaccaatcaaatgtaatgaagttgcataaccatggaggcgaagaaaccagtcggcaacagtcaggtcagctagcagtgaagatgtaggcgcccaacaacaacgaaagaacagtcggtggtgacaaaagcaaaccgacgatgacgacgtagacgcgcatcaacggtgatggcgaaatccaccaatcatgaagatgaagaaaataatcggcggcgacaaacgcatccgacggtaatgatgattagcagcaacagagatagccgactatgatgacgaagtttcccatcaacggcagcagagtaggctatgttgaagaggcttgacaagatgttgatgaagatgacgatgtcggtgatccagtcaatagcgatgtagcagccgatgataacgatgagatcctctatcggcagttgcgtagtaggccaaccgtgaagacaaataattggaggagagttgatgttgttgcccaactcgtctaaaccgaaatatttgaagttgttgaagtagaatgtctgttccgaagcaaagatgaagataatgactcctggagttgactcattggctgattaattgatttcttcagcttgacataaaatttgtcaaattttgagccttatatttgtgtagcccccgactctttggttagttgggaaacaactgaacatagagtcgagaattatagcttcttgtcgtcgagtagtcattgcttgattgaagatatgtgttgaagatgtccaagtagaaatcctgaatattggagagtcacttgttgtagtaaaataacatggcattgcatgccgagatgtcgaggttcacaaagacgtcgtggttggtgaagtagtaaaacttgcgaagtagcagcaatagagtttgccagtgccgaagataataaagatgaagtcgctccaccatgatgacaaagttgcatcgccgtgatgaagtgaacacgagtcggcggcaacagaagcaaactggtagcgaagacgcgcagttgtgaagataaaagcactagtcggcggcggcataaccagtcggcaacggaagacgatgatgtccatcagtagtggtagctgtataaaccagatgtagaggcgagggcactagtcagcagcagacgagacgaccggcgatgaagatggtaaggccaatcaacactggcagaatcatgcagccatggaagtgaagaaaccagtcggcagccatggcaaacgtaggcagcttgtgttgaagatactgatgcctattagtagtgacagcgatgtagccagtcgtgaagaaggtagcatcagttggcgttataacaggccagccgtgcaggcggtgacaccagtcagcggcggatgcggcggccggtcggtgaagacgtagacgcccaacaacggcagcataataagtctgccgtgcaggcggaagcaccaatcggcagcggcgaaggcaagccggtcggtgaagacgtagacgcccaacaacggcggcataaaggccagccgtgcaggcggaaacaccagtcggcggcggtgaaggcaagccggtcggtgaagacgtagacgcccaacagcggcggcataaaggccagccgtgcaggcggaaacaccagtcggcggcggcgaaggcaagccggtcggtgaagacgtagacgcccaacaacggcggcataaaggccagccgtgcaggcggaaacaccagtcggcagcggcgaaggcaagccggtcggtgacgacgtagacgcccaacaacggcggcataataggccagccgtgcaggcggaaacaccagtcggcggcggtcgaggcgagccggtggtgatgttctgactgatccattcctggagcgtaagagataagcttaaagccatgaatcccttttatgcatatctggatctggatcctgcagaacaaacatataggatgagtagtatctgatataaatataatactcgagaaaaaatcaagtattttaaaatatttataaatatgtatttccccgagctgatgactctgtacgtttaaacactctgtccgactagtcatagcccccaagcatcgggagtcggcctaggcatttcccaaacatgcatatgagtgacatgagttcgtcattaatggaacaaagtttcacggatcagaatttactactcaggtacttttgcaattattaagagcagaaaataaatttatctcatctctatgcttttgatttattccgaataatacttagcaccttgcgttactcggtccatccaacgagcccccgggtgctaggaatcggcccaaaggcaaccatccattggcaaaccaaacggaaagcataggaagatagaactccataactcgataggtacttttgtactcagattatgtcgcaagcaatcaagataaatattataaaaaatatgatataacatctgtagcccccgactcactactcaatggaagaccaattggtgtagtgaggcagaggaaaaggaaaaatatcatataaagaataaaataaatgatgacttagctttgtaatattccccttggtgatggcagaagtggccaatgtgggaacaaagtcgtccatcaataacaatgaagacaccagtcggcggcgacgaaggcggtcgacggtgaaagcgaagacgcccaacagcggcggcataataggccagccgtgtaggcggaggcaccagtcggcggcgacggaggcaggccggcggtgaagatgacgatgcccatcaacggtggtgtgaccaaccgaccgtataggcggggacaccagtcggcggcgacggaggcaggccggtggtgaagtcgtagacgcccaacagcggcggcataataggccagccgtgtaggcggaggcaccactcggcggcgacggaggcaggccggcggtgaagtcgtagacgcccaacagcggcggcataataggccagccgtgtaagcggaggcaccaatcggcggtgacggaggcaggccggcggtgaagtcgttgttgttatcagcaatggcggtggcgaagacaagccggcagagtggactcgcggccgatcgaccggaaagctgagacgcctcgagtccatgaccagcatcaatcgcctcaatagtgccgcgtaattatatgcgaacaacaacaaaaaatagcaagagattaat

SEQ ID NO: 5783 - DNA, 4970 bp, Oryza sativa
aatcccggccatctcgggcgcgggcgcgggcgggagagagaggggagtgggcgcggggaacgcggcgcacgcgtgggcgtggtcgacgtggcccggaggaggcggaggcgtgggcgcggcggcggttgcgggcgcggcgccggctggaggagggagacgggcctgacaggtgggccccacctgtcggcgaccccgagagaggagggaggcgggacggcctggatgggcctcggcctgcggccggcccaacagggaggagggggaggaaaggagagaatgggccagcggcccattcgaaaaaaaaggaggaaaaagggaggaaaaaagaaaaagaaaaaggaaaaaggattttcccctggaattaaaatattgcttgctcaattttaaatggttaaaattatttctagagttctgaaaattccactaaaaatcctgttagtgaatttcgacatgtagaactcaagaaaaattccacatgccaaatccgattattatttgcattactttcttagggttttctcttgatttgcacctgcatttttgtcacgcccggaatttctatccaaaattccaaacgcttacatgtgtgtgaaccctcgtccaggaatcagccgaggcacacaataacaaattgataatagagtacaaatattactctaattaataagcgaataaaatgtcattacagaggtagatagttcctctcaatcaataaagttctagcagcggaaattaaataaacggcgcagacggctccactccacaggcagcttgaccaaggctacacctaatcctccacaccatcagcctcattgaagaactcttcctctgatgaatgattgcaaggtgagtatatgacatactcagcaagccacgcagcaaatatgcaagtgcacaggataacaaaggatagcataatagggtttcatttgcaaaagcagcatttagcaaacatttgagtatttgataaaacagttaagtaataattaagcaatattaatccaacgctatacaacataccctgttgtataggcccaaccattctgaacaaccaccccggctgcacagttctatctccaaaccaggaatgtaccattccaaaccaggagctaatcaaattattaccagtttaagcatcttttacaatgatgagaggtgtgagactaatcacgaaagacattgttagacccgcccataaccgcgggcacggctattcgaatagttttactctggccagaggtgtaccactgtacccacaagacacaaccccacatcatgtcaccatgtgcctcaataccaccacggtatctcggaaaggagttgtgacaatacccctcgcataacacaattcactgcagcgcaccttcctggatcataatcacccccttataaaacaaggcatggactccccagcgacccccgtgggcttatctccgccacttctcagtctggtgccccgcaatgaaccatgctatacaaaagataaagccgttgcccatgctggcttgtggtcggcacgataaatgtttcacaaccgaaactcgtgaaccggtccttaattgccatgagcacgaccatcaaaaccatgtgctcacaacccaccattaccaggttttagttggcacattaattaattaactaatcacgattgaccatcgagaactatcaataagccatcatgaaataatagtgagtcattagttatcccataagtgtactaatgtttctaagcagggctaagcaattgtatctaatatctagttgaaccaatataaataaagctcaactagtcaaattataataacccaaggtatcaaggaataaggtaatcaatgtacaaaagggccataacaaagaataggtcaattccacccaatgacattcgaaaatagatgcaatagttgaatagaaacaatagctttaaataggatcaacatgctcaaagggttgtttgggatctgtgtgacttgccttgctggccttggaactcttcaaactcttcttctgcgaaaacggactctccggaaacgacggaatctaagcaaaaagaagcaaaatcaccaaaacagcacataaacaagcatgaacagtacatgtggatatttttaatgtgtagatctcaattttagaaaaatttagagacttgaaccaactaaatcggagctaagatgaattagatatgaatttttaaagattaaaccggattaaaacacttaaatcggtttaaaattgaattatgacgcaataatgaattatttttgaaaaggaaaaggggatttattgcgtcagcgggctagggtttgggtggaccggcgcacgggcggcggttcacacgaacggacggccgagatttaaccgatccaagatggacggccgagatcgatcgggtccacggcggctcacgggagaggactcggatgacgtcagcggtgacgtcaccgacggcggcggcggctcggcagctgggacggctcgggcggcgcacgctcaccggcgaacggcggcgcttcggcacaaacggaggacaccaacgggtagcggacggcacggcgaactcaccgacgaccaaggcgacggcggacgaccaacggacggcgacggcgacgaggaggaagcggcgggaaccttcgggtcgacgacggcgaagctgctccggtgatctccggcgacggcgaaggggcggacgaggacggcgacgacttggcgagcacgacggcggccttcccgagcgacggcgacggctggaacgacggcggcgcacggctggagcggcggcggcgaaggcaaagctagggcacacggcgctagggctactccggcgacgagaggcgaaggcgagggtggcggcggaaagagaagagcacggggatccttttaaaggggctcggaggcgacggcggaggcccacggcgacggcaacggcgaaggaaactcgcggctcggagagagggaacccgatccgaatcgaacttgattccaacgctttccaaagcgatttagccgatgattccaaagagaaaaagatagaggagatcccggagattgtttcccctcaaccaattcggccggagaaggaaagaggcggccggatttggaaggaaacagcggcggcggctcggcggcggcgcgctagggtttcggcccgaggaagacgacgggcctgacaggtgggacccacctgtcagcggctgcgagggcgcgcgcgcgggcggctgcggactgggccggctgggccgaggagagagagaaggcggttttgggccgactttcggcccaaagccaaaagaagactttttaaaactttttcaatttaaattatttcttaaatgcaattccatttattaaaaatactttcttagctcaaataaatcccagaaaaatctaggaattatagaattaagcaaagtatttaatgaaattttatctggccactttttatattggaatttattaattaaacatagattttcttttcaatacttttaaaattatttctaaaaattccatttaaacaacaatttatatattttgaattttcagggtgtgacaaacctaccccccttaaacagaatctcgtcctcgagattcagaagaactggcgaacaggtgcggatgagctgacttcaattcatcttctcgttcccaagttgattcttcttccgagtgattactccactggactttgcaaaaacggataactcgattcctggtccttctctcacttgtttccaagatacggatcggtttctccacataggtcaaatcctcttggacttctatctgttcaagattagcttcttcggtaggtacccttaaacacttcttcaattgcgacacatggaacacattatggactcctgccaaagattgaggtaactctaactgataagcaacctctcctcttctactgacaatcttataaggtccccaaaacgcggtgccaattttcccttggtatgacaacgatgaactcctcgaaaaggcgtgacacgaagatacacataatctccctcttcaaaactcaaatctctgcggcgattggggcataactcttatgtcgagagtgagccacacgcaatctttcttgaatgatctttaccttttcttctgcttcccttaggatatccgttccgaaaacctgacgttctcccgtctgatcccacaaaagcggagtgcggcacttccgaccatacagtgcttcgtaaggagccatctgtagactagcttgataactgttgttatacgaaaattctgcatagggtagattcttatcccaacttccaccgaagtctaaagcacaagctctcaacatgtcttccaaaatctgattcaccctttcggtttgtccgtctgtctgcggatgataagcagtactaaagttcagcttagaacccatctcttcctgaagcttcttccaaaaatttgaagtaaactgactgcctcgatcagacactattttcttagggatgccatgcaaacacacaatccttgccatatacaattccgccaaccgacttccggaataggttgtttttactgggatgaaatgagccactttggtaagtctgtcgactatcacccaaatagagtcatggcctgatgacgttctgggtaaaccagtgataaaatccataccgatttcttcccatttccattcaggaatcttcaaaggctgcaacaaaccggcggttttctgatgttctgccttgacttgctgacaaacatcacatactgccacgtattctgcgatttcacgcttcatacttgcccatcaaaacctttccttgagatcctggtacattttggtactaccagggtgaatggagtataatgtatcatgagcttctttcaaaattgcatcttttaaatctttgttgtcgggaacgcagattctctcgcccaaccatacagttccttgctcatcttccaagaaaccgatagcttttcctcttctcatattcttcttgatt

SEQ ID NO: 5784 - DNA, 40633 bp, Oryza sativa
tcatcctaaccattacaagcaaaatattgtatgaagaagggcgaacatgcagattgctaagctggcacgtggtggacaagaatgaccgatttgtgaccggtctgagactggtcatgtcgtcagcagacagccatgttcccacgtcgcgcctgcttccggcggaagtggaggtaggtatgggccgtcccatcagaaggtcattcggacggcagccatacatagctccgtccatttatgaagagaaagcaagtcaagtttgagaaaagggaggataagtccccacacaaaagagagagatggtgcatgtggtatccccttggtataaaaggaggaccttgcccacttagaagggggattgatgggagattcagcaggagagaggttgggattcgggaccagagagggagagagttagagttctctggttctccagctctttgtagcttcttcatacacagattcaccaaaacacaggagtagggtattacgcttctcagcggcccgaacctgtatacatcgcccgtgtcttgtgtgtttccactctcgcgaaccttccacagaccaagagcttagaatctcacccagggcccccggccgaaccggcaaaggggggcctgcgcggtctcccggtgaggagcctcacgctccgtcatcatgtgtcttcttggcaccaaaatgtcccatcaaaccgcctccatgcgcttcctgcaacaacaacaagcgaacggagctagctggaatgcatagcttgttagctctgaaaacaaacccatcattgatgacgaatttgttccatgttcttccatccttacaatgcagcaacacatcattaaaatcagcatcatgcgcatattggtctttgattgtttccaggccaaaaatcttgtagtcaagttgtgtcaacaaagtgtatctcctagacaaagcatcagcaatgatgttctccttccctttcttgtgtttgataacataaggaaaagattcaataaattcaacccatttagcatgtctacggttcagcttcccttgactacgaatatgcttcaaagactcatgatcagaatgtatgacaaattccttgggccacaaataatgctgccatgtttctaaagttcgcacaagagcatacaattccttatcataagtagaataattcagaacaggcccactcaacttttcactaaaatatgcaacaggttttccttcttgtagcaaaacaccacccaatccaatcccactagcatcacattcaagttcaaaagtcttattaaaatcgggaagttggaggagaggtgcatgggtcaacttatctttcaacatgtggaaggcgttctcttgtgatgtgccccaagtgaaaggcactcccttctttgtaagcgcattcaatggtgcagcaatggtgctgaaatcctgcacaaagcggcgatagaaccccgcgagtcctagaaagctccgcacttgtgagaccgttttaggagtcggccaactctgaattgcctcaaccttggcttgatcaacctcaatcccctgcggagttacaacatagccaagaaaagaaactcgatctgtgcaaaaggtgcacttctcaaggttaccaaataaacgtgcatcacgaagagcattaaaaacagcacgtaaatgattaaaatgttcacccatagacttgctgtaaatcaagatatcatcaaagtagaccaccacaaattttccaatgaaaggacgcaaaacctcattcatcaacctcatgaatgtgctgggtgcattagttaaaccaaaaggcatcactaaccactcatacaacccaaacttcgttttaaatgctgtttttcattcatcacccaacttcatacgaatctggtggtaaccactacgcaaatcaactttggagaacacaatagagccactcaattcatcaagcatatcatctaacctaggaataggatgacgatatcgaatggtaatgctattaatagctctacaatcaacacacatacgccatgaaccatctttctttggtaccaaaattaccggaaccgcacatggactaagagactcgcgaacataccctttatcaagcaactcatgaacttgacgctgaatctccttggtttcctcagggttggttcggtatggcgcacggttcggtagggaagcacctgggatcaagtcgatttgatgctcaatgccgcgcaccggtggcagccccggtggcacttccttgggaaacacatcagagtactcctgcaaaatgttagcaacagtagggggcaaagaatggtgcatatcgtgaagtgaaatcaaagcatctttgcataccaaagcataggcaactgaaggtgatgcaatcaactcattaatatcagatttagtagcaagtaagcatttgggtttcaaattgattgtctcaggtttcttgccatcagattgggcttttttatcactctcacatttggatttggcagccttagcaacatcatcacgcaaaatatcttcaggagacatgggatgcaacacaattttcttatcatggtacagaaaagagtactggttggacctaccatgatgcatagaatccctatcaaattgccatggtctacctagcagaatattacatgcttgcatgggcacaacatcacattcgacaacatcatggtaatttccaattgcaaaattatgtgcaccagttttgttaccttcgccttaccactgttgttcagccattggatgtagtatggatgtgggtgcggtttggtgctaagtgcaagcttctccaccatctcgctgctagccaagttgttgcagctacctccatcaatgatcatgcggcaacaacgctctttgacgacacactttgtttggaacaacgtgtgtcgctgattttgctccgccttctccatttgtgcgctaaggacacgctgcacaatgaggctctcatagtgatccgcaaatgcagccccaatgtgctcttcaggtggctcattatctgcatggtcagccgcaagcaaagcaagtgtatcatcatcaaaatcactagcagaggagtactcaccatcgtttttgactaccaaaactcgcttgctagggcagtcacgctgcacatgcccaaagcccttgcaacggtggcactgaacatctctcattcggcctgtggatgccattgaagaagcactcggtgctggctgagcagcctttgtcgctgacttgtcactagatggaggaggtgctgctcgactagttgtgggtgtggaagatggagaagcagtacggccggccggaggagtggtgcgtgtctgccatgatgaagttttacttgcagaaaaattagccttggcactagcacgtcgtccctgcacttccctttcagccttacaagcaagatgaaacaatcgggtcatattagtgtaatctttatagtctatgatgtcataaatctcgcggtttaacctacccaaaaatctagccatggcagcgtcctcagtttcctctaaattacaacgaagcaagcccatttgtaactcctgataatattcctctacacttttcgcaccctgtctcaattgttgcaacctattcagcaagtcacgtgcatagtaagaaggaacaaatctagcccgcatgacccgtttcaaagcatcccaagtttgtggcatgttattaggatttttcttgccatgttctatccaccaaaccgaagcaaaatcggtgaactcactcgtagcagctctaactctagtgctctcaggaaactcatggcatgcaaatttttggtcaacagcaatctcccaagagaggtacgcatcaggatcatattttccatcaaaaggaggaatcttaaatttaattttagaaaaagcatcatcattgttgcgtacctcgcgtcggcggcgaccacccatacctcgtcgattgttgtgtagccgtcgacgatctcgagcatctcgatcatcttgttcagtgtcagcaatatattcatcctccaaattatcctcgacgtactctccgtcaatgtcatcgtcattacccccaccattgcctccagcattgagagcatcaaaatgccgcacaagagcagcaaggctagtgtcaatgcgggcgaccgctgtctccagccctgtaagcttagtgatggtggagatctgcgtggactccaattgtccaatcttctcatttgtcacctacaaatctgtatcaagtccttccgtgtgctgcttcacttgccttgtaaagtattggatgatgcctttggtgcgtggggaatgagatgcaccctcctcatctttatcctttggacctgccatggtttagaaatgaaggacaacaaaacaatggaggatgtaatgtaagccctacacaactattgggatgtagcttttgcaagacgctcactctcacttcactcgcagcttgtctcacaagctcttaccagttcttaccttgcccacaggagggggacagcaacaccacaagttagcaaccgtggaacgaggtgtatcggtgctgtagcaacaagacctgtcaagctgtagtcgggtttgtggtggagctgttggtgggctgaaagcaatgctcaagagaaaactagaaaccacgttagccaaagcaaattgaataatcgctcaagggtatagtgtacagtgctggtcctaggctagtcgaagtagagacgcgagcctaaccacaaaggacgccacaaaacacaaacccaaacagcaacgaaaacaagaaccggtggtggaaggtggtgacaaagggggaatggtgtggtgtgctcgctggatcctcttttttttttttgcttgctctctctagtgctgaggagagaggcacaactttttttttattttttttattatttttttgatatttttttcacaactaggagcacactagaaccaaccacagaaaatcttatctcaaacggacaaagtatgaagcttgtagaattttttcaaagttctatgcgaataggtcccgaagcttctcgccacaaaaacagaattttgcaagaggaatttggcgattttaaatttgctgaacccggatgtaactttttttgtagatgtccgtggatatattataagcctaatttcgagtccgtatgaaaaagatatgactgttttaaggaaggtcactcgaatcagggttctatttcctttctagtggcggcaggatacaaggcaactcacaaaagctatcggcaacagatcaaacacaaatagaaagtgatttggtgggtgactgcgacagtggtgacggtggtgatgacggcaaaattgatgaaggtggcgatgtgcggtggtggcaagaactcgaaactctaatcgcctaacactaagaccagcaaattaacacaaccgatgcaatcgaaaactcaacaagccttaactaagcagtactagtaaaaaggcacaatggtctataggatcacggaaaaactaatctactatttttttttgttggtcttttctggactataggaaaaaaaattaatgacgaagggaagggtaaattctctcaccgatgaaccacgctctgataccacctgatgcaaacccgctagggtttgtggcccgatctttcgatgagaggtaagggataactcgattagatgaagtcgacgttcacggcccgactacaactgtccaaagacgctgcgccttagcaaccgatacactgtctccaatggtcgccacgaacttgtggtgcgcgtcaacccggccacgagggcactcgtcctgcaagcaatcgaagaacaagcaagaacaagtaggacaagcactgaaattgctagataaagatgaaagtttcactatcaaacacaatatggtggggttccgattacaggcagacgggcggtttagccaacacgcgcgctgcgagccggtagcaagaagctacctctatcatcaaaacccgcctgttcttagcggcgactagaggtataaaaagaggggaagaacgaccatagggtcgtgctccaaccctaggacgcgcccctaatgggcccaacatggatacacagcccattgggccaaaagaggtgacgcagcaccatggacagaaaatagtcgggagtaaaatgataattgcggccgctccagaacagatatggacatgtagctggatccattcgaaagtagacttgataagctttccatgaagtacttgcacgcccaaatcggagttcgcatgaagtcgtggcggccgtcagaagttagcgctgccctgcagtccgaatccaccccgcgcgaatcctcttccctttggatcctctccatcgttcctgagtaaaacacgagtgcacgcgtctccgaggtataaagacgaggaatatgaactcaagaaagaactcacctgataatttagttgacgtgcacgagcgcgggtaataggaccatcatgctgtatatggggggacgtggatgtatcgatggtgttgatgtcctcatcaggacttttagaaagtaaaaaatgaacccgaacaataattgtgttcgatttttaaaatcccaataacaataaagagaaaaaacagtggacggtccatagaggagtataatggcagcgtttgacgagacttctagaaattataaaaacgaaacccaacgagataataaactgtaaaaactataagatccaatttttgaagataccaaggagaatgactaatagtggtagatcgagcaagcaaataaagaaggatatgaaaaagtaagtggtagtaaccagtatgacttttaaaaactatttaattagaaatacagagatgataaggtttgttctttcaaagtcttgagacaacaagatagctatttaataaattttaagtaaaatcatactgaaaattatatgattttgtttggacgctagccgcgcaattgcgcgggccacccagctaatttataaaatatagcaaaaaaaattacgggtgtggagaaaaaaagaaagattttccggaaaaaaaaagaaacagccgcatgtgcgcgctcgctagaaaaaaaacgaaaaaaaaaaagaaaagagaacgaagcgatgggggtaagtgggccgcgtgcgagcatggccagaaacacgcgcgagtaaagttgacagcacggacgcgctaattagcaatttggaagatccatggcctcgctgcccctccatcaacagctgaaggagagccttaaacccaaaaagcccaccaacctctgcgtccccgtcgccggcgaccaccaccatgcacgccgccgccgcagccgccaccgcggggatcatctcgccgcctacacctcgtctcctccgcgcgaacaccagggccaccttcgtctccttcccgcggcgatcgcctcccacgacctccctcctctcggcctcgtccgccctggcccccgccccgccgtcggccaaccccaagtaccacaacgcgaaggtggacgagggcgacgaggaggtggacggggaggagctgttgcagaggttcaggcgggaggtggcgcgcgccggcgtcatggaggagatcaggtggcggcggaggcacgaggacgcccgggacaagcgcaagcgcaaggcccgctccgccggccggaggtttcgccggaggtgaggccctcgtcgatccatcggtcgattgcttccatgatcctgcctagattgtgccgatcaaagatgatccttccttttccttttgctcttccccctttcgttaatctgcagccttctactatcttggtgatccatttcatttgcttaccgttttaggtgctaattaatcatgcaatttccgtcagcttcgtgaagccaccttcgatctgttctaatattgggcatgctgcatcggaaaaactacaagcatacgttgtttgtgctccattttaggccgctttgatatttcagcgaccaattcacttattacatgaaagcttcgtaccaatactgcctcttcagcggcgaatttttatctcacattagatcgctataatacattgggcttatgtgaatatcattagcatttcagctctctgatggtactgactgccatgttcttctgaatgtggtcattggactgtactggtcatcttgtaaattcattgtcattagcattttagttctgattggaagcaaattgaaattatgagataatcctcttttcttatcaagagagatgagctcttatgtttttgttccaataccactagtagttcttttctttttgatgattgcattgcttctgtcctagctttcaatacattgatcctattctgagcaccatgaattcatcatggccacgttcattaccatgtcgagataaggagctgccatattcatcatcgattgtacattagttatgctggtgatggattgattcaatgaaaaattgtgaatgatgtaaagttgtggatttgggaacatttgattttttgtggattgaatctgattggagggatcgatcagggccgatgggaagctgtcgctggttgaggagcggcgtcagctgtgaattttttttagcgctaaaaaagtgcagtcggacggtgtaaacttagtcccgtgtgaaaatcaattttagtgcaacaattgaggtatactacctctatatgacgtattacgtcatctagaaaaagaacagaggggagtatataaaagagtaacactagcccttggatcaatgtgcaatggagggtgtaaactatatacttttggtttgccataaaaaaatcctgatgataatcatagccaatttattcggttgtgtgttttctcttcggtctccacacaccacacacatgcatgcactgggacaatcgacaacattttatatggattaagagctcacgtacgtgaaatcagcaacattaaggtgctggtgcatctagcgtgcttgcgcacagtgagtggtcatggtgaccttattggaaatcaaacaactcatcattcgaagatatatatactggatcaaagtaaacagacagacaaataatagaacaaattaaataaaacaataagcatacatatacggtggttgatgtggccatggcatgttgttcggttagctggctagggtgccctagctaggggcgcttgagagagaggattgccttgaagatccccacaatcacgcggcgaggtgaaggtgagaagcggcagcggcgcgaggaagaagactggagggtgaggggtggccactctggccatctccttcttggattcggtgtgggagaagggagttggaggcgcaggaggccggcggaggcggtcggcgagtaagacggtagccagcggaggtggttgtggccagcaaaggtatttgggcggcgaattgaggtgcaggtggccagtggaggcgagcaaggcgatggctggcgaaggtgctatcgaggtggagttggctattgaggtggctggagaagctgttggccggcggggttttagtggtgatggttatggccggtggtattgccacttggagaggtcgtcgttgggttggtcggttggttgctgacgtggttcgttcgtttggaaagctgcaggacacggtgaacaacagtgttgtcggtggcttgatcaccaacaagtgtacctccaagtttatctagggctcctcccgtttcctagagctcctcccctcctgttgaccgttctgctttcagattccggtcgtggggagttccatggcgaggggcggggagctagctttggttggtagatttgcttggagttcgagagcctcaacactaccagcgctttgtttttcttgcgtcggtgaggtgcctggttcggtggagttggtgcatgagacctctgcgacgcaacctgttgatggtgtttggggtggagtcggagctgcatgcttggccgggtgtggcaagctggtcaacgataacccccttgctccttccttttggtagtttcgttggggttactatgcagttggcttcctagtgtctttgggtaggtgtgttgggggaaatcggagctgcttgtcggtgataagctcggcaacgataaccctcccctgctttctatggtagcgctgtggtagccagggttgtcgtatttggcagggagagcgagccggggcgaatgtcctgctcgatcttgggctagagccaatgatggcgacgcctgtgggcgccgttttccttcttgaaggcatcgtttctgtgctctactcatttcttcgggtgaaaaccttgctccgattttcggacggacgttgtttgcgtttcgacgctatcttcctccttggaggcttcgtcttgaagaccctgccctacgcttgtctgtggtctgttcataggaagtcggagctgctcttgggagcttggcaacgatggcctatgttttatcctctagttgtgccgtcgcaagttcttttttttttgttctccgtgtgggttttgcccggctttccccttcaaaccgtgcttatgtgaggtttctgtgcccggtttccctcaaaaattgggccaagtctcttcttcttaaatgaaagcaggctcttcctgtcctcttctgaggtttttcctcaaaaaaaaaaaggacaaattcatatagatagaaataattgttgcaacgtacagctagcaagaaataattgttgcaacgtacagctagcaagctctgatctgctactcttgggatgtttatcactactgctggtgttgcttgatagacatgagtgttttgaagatgccgacgagaacgccgattatggagaacaccgtgacgatggtcttcaagttgttgtagatgaacttgtgtatagggatccatatccacctcttacgcctgtatgcttcaagattgtccaataaatagcagtgctgaaaaggaatgggaattagatcgacaaggttcttgaagaatacgagtgtgtgctggttgctgaaatcaccatgtaggatacgcttcactcgcagctcgtgcacgtcttcctcccggctcatcagcatcgcgaggagggatacgtaagagcagacagtgtcttcaccatccatgccagtagaggccatgccagtagaggccgagaaaatctcgagtgccatcatattgatgagccagcatgcattttggtcgtccatgacgagaggtgccatgaagagcttgccgaacaaggcacctttgctgatgctcatgtcattaaaccatgttttcttgttggctaccaggttgatgcccatttctgcaagctcgatggcgctgctagtctgtgatattgaagtaattccttcagggggttcgagggccatgcttccattaggcatgctcagccctgattggtagtaccgaaggaagccaaggagatgtgatggtgtgtagctttcatccaagacgaatgatcacttttctaaatctgtgtaggcatcaaaactggtgctttcttgagagatgaactctcccacgggaacagacctaaaggtcatgagggcatccagcaccacccatgggagctggttctctagcagaaagatgtccctctccatgctagcatcgttggagttgaaccaactttctaatgatggagcaatgtcgtcagttgagcaaatgatatactggagaaagaagcaaccatcatggaacataatagccgcaaagtcaccttcgcctatgcttgccaccgtgtcatcatccacatagcagcttcgggcttcggctacaaccaagaggattctctggtagacctcctcaaccgagtggcctgactccccgcagaagtagtaggcggccgcacgcttgacctcctctgcctccttgaggtggggtgcgccatggtggtaaggaccgatggctacagctcttgggacgaagtagcggtcatctgtgctaattaagcttcgaaaaattgaagggtacctgtggatcttggttttgatcttggagaagttattctccatcttttcggctgctcttttcagctcctcttcgaccggaatcgctacggcttctgcagcggccgtggccatcgccgttggctgctcggcagtttccagtggttggacctaatcgctgctaggagtagctgagagttcttccatttgtggatttgctgtcatgctatgtattcctgctacagcctatactcaactcaaaacatgcgagcaattggtggtgaaacaatgaagtttaaggagatgaaagatcccatctcaaccaacaaatatagaataggttggtagatgatgcatgtggctaaatatagaagtacatttgccaatcaatttgcttttgattatattagagagtacattagctagaagtagtgttccaaatctggtgtcacaagaacatgtaatgatacaagttgttaggaatctaattcgccaaattcaaacaatgaagttcacagtacaagttggtggtggaattgagatgaaggagctaaaaaatgggcaattttaccatcattgagaagatgtctagaggtactatattttctagtgtaaaatttagtacctctaggtactaagtacatcaaggtactaaaattagtaaaatttagtacctctaggtactaagtacatcaaggtactaaaaattttagtgtaaaattttggtacctcaaggtacttttttaaggattgttaaattcctcaattaacaatcagatatatgatgtttgttacggtccagcatatggtatctccaggtactggtaccttcaggtaccaaatgaaatctagccgttcaattaccatgggcatgattggaaacaacggagcggcgatttactcgccctcacgcgccgacgctgctatctcctagcccccctcactcgccaactcctcatgcgtcagcagcgtcgcagtctttgaaactctgaccgtcgccgccgccgcccccatccccgccgccaccggcgccaagcgtagaaaccgccgccaccacctaccgcaaaagcccaagagttcatctacctggcgctgcctccagttctgcctcatgttcaagatagcgatgaaatataaccaaaatcttcaaaaggcagccaccagttctccattgaggaaataatggttggggtttcgaacgcataatctgcaagcctaaccctagcttgtagccaatagaccatcccgtaatgaagtgacctaattacaaagccaatttatttatctgaacgaatattgttgaaagggaatttgttgttttatcaaaggctcaaattatggatatgtacaatagaaacacattgcaagtagtttaatgacctccgatcttgaggacagtgacaacgttggacttggaactgttgctggtgaacccatggacatgagcagtcgccgagggttttcctgtcgccggtgaagaaggggatgtgccgttgcaggactgcatctccagccatatgctcgttactcgtcgtggccgaggtcatcgctgtccggggcaaagaagccaaggccctcccacctaagtctccaaacgagtggcaccaccctctggccagaggaagagagacttcgggacgacgcaaccacgctgggaaagaggaacttggcccggtggagatggcgcggagcacctgcagggaaggcagtggtcggcgaggatttcatcgacagcctgcaggtaaagctccttccgtcgcagggggtaggttggaggtcggagacgtgtgctcgccgtcggcggcggcgcttcgagtgaggtgtgacggcgctgggggaaggaagaggaaaagccgaagctttttgacgcgataagaccattgtaccctttcagggcgctttggatgctcggtacctcacggacggagtggtggtaccaccatgtacctattgttttggaccgtcggattacacatactgaacggtcacgagttggtaccgaggccctctgctggacggtaaaaaaactccagatgagcctgacgatgatcttgagattgtggtagaagaacttgtgcacggcgatgaacacccttttatcgtgcttgtaggcttctatcttttgtatcgccgcgaagtagcgggagccgaggcggaggtgccttgcgaggcccttgaagaaggcgagcatttcctgatcactaaaaaagctgtcgacgatgtgcctggctcgcagctcgtgcacgtcctcttccttgtccatcagcatcgccaggagcgagaggtaggagctgacgacgaagccatcgcgaggatactccttactgcaacaagcctcgagcgccaccatgttgaccagccagcaagcgatggaatcatttaggaacaagggcgtcagggaaagctcaccgaagagggggagcacttttctgctgctgaggttcatgtcggcgatcgaaccatgcgttcctgcttggggtcagctgcgctaatggacagtcttgtgtcgtggtcgtcgtcgtcatcgtcactaaacccaagctctagatgatcagttggcatgccatcgattaggtgtgatctggcgaggcctagcaaatgcgggacggagctcttcacgataacatctctgtcagtaataagaagacgacgctctctggcaacatagatcggatcagatatcacggctgtaagaaacatgtgtacatctataggactgatgatactcatgagggcatccagcactagccatggaatctggttctccaacagcacaatgtctctctggatgcatggccccgtcgacaaaaccatccggttttccaacagagaacaatcattatcgaggaccatatacttcagaaggaagcagccatccaggaacatcatctccgcgaactcgtcgtcgctgaactgagcgacggcgtcgtcgtcgttgtcgtagcagccgtgggcctcgccggcgacggcgaggaccttgccgtagacttcctcaaccgagcggccccacttcatgcacaagtagtgtgccgttgcgtacttcagctcctccgtcttttgcaggtgaggctcgccatggtggtacggacccagggcaacgaaggttgggacgatgtagcggtcgccttcacccccgatccatcttcttaggccttgtggaaacctatggatctttctctcattcttgcagaaatcagcctcaagcctctcaaatgtcaccctctcttggataggcggtattattgtcccctctaccgtgggatctatctatctattatatctattatattattaattaaaggaatagaaaaagaagcctgcatgttcgctcttatggcctagaaattctcacattaatcggagaaaaagaaaaaacagagtccatataaaaatatagttaggaaataactgaaattcggaattaaaaataagaaatattagaaatagagtatagagtctatatagaaatacaattaggaaataatataaatttggaattaaaaataaggaatattagaagtagagtatagagtccatatagaaatacaattaagaaaaaaaaatagaaattcggaattaaaaaataaggaatattagaagtagtgtatagagtccatataggaatttaaaactaactaaaatttggaataaacataataaaattaaaagtagaatttagagtccgtataaaagtacaatttacaaataactaaaatttgaaattaagaaaaacatgggaagaagagtttaaggtcaatataggaatacaaatataggaatacaatttagaagtaactgaaattcgaaattaaaaattaaagaatattgaaagatgagtttagagtccacatagaaatacaattagaaataataaaaattcagaaataaaaataaataatattggaagaagagcatagattctatatagaaatacaatttacagaaaattcggagttaaaaatatgaaatattaaaagacaaggctagagtccatataggaatatatataatttacaaataactaaaatttgatattaaaaataattaataactaacacatatataaatataatataaaaattcagaaataaaaataaataatattggaagaagagcataaagtctatatagaaatacaatttacaaaaaaatcggaattaaatttttttaaaagacgagtctaaagtccatataggaatatatataatttacaaataactaaaatttgatattaaaaataattaataactaacatgtatataaaatataatatgaatattacacattagtagttttgtaaagttattgcaaaatttaaaattatgttgtcattttaatatatttgaataatataatgagaaaacatatatgctattacatgagagaaaatataatgatgctagccgcgcaatctgcgagggccactatgctagttattattaaaggaatagaaaatagagccttcacggccgctctcatggcctagaaattctcatattaatcggagaaaaataaaaagcagagtccatatacaaatacaatttagaaatagctgaaattcggaattaaaaaataaggaatattagaataggagactagagtacatatagaaatacaatttagaaataattgaaattcggaattaaaaaataaagaatattagaagaggagactagagtccatatagaaatacaattaggaaataactgaaattcgtaattaaaaataaggaatattagaagtagagtatatagtccatataggaatacaatttagaagtaactgaaattcgaaattaaaaaattaaagaatattgaaagatgagtttaaagtccacatagaaatacaattagaaataataaaaattcagaaataaaaataaataatattggaagaagagcatagagtctatatagaactacaatttacagaaaattcggaattaaaaaaataaatattaaaagacgagtctagagtccagataggaatatatataatttacgaataactaaaatttgatattaaaaataattaataactagcacatatataaaatataatatgaatattacacattagtagttttataaagttagtgcaaaatttaaaattatgttgtcattttaatatatttgaataatataatgagaaaacatatatgctattatatgagagaaaatataatgatgctagccgtgcaatatgcgcggaccaccatgcttgttattaatataactcctagtaatgttcatggtggcgccaatacacgtaaatgcgcgcgcgatgcaggattgttgcaagggaatggctaggttttaatttgtttggctaattgattcactcgctgcacacgcccatatatatactgaccattgcccccaactcggaaatgtacagatgtgtggtctcatttgcttgagtactaggacaaatatatatatatatatatatatatatatatatagtcgatggtggtcttaaagaactgtctatgaaaaattgcgagattgctacctggcgatcgatcgtcaggggcgatcagatttcctccacctggtttgcttttttgataccgcatgtattacttttctattttagtaaatttatgcacctaaagtttgtacacctcaagtttacatatctaaagtttagagacccaaagtttataaatcaaaagcttatatatccgattcaaatttgaatttgaattcaaatattttatatatatagtatttctatacatctaaagtttatacacctaaattttatagacccaaattttataagtcaaaagtttatatactcgattcaaatttgaatttgaattcaaatattatatatatatatatatatatagtatgtttgtacataaattttcccaactctgtttttttttttttaaatttacggtgtagaaggaagagaaggggaggaggaagggggagaggagtgtataggggtggatggggataagcgatcgatcgcccattagccaggcctgaaaaattgtgacatcctggcacaattaggatgaggcatgtatagcccatgagagctgtgtgcgcatgtttagcatcaccttgcaagtttagcacgagtggaaccaatttataaggcatcttcccttcaaccatattacttccgggttaacccttttatacgaagcgagaacgaaaagtggattggtatgtgtaagttggctcgctcgtcggttgagctgggctgcacagttctggagggaggcctatcacaacaatgcattttggcaaatggtttcttcacggtgattacaattttgtttcgaaaataaccccccacccccctctccccggccctaggcaagcaaatatctcagccaaaagttttcggtttttttccaacttttttgaatttggtcaaagtttattcaaatttagtcaaaataaaatttgctaaaatttcaaataattccgtgcaaaaaaaagtatgacaattcctgaaatcttcggaaattttgttctcccacctgtctataatataaatagcttattttctcagaccgtactactggcgtctcggtaaacctccatttaaaatgggggttatttaccagcctcaatttgtcatcgacccgtatcgtattatagtggtcctcatgtgtttttcttgaaaaagaagtgattgttaattgcttcgagcacaattccggatctttatccagcattaattccttccctaaaagtctttccatatgttttgttctaccttagcttcatcttgtagccatcaccgtgcccctctttgatagtagtcttctttaacaattcccggcctaaacttcaacatatgaatgctgttatttttttaatatttttgataactatttcgatgattttttaaataaataagggacaccatccgaacagtttccccaacatgcactacatattcagcattttcttactcgagtgtttgtttcagggctttccccctccttaaatttttgtgatcgatcgatccatactttagtggtcctcgtgtgtattctcgaaaagagaaaaggaggaggttattttttttccttttgcgaaggataaaagaggggattgctatttgcttggagctcaatccagatcttcaagcagactgcagcattataccttcccgaaagtctcttcatatgttttgctccatcacttctattacctccgttatatgttatatattataagttgtttggatttttttttcttgtcaaactctataattttatagaaaaaatacataaatacttttcgtccaaacatattataaaatatatttaatattacatttaatgaaatttagtgttgtagaaattgctaaatttttctataaatttagtcgaatctattgaagtttgactagaaaaaaaatccaaacaacttataatatcaaacggagggagtatttgctaccagtagtcttctttttacaattccggcgtgaaatccacaaaagttagcatcaacgaaacaaaagcgtcttcagcaaatttaaacaggctgtatagtgttctttctttcaaaaaaggaaaaaaagaaaataaaagaaaaggttctgcaagagtaaagcaacaaagttaaaggaaaacgtacaccgaagatctctcaacttgtcatcaagttacaaaatcgttcttgaaccgcaaaaccaaatacagcggataacccaacttacgaaaccaggacaaactaagtcccttggcggttttgactctggttttgcctaatgtggcagctcagcatggtacccacgtgaccccacacgtcagcctcttctttccctcccctctccatgtttcttcctcgctcctcttcgctctcctcccctcttctctgtatctatccgcgtcacaaagccggcgggatggagcggggcggcggcggcgggcggagtggggcgacggcgaggcgtagcagtggcgcacgaagccggcgaggcggtggtgggctggggaaggcaggtggaatggggtgacggcaggtagggcggagcggagtagcggtgagcggagcagccaagcggagtgggacgacggcgcgcgaagccgacggtgggcggaccaggtaggtgaagaggggcgacggtgggcagagcggcagcgctcgaagccgacgacgtggagcgaggcggtggtgggcggagtagataggcctgcaaggcggtggcacgcgaagctggcggcgcggagcggggcagtggtggacaacgacgatgatggcgacgggttcgaggagaaggaggaggacgcgcgccacatcttgctcttccgcgtctcctccatctttgcgccgcccttcgaccttgatggcgtccttgccatgggcggcggctctccacgctatcccctcgccatgggcagaagaagtgcgacccacccccgcgcgcagctactcccccaccacttgcgtgccgctccttcaccggcagaggctcgcgcacagctcctctctcgccgcctacccggtgttgtacctcatgacgtcggacacccatctacccatcaatgacatgctgcgcacaagccacctcttaggcatcgacaccttggggctcttggcgacgacgctgccccggcgcgcctcctcggcgcgggcgtcgcgccactgcctggccatgtactccttgacggcgctgacgccgccagccaccacctccttgggcggcacgcgagcgggttctggtagatacacagaagagaggggatgagagaggagagaggaagaaaggtggagaggggagggaaaaaagaggctgacatgtgggacccgcgtaggtctacgctgagtttacactggttctgtaagttggaggatgcgttgtatctagttttgcgattaaggacgattttgtaactcgatgataagttgagagaccttcgatgtactttttcccaaattgaaacgcgctgcacaaatagacccatgttttatttaggcccaatttataaggcccatcaagcaacgtaacttccagtccaaatccctattatccacggcctctccatctccacctgaaaggctcaaacccaaaaagcccaccaacctctgcgtccccgtcgccggcgaccaccaccatgtgcgccgccgccgccgcagccgccaccgcggggatcatctcaccgcctacacctagtctcctctgggcgaacaccagggccaccttcgtctccttcccgcggcgatcgcctcccacgacctccctcctctcggcctcctccgccccggcccccgccccgccgtcggccaaccccaagtaccacaacgcgaaggtgaacgcgggcgacgaggaggtggacggggaggagctgcttcagcggttcaggcgggaggtggcccgtgcgggagtcatggaggagatcaggtggcggcggaggcacgaggacgcccgggacaagcgcaagcgcaaggcccgctccgccgcccggaggtttcgccggaggtgaggccctcgtcgttccatcggtcgattgcttccgtgatcccgccttacgcccgatcaaagttgatcctattattttctctccccatttcgtcggctgcagattagctgctgccttctactgttgttgaatgttggtgattcatttcatgtgctcactattttaggccctaattaatcgtgcgatttctgccagcgtcatgaaatctccttgatctgttctaatattgggcacctgcatcggaaaactataatcaattaatcatagcctgtttgagctccattttaggcccatttgatatttcagtgactgatttcacttgttacaagaatgcaatgctgcctctttagcggtgaatttttgtcttatattgctataatacatcgagcatatgtgaatattattagcatttcagcactctgatgctactgattgtcatgctcctctgaatgtggtcattggactgtacgaccatcttgcaaattcattgtcattagcatttcagtcctgaatgaaagcaattgagcttatgagatgatccccttttcttagcaagaaagatggtcctgtgtttttgttaggatatccaccagtagtttctttttatgcgatgatcgcattgcttctatcctagccttggacatattgatccaattctcagccatgaattcatcatggcaaacgtgtattcccatgtagagataactaggagctgacaaattgaccatcgattgtacattacagtagcatacttttgacatttagaatgtgtagcatgaggagtcatccatgattatgctttgtactttcctcttgagttcattttgtttgtcacaatgtcacatgccttttctataattggtcctatcatttctactgcaggcatttcaagggtccgtacccatttggtgacgagcaggaaccaaaggaggggatcatggaggatgataagcatgacaattgggagcttcctggaggagagctcccttcttacagatgaaccgataaatgacattgatgttcttttggagctcgcttcttacagatgaacttaaaaatggcactgatgttttctgtctgacgaaggatttcgattcttcaacttcagttcctctttcttcttcagcagtagagtgaacttacccaacacaaccctagttgatctgtgaccaatatttagtgaacttgcatttctaggtgtaaggtatagttgttatgtggcaaaatacctagtctgaaccgattcctctgttgtgtgttaattgccaatttgcttcatgtgcctttgcctttttctctgcttaacttctgatcctgctagtgctgctggtgacttacaaattgcagtgaagtgatgttggtttatactattacatgaagtacagctcttattattttcttggattataacacatagctaatgggccaaattcagtgaccccaaagttggtaggatttggggctcgaaaagtctacattgcgaaattgtgtggacaagtactgcaaataattgagatttgatcatcatcttgttgtactaattgtgaagtgcacgcttgtgatggacagaacgacatggagaaaacgataaagaagaggaaaggagaacgaacaggaagtctcgtggcctatccccatatgcataccatattgccacgcatattccggcattattaggcaaatgattgggacttcgattattcttgttatttctcctgttcttttttcgttgtctttttgggttgagctggcaaatatacagttgctcaatagtttacttgcagaaagctcgaatgctccagcacatcaacagaaagctcagattgcttctggaattaatgtcagcaacgctgcatccgaatgcctaactgtggacccaccactctacctgtatttcttcttcctctctcttttttttccttccttttttgatgtcaattctcatcatcttttttttttgtttgttgcttttgttctgtgattctctgttggtaagaaagaaaggattcttttatcaggtcagtgagaatggatatgtttactgtttcttcagaattactgcgagattaagattaccagatcattaggtaatcctaggaaggtgcctgcagaatggtggaacgatttaaatgtgccccttgcatgagtgcgacccatgacgttcttgatcagttggccttggatgttgagttcataaccgacagcagctgaagaaactcaatatatataatataaataagaagccgttgtatcctttgattgcccaaccatttccagtcaacgttttcagacagctgacaatttttttaaatgatccgaacaagatagtacgaccttttatattgatatagcataaaaaattataaaatcatagcgccagctgataaacgagaaacttttagatgatcaatgcatttgccaagaacttgcattgcatagacggtaacctaatggatcaaatttttcagggagacaagaaccaattgtacaggaacgggcctgtacaatagtacagtacgcggtatggatccagctgccctgcatctaaatctgaagccccatcatcatccaatatgcagtgaggcacaatgcaacagaatttccagagctactacacactggaatgaaatgagccaaccaattcagggtgcaaagtggaggattttgctctgcatgccagagagacaagcaaaggtgtgccagcttattacctgccagaaattcaggcactgttgtccactgcatgaagatttcaaggtccgacttagcaacagcattatcatagcagctcacatgtctccatacattcattgtcatgatagtatacatatgggcattatactattactattatactattatacatttatactgatggggtaccaaactgccaaatcactggccaaatgtgtgtactttattctttcagtctttctcagttctactatgagttatcttcagatagcaacatcaccagaaggcaccaaaccaatccacacttgccagctttaagtattgttgtccatagctttttttcttgattagtacagcaaaactaacattaatttgtgggttagaggataggaaattaaaaaggccatgtctgtttgcttcatttgctctgactaaactatgtgcaagcctatcctgataaatttatggatactagtaaaataaagatctgggaccttcgaggaagacaaggacatcctgtcaaggaactttagataattaacaagaagggagtacaataagttaaagagggaaagagacctaggatttatccagtgagtgcttgtatgtgccagattaagttaacctaaccatgaaagttcagtaatgaaagatggttgagagagtgacctggatgttgatgcagtctcttcagatacgtttccaccagctttagtgaaaatagcctgtatgacataagaagaatacattcccaaagctactacatataaagatgctagagataaagtagtcatgatgtaaatataaagtaaaaaaatcaaaagaaagcaggcagcatagattacccgggtatgatttttccctggaaaagccaaatatgcttccaggaccacatcaaaggaaggtgtaccatccttgtctgcatcacaaacggccagttaaccagctcgtggttactgaactcggttgtagccttcttcacaacgattttgtttgcattgtcagataggtgaacaactgaacaggcactgtgatttcagttttgtgttatccatatggtaacagaaaataaagccaaatatagcaacttgagaaaaaaaaatgaaatcaagaaattgattgtattgattgtctccccccaaccaaacttacaatgaattgtgctacctatctttatctacaaaagaatcatttccttcttagatatgtaacaaaaaatgatgattctaatgaactaagaaaagatcaaaagaccttaaaattcaaaaaatataccaaagagcaaatcgctcttctatctaatttctttttggttcttctttccctgtctgtgtctccatgtcatgtattgtggtgccgtgctgtgcaagaccaaatacagtgtttaccaatctaccatggaagatttccagtgtgtgggtctgtgaaaactttctgaacaaaatctttcaaaccgttatcatatacttcacagaaacgtctcggccaatcctctggttcaaccggtttggtcccaagcccaggagccctgtcccttgatccaacattctcctcgtcctgccaatcagcaacatatgtcgcgacacgtccggagaacttatccttgaacacctcccagacttggtatttgtagtggttgatcagcatcataccctgaccaatgttcacatatttcatcccttccttcagatggaagtggtgcaccacattgatgagggatgggttcaatgcgtctggcctgacaattgacttatggcgctcaggtgcagccagccggcaggtgtagcctgttgtaacacctttctttgggatcttagtccggcctgatggaccaaaactatggcatgcagtcctgagctcaccgatccgtggcttgacagagtaatttcggaggacatcttgtagtgtttggttgccagggaagtgcaggaactcatctatgtcaatgaaccccacccactcacagctctctcgagccctgagtgcacaatgtgcaaatccagcctcctgagatttcatccatggccataaatagcgtgtcacattgtacctggatgaatccatggtgttgaggacctcctcaatgccatcgtcgctgttgttgtcatagatgaaccaccgctgcacaccaatacgtgagtgatagatgatccattcccgcaggaaccgtgcttggttgcgaagcatggtgcagacacacattgagtgtgcctttcgtctccaatgcttgttgtaccgaggaagcggctccggttgcgcgattgaggggagtgtagagcttccccggcccttagtcctgatggagaccaacataggcttgtcatcattgtttacgctgtttttgccaccggtagtcatccggaggtaccggcgaatgcgaactggtgtcacacaccggaatatctcctgagcagcagaaaccactggggaggtgacaacaagctttggcttcgaaaagtctcggccaaagacacactcgtaccgtgatggcacacctagacgacccggacggaggttcatcccctttgcaaacacaacggtggagttgtccttgctgtcaataagtgcagtgtacaccagccgatcccattgcaacggcgccaccggaaccgactgcgccagtgagagggacacagcgaccctggatggtccggcgggacaatggacgaggctgggtccatccggcaaggtagcgacggacaagggctggcgacgcagctgcgacgagttgacaggggagtacaggcactcaaattgccccgaagccggcagcaatgagccatctctgagcatcaggagaacatggtccggcaaggcaaccgcgtgctggatatgaacagaaggcaacacggcgtcgacgctgaccatgccggcttgctgcgcgccgcgctccgacgacacggcgttcagggtggccgacggccacgcggtcttgagcacgggccggaaggatgctgcatcagggggacaacacgaacatgggattagttagcacagcacattccgtccataaattaaagagccaaacggattcggcatgggtgaattcagattgcatcaacagaaacgttcttcatgtgaccaagataagccttttctattcccagaattcacagtatcaattcagtcaaacggcagtagcagcaacactagttgcaatttagtaaactcgcaagccagcgtaacattccggaaatcgcgaaccacgcaagaatggaatgagaaaaaaaaacactacaaattttgttggaacagtgagacccctcagatctgccacgcgatttgcaaccccacaagaaagagagaactttttcttcaccactccccaacagcaaacactaaacgcataccagaaacaaatctaaataaacaaaaatgcaaaagaaactttccctcaaatcattcgcgtgagtccaattgaatcgatccaaaccgcgcctccaaccacaagattgtcatgggagcatgattccactggcctacctaaacccaaccaagatccaattcaactccccccccacgccacggcggcagccaaccaactccgccgccgtccccagaagcgaccaaggcggaggcgagggggaaaaacgagtctcacctccaatgacgtgcgcggcgccgaagagcaccgcgccggcgaagaggaacgcgaagaacgccgcgaacagccgccgctgcgtccccgccggcgcccgctgccccctcgccccgaaactcccacctccccctcctccgccactgcccttactcccaagcctactcagcttcctctccttcgccgccaacgccatgccgcggacgcacgcaccactgtctccagcagctcccctctcgctcagatcgatccacgagcgccggctaaccccacgcgccgcaccattcactgctcctcctcgccggcggcgaccactggagctctccctctctctctctctctctctctctctctcctcggtcgtctctctccgccgcggttgctgccgtaaatggcgaggaggcggaggctccgaatccgaagcggcggtggttgccgtttatacccgcgcgcacgccggtccacacctgtccccacatgtcggtgacccaaatggcaggcgctccacgcggcgcggtgggtgccaatgacaggtgggtcccacggggacaacctgtcagtgagacttgtcgctctgagtttctgtttgtatcttattaaaaaatagaattattacttattttatttgtgacttgctttattatcaaaagtactttaaacgtgacttataattttttatatttgcattattttttctaataagatgagtggtcaaacattacataaaaaaagtcaaagcgaccattaatttaggacgaaggtagtactaggctatgtccaatggggcgcgcgtgtgtgtgacaatgacatgtggggacagggaggtggggccgttgcgtcagttggttggggtgaggtgggatgttggtggaaagtgtttttttttggggcttggaacagcaattattggggtgcacatggggcaaggtatccaattctgcctattgaagattagggaattttatttagggaataatgtagggggtatttctcttaagtaacaggtgttctttccatttccatctttctttcttttcttttcatagaaaatgacagattaatgactaatgaggagaacaatgggaaatgaatacacattgtttcactggaaaaggagggtttcaaagcctttgtgttatattacttgtttaaatattttaaacacatcactaatcctacaaacttggacatagatagatcataaattactggtgatgatttttttttctggaaattattttactttcttattgcatcaactttacctatcattttcattgtcttttttcttaaaaggaaaaacgataatcaatcaaatatttggttggctaatagcgtttgaacgatgaaatcttccacgcgttgaagttggtggtcaccaaaatgtttgcttaggttaggaccatcaaggccctacttggacaaaatgttttggcacatccatattagcatgtgataccctgttcacttttgtctttagaagtcaaaaggaaatagtgggctgtgaacttcgttgaatctgaatcacttggaagaattatacttaccatatctcaaaatagcttttctttgtcttggaaaatatcctcttagacaaatattttgcatatcgatggaatgaaaattgacttgttgcaattcctcagtgatcaacggtgcaattatacccagtaattgcagtcaccttagttgaagctgggatataggtttcagggttgtcatggatcatctaacagtagcttatgtaaccaactttcagcacaaattttaccatactactgtatttcacacttgacagagtagttaacttgatggtttgcagtaatatttgtccttagggttgatcaagaaatccaaagttaaaagaacccttacctcaaagcaaagtcaaatgtggtcctttaaagggtcctcacattaaaccctgcattaacccttgttggaggttggttaagggtaagtattaagtaattacaacttgcattgtattgtattatctttgtatgagtgatgatgcctcaaaaccctgcagaattccaatgtggagcccttgccaaaaggttaataaaaaaaaggcaattgtcctggtaatactttattaactgtactgttgctcctgcaactagtttaccttttgtactcttacaacacacatggggtgtgggacttaccgacttagtaatctactacttctcagctaatctgaactctgaagaagcatataaattttacagatccggataatctgatgctatgccagtactaggtgtttgtcagtgtgttggtgtccgtattaattaaatggcattgaaatctcaaggaagaacctactggttttaatatagatgcagatactagcagcttaggacatgtgagaagtcgaaatgcagcataccttattcatgaaccattaaaagtgtgatttataggaagcagaagtatatcaaatgcaaatgcataccatggtatgtttctggtctggtcagagtttgttagaaagtggaaccactttctgcacttctttttctgaacatgcacagctcatgctagagaacattgcatggagtagaggaagaacttcagattgaaatggtctataaaatggcagctccataaggctgaaacattgcaacagacagcatatggttttagctctgaaggtaagagttgtaggaaactgaactctttcttgtcagtgacagtttcaggagctcagttttctccaacatcttatcttcggcgccttaatctttgtagtgactataaatatgtggagtggtagcttggttaggtatcacaaccataatctttggcagctgaatttgaggtttggatgggaccaaatcttactgcagacttgcagagcaagacaagatttggtttcctccaatatctcatgttcagttgtcagacagtgaatagtggtgcaattagtgagctttaacttatgggtggaacaaccttggaagctgaatgtgagagttggatggggccaaatcctgagcttcagatcttgccatggcacaagatttggtttcctccagtatctcaccttcaattgtccaagatggccagatgcaacataaaatgtgttttgtttatagcattttctgtttagaaatgggtacagagtgggattggaattagagtggaacagatgcagtgtagggaaatatggctgtcctgttatttccaatgctgagcattctgcagtaatcaagttgctaaacagataaattagcagtagaagcaattacatttcataccagtttttttttttaaaaaaaaacctttcatactcttcaatcttgtatttctatgtaaataacttttattcctcttaatacaaagatacgctcctagcgtattctcgaaaaaaaatactccttttccactgaacaagtagcatatgctaattcttgatcatctgcccacacaagtatcacattttgctgaaatgtgcaggcagcagcatacagcagttgccatttgcttaactctaatttttggtagcttagctccatgaaagatgcacataaaacttccttcttttagttaaagactagctcgcagccatcaatttgagacaatttctcaccgcatacaagcataactcttttccaaattttctgaagctaatcagagataaagcatggtgctttttctatttacagtttcagactttcagcaatctcaccgtggagtcgtggactatacacagtcaatctccaaggatgcctcaggctctcttcgcgtgaagaaaataaatggaactaaaggaagggatgcacgaaccttggctgcaggagagttagctggaatggtcgattgaggtcgccggcgacgtggaagatggaatgcacgcgcgccgcctcaccggcaaggctaggagggtccgccagagcggcagagccacgaggtcgatgttaaatatgtgatccgaattaattttaggcttacaatatattcggattagttttctaataggactccatatcttttcctattaggtgtctctcctatatatatactcttgtaaactgtaggggaaggggtgacgttcccattattatctccctacgtttgtaatcaactcctcaatagtgattattgccggtcgatatccgtgattttttcccacaagggttttccacttaaaatttgtgtcttcattgtgcatctattttcttaatagtcaagttgcctccggcctccgcaccatgcgtggtcagatgtcagatcagtagggagacaaagctacagtgtcagtcacatcaagctgatcctcctgaataaatttgatttctgtcatctaccacttccttttttttaatatatgatgccattaactcttgtagttatgttttagttatttttgaccattcgtattactcaaaaaaatatgtaattattatttattttgctctggcttgatttattattaaaggttgtttaagcacgacttatataaaaatatgtttgaatttttttaatatgatgaatggtaaaatgtttgtcagaaattcaatggcattctatattaaaaaacgaggagtattacatcaaaattttcgtttcttcttattctattggttatcgatgtggtgaagggaacctggaattgagatgtggattcagatttcagaagccctttcctttccccagtattcagtgctggtcatgctagctgttgctctgatgttccgaatttctgatgagatgtcatactttacagtaccgactatttctgagtagatgaaaaacagttcagaacaataaaaggtacttactacttgttttaatagagaatcaaatactagcaagtagcaacgtaagacatgtgacagtcaaaatgcagtataccctattcatgactcattaaacttctgatttgtaggtccctttcaaataaaaaaaaaatgatttgtgacaagcacaagtggtcaaatgcaaatgcataccacagtgtttttctggtctggtcagagtttgttagaaattggaattactttaagagcctttctttctgaacatgcacaactcatgctagagaacattggacgagtagatagagcagaaacttcagaagttcattttgaactggcctataaaatgtcagccccatgaggatgaaatactgcagctgatagcatatgtttttgcactgaaggtaagagttgcaggaaactgaactctttctttgtcactttgttagtaacagtttcaggagttcagtttcctccaacatcttatcttcggcgccttaatctgcagtgactgtaaatgtgtggagtggtagcttagctaggcatcacaaaccataatctttgacagttgaatttgaggtttggatgggaccaaatcttactgcagacttgcagattaacgcaagatttggtttcctccaatatctcatgttcagttgtcagacagtgaataatggtgcaattagtgagctgaacgaacaaccttggaagctgaatgtgagagctggatgggaccaaatcttgagcttcagatcctgctattgcaaaagatttggtttcctccagtatatcatcttcacctttcccagatgcaatatgaaatgtgttctgagggttacaccatcacagatacttacagaattttctgtcgagcttcttaaattaattagttaaatcttgaagctagttggcaactagtacaatgccgggttagaattagagtggaatcaattcaatactccgcattcagataaattatcagcagtctgcaggtgcattcaacatttctactctttccattttaaaagaaatagtcgttttcctccgattcttgatcatctgccacacacaaatgtcacattttgctgaaacataggtttctttctgttgagacctgctgactgccgttgccatttgctaatttagttttttttgcagcttaattccatgaaaattgcagataaaaaacttttcttttccattaaaaactgagatcatactcatcgattcaagacaattgctcactgcacaggagcattgctcatttaatttttttttcatacatcctctgaagcaaacacatatactgaactaatcagtgaaaaagaaccagtaaaaaaaactgggtgttttgtgcctgaagcacgaactaaatcaatcaaagtgtggtgtggcaagtttagccaccaaccaaacaacccctaaacaaggcagacaaaaatgcaataattccaaattgaccaccagtcagcaactctgcatcgattgatgcaagcaggaagcattcctcgttacaaatttctgtatacatctagaaaaagcaaacacatgtacacccggggtacatattatcatgataagactcgaagttattcatacataaaaacattgtatttctgcaaaaccatgatcaacaagcaaactctgttcctacttgctactctctcatgtgctgctaaccgtcctcaacatcagggcactgagctccagtctgcaccttgacccctagcaggctagcacatacatctcagaaaagcaaggacataatctgcctcctttcctttgtcccacagcgaagaacaggtgctacgatctcggaacagacacagctctgagccctgttgaagattcgaagtccatcatctaccttgtatatacaagtcagcctgcgaaaatgttcaggagcaagtaacatgaggcatgcaggaatccatgagcattcacatcagtgatctaactagatctggcaaacgagctgctcatacgacgtcagcattcagcaagcaacgctgaggagcgctgctaatgaactgtagcctctggaggaactgctggctcactgctgatagtttttgacgaggcaatctcttctaggcgcttccatgtggcctcacgttttgatctcaacgcggtttcttttgcttcatcttcctcaaacttcttgaggcactcctcaaacagtaccgggtcatgatccatgaatatcttgcgaacattaagactcaagctttgaactgcctggttccagtgttcttttgtatttcgttctattgcaggaaggattatgggcagtatcaccttgctgttctgcttgatcaagacctcaatatggtcgttgttccacagaaacagagctcgctctgccacctgcaaaacaagaaaaaataagaatcaatacgccattaccttctatgacaaacaggtagcatggggtcactagaaaattaaaaagcttaagtttcgtttatcacaaaaacttaaacacaacacaatttgatcatcaagcaaatgatcaagtagctgatggtcattctcaaacgccaactagtaaaatacatataatatcacacatccatggatcaggatctcagtgaaatttcaccaatatcttgtcatcttggatgggtccgaaacaattgcataccaggggaattttttttaatttaaattgtatatacaaacaagcctagcggtagctcttactactatacagggtaagttctgtggttcgagtcctgtcgatgccagcttcatctctttttcacataaaaatttaaatttggtttcagtttttttggcaacattatggcaagaaaaatgatctctccctagacctaatcatctcagcctccaccgattttgtttgtgaaaaccaaccgtctcaaccggtggtacatcctaactttaggatatacatctccacttctcagaagaaagtgaacagcataccataaatccaaaaaaaggatggtattatcagcagacaaaagaaactgcataaacataacacagaagcatgcatggacacgtttcttgaagtatacattgtaaatgatcatttaatatgagatccatgtgttagtgcaaaacagcaattcaaaggataaaaattgtcagctacagttacatggaagggtaatgtgatagaattttagtatggattcacaaattggtatgtactttagtgaggagcccaggattcatatagtaaatactttgggcatttaacagccctatcttgtattggtccaaaattgtgccaacaggctatctggctatcatatagcaaacatggtaataatcaacagcccaactctataaagaataaccataattggtacgacttgtgtgctgaaatacatgtattggctgttggaaagaaatcaaccgtggaatgtggatcgctgaaatggccatgctatctgtaatattggtattccatctgatagataatctaataaatagttttaaaatgataaatgcctatttccatatcaacattgacaagaactgaatgcacaagcatacaacaactagcaaaaacaatattacatgcttatggtttaactgccattcagtaaaattcatttttacctgaaagtgagaactattcagacagcgggcgatctgacagaaaagtgacaccatacatctctgaaattctgctggctgagtggcttccaaaacctcttctaactcgcccaaaaacatcacctccttagcactattcgtgatgggccagtatttaagtaaaccccttataacagtatccgcaagcttgcagtccttctcaacaaactgagtaacacaatatgacagttgttgatgatacatgctaacacattttggtttgtggagtggaatcaatgctcgcacaagaaacaatttgtgctcttccttgagtggcaaagcaaaaccattgattatactccccaaaatctctaatagctcagcaatcccgttatgcttttctgtctcaaatatgaacctgtagaagatattattaatcgccttcctaatgaatggacggtgcaccatgaacttcccatatatcctatgaagtattgtcttcaaatactccctttccctaggatcctccgagtcaaagagatcaagcagcttgataatgaaaccatgatcgacgtatctcttggccagcttagcatcggtctcaggagactggacaaaccttaagaatagttcatacacaatctgcaagtgcggccaagccgggtccatgacaggttcttcctcctccatatcaaatgactcaagcggcttgttctctcttggcgcggggttcggtaccctgaacaagttggtggacaccattttgatgacctcctgcacagcgggctccgggaatttccccgtagctgaggtgacataatccacgagctccagcaatgtttgcctcttgatctccttctccttgacatccttggtcgggtccgtgaagtcgaaaaccacatagcacatgaccaccttccggagaaacaagctgggcttctctggcgccggcgcatcccgtaagctcggaagcgcctcaaacacgggcggcgccaagaaaccattgctgacaccagcaccaccatgatgggcgttcttgacggtgtaattctggccgggatttgtgaccgcggctgtataattgttaggattggcgatcctactagacatggtcaaatccgtggtggttcttgcatcaggcagcgacgagccgactccggccaaatccttctccccggacttgcccggcttctccttcttgggaagccggcccaggatttgcttaatcataacggatcgtccaaacaagcaactcgatcaaaattcacgaatccatcattcctcaatctgatcatcaaattaattaaaacgccgtaagaagcagggaaacgaattcacctcatatatagcacaaaacaaaaaaaaaaccgcaccttgctaggatcaaatcgacgcctccggagccaaatccgcgatcgagacgacccctaaaaccgcgccttttccacgagaaacacaatcagtgacaccaataaaaagaagaaccgtgcggagagtcaaaaagggaaaggggggtaaagaaaaaggcagaaaaatcccgccttttttttcccgaatttccacgcgaattggccccagggggaagggaaaggccgcgaattggatcgattcgtggagaaaactatggggatttcgccgtggaggaggcgtcgccggtcgggttcttcctgcgatgcgagcacagtggggagagaggcagtgggtggggcgaagccaaaatgggagagaaaactaaaaagcagaggaggagatgatggatagagagagagagagagagagagagagagaggaaaatataatctttttgttttttgtttttggacctaatccaaaatggatagcttcgttttggtcctaaatattctggtgcacattttgtgttgcacccagtgaagtgcaatttcagtcttgtgtggactgtaactttcagtggcagcacaaaaacatttttattttttcatggggatgcttttctttttcttttttccgtttttacatgtgttttagtacttatgtatgataatccctccattctaaaatatatagtaatttatgatcggattggacatatcctagtataacgggacatacccttgtccagattcgttgattaagatgcgactaattcgatactagtttttatattttgaaacagaagagtagatttatgaagattgattgttctaccattcatagcgacattctcctagattcaatgaaactagattgccatgtcatcaggggcatgtgatggttgtctcaaaaatcaatttcatgttagttaagatggtctaataactgtttctgtactatttagcagatatctgaacttttttcctattgataaagattacctaagaacataactacccccaagaaaagaaaaacataggattcggtaacataccctttttttttctcacgctaacactttacttacccctatatcaaagatacatacatcatgatttatgaagctgtcgttttgttgatggcacaataatgcaaaaggaaatattcttatttcactttagaatataaaccgtatgcttttagaactgaaactcttcttggtgaactgtctttcctctgagtacgctttacgtgtacccttaagaaagaagggctaaataaaggtccgtgacaaatgagaacttatgagaagaaatttctgatttgaactaattgaatatataagcatgccatataaaacaaaataaactaatgatgcaaccatgaccaaaacgatagacttgtaacaggtccaacatgccactaggaggagaagaccagaggcagtcaaatcaaacgcatatacttttattgggtcaccatttaggacggtcaaatctcacctttttatgtcgaaaatcacatggtcaaatatcaaaccagatgccctgttcttcagcacgagcaagaatgtaagacccatcatacactgaatttttcaaccacaagaacattatttcttatttcaactgaatttccatgcgtgcttaacataatggatgattcaggatgattactggattgatggtgattcctgattactgaataaagacagctagtgaggggaagagaggggggggggggtctaatctgcctctggtgtcactattaggaccatgagtaacaaatggctgaaagaaaggcatgagagaaatgtcacattcagagcagtgtgattaaagcaaaggccagtgttttgctgtgctgtgccttaagcgttgcttatctgtccacctgcttgtgcaagcaacttttacctaatcccctccactttactgtgtgctcttgcagattggtttaaccctagctaattagctaggcaccaaaatagaaccaattagggaacagcagagaaaaagtgagcaggtgtacatgtacattcagacataaagagatgagaagctagattgcattaacacagatagaaaatggtggtagaaaattaccattttgtacagtctctcgtaatcgaagtaaagcaaagcctgatgctgcttgaaaagatttacatcaccagctcctcgagtgaaagaaataagggaagaacacaagatgcagtaaaattcaggatgagctgcagaagaacagatcaactgaatttgcgtgcggaacctgaactgcagcttcgtttcattctccgatcgatcgctgtcgaatgtaggtggatcgcaagtagcacaaggcagcacaacaggcagttcatctctatgttacccagatacagggttacagatacgcgatacgttgatacaaggatacaacacttttcagaaaatatggatatggggatatgtatatgtatgtacatacacacataacacgtatatctatatatctttatttttactattataaaaattaaaaatgtttttggggaaactcttttaatcactcgagtggatgtccacccgtttaatgcatatcatctaaatagttataaaaaaattgtcaagatagatcaatatataatatatcactccacaaacatacatgttaaaattcatcttctacaagttgtaacaaaaataacaaataaaactcaaattagtatacgtatatttgcagttagatttgttatttttgttacaacttgtagaagttgaatttacatatgcatgtttgtggagtaatatattacatattgatctaccttgtcaattttttttgaaattttttcataactatttagttgacatgcaataaacgggtggatgtccacttgggtgattagaatccatctccaatgtttttccggtactttggtacgtcatctgtgtatgagtcagtttttaagttcgtttgattttgaaaatacagatatgtatttgagtcgtgttttaaattcgttcgctttcgaaaatacgaaaggattcgtacaagatatctttttataaaaactcgcatgctaaattgagatgattggactcctaattgcagcacatgattttctagaaatatatatatccaagcgaattcacacagtgaatttcaccttaactaaaccgtataaaaataataagattaaaataaccttcacccgttgcagcgcatgtgaattgagggtggatagggagagagtagctactcccggtagtaacttatactcaatttcaacaatggtgcccgggcaccatggagcaccaaacaaaattgtgagtatatacctagttataataattcgattcatacctatacctatcaacaaaacaactcaaattta

SEQ ID NO: 5785 - DNA, 49252 bp, Oryza sativa
  unsure (1)..(49252): unsure at all n locations
ccgcttatcggatntaagttcagaggcgcaagcacatcatcaatcactgctctggctaggaacagtcccagctcatctgaggcatccaatatatcaagtgcggtatcttctgcagattcaagaagcattatgaaacccttgacaatgtcttctgttgagaacaattccatgcttaatgaggatagaagaattgaagccatctctttctccctgtttttgcggtccatagcaattgttataagcttcttaataaagacggggttgtactctggagaaccaagctctttgaggctgcgaataatctcaggtacatcatcagagagaaagtactcatgaatcatagaaacagcctctttcttgtacctcctcagcttctcatgttcatcatcttggacatccccattggcacctacatgtacaaacgaagagtcgagccatccttcagaaactgcttttgataccaatgtctggaattgagattttgcagatggtatatcaagagataggtcatcaagactatctacaacacgagaaaatcccttcatcatctgactagagcttatcagcaattcctcagatgcttccttcagaagcttgacaataagagcttctgcagttggactctccattccaagagtgagagctcgcttgacaacctcatggtgaaaaaatggcactgccaattctctgatgcacctacacgcctcagctgtgtcaccattcttaatatattccttaagaagatcagtaatcctcaactttacagcgtctactgtggtgcgagttgaaccaccccatcgccgttcaagcaactctgcatggtggggtgctgaaagatagctcttttctgcaatctgtacaacttgcatcccctttgaagactcggagagactcgctttttccctgctgagaaaagcaggtggcagaatgtcatcaacaacagctcgtgcaatgaaaagagcaagaacatcaaccgcgtcaagtatgtcaacagccaagtcatcaacagcctctagcagcatcacaaagcctagtctgatttgggtagaactgatcacatcaccataaagagatgataaaagcactgacgccatctctttctccttgtcatgcctatccattgccatggaaacaagcttcttgacaaagtaacggtggaaatcatcataacccaactctttcagatcagaagcagccaatttaacatcaccagtgctgaaatattcctcaataattggggcaacagatttcttgtagtcctctactggggttgaaacaggggcttcaactagttcatatggttcctgattaccagaaaaagaacatgaatgtccatacgtctggctggactctaaccacatatatttagacaatactggatacaagctagatgtttaccagtttctccaaaatagcaggtgtcaaacaattcatcggtacataaatgtgcaagtggctagagttcatcgatacataaaagtgcaagtggctagagtacatggtcaagaccattaaatattacctcatcactgtcatagtttgggtcattgcggtcaaggcatgcatctgtgtctgtatctataagttttccccaggtacctttgccaccagcaccatctgaaatagaagctcagcaagtcagatatgagagagagagagagagagagagagagagactaatctttggctcagcagaagtagagatatagatgtaatgagaacaatattggagagtgcaataactttcctggtgaaattgtgtgtagaatcccaaatacactaactcattggaaatttagaactagcagagaatggacactagagagtattgtagtgtcctaaaaatcataaaaccaaactactgataagggggatgaactgaacataagaaatatttttatgtactcctgcattcagcgaacacccaccagcaaaaggtaggttagttaagcataaatactataatgacaacctttgaccgtcctaatcaatggacagttcagatgccttccctaattaatcagcataaaactcatttataatcattgccttgagccatcacactggagaaattaacatgtaacattatgcagtctccttttgccaaaaactacaatatacagaagtatacaagatttgatgttactaagcgattcagtttatgcatatgtatagatggggactaaatgccgtcaactagaattgtcaactgaaattataagaataattcttaataaacatagtccagacagagaaggcaatccccaccctatatgatatgagagtcccacagatagctcaaaatggcacacaattttgtaaacaacaccaggcaaccattacttgataaactagaaactcctccataataattaaaactgcattaagctagcaaaaagatacaagcagaatgaggggggaaaatcaagtgtgttgacgtgataagagatgtatagtggcagatggacgtcctgtcgcacatacatgacaaatcagagatatgaactgactgaaagttgttatcaagatcaaatgtgtacaatcgatgcctttatgatatggcacctccaatcctactagcgatgcggaaagaacatactagcgacaaaaagaatctcacgagtaacagaataactaatccaaccaactaatcagaaattactagatgcccaaatcatataattgtcgtgacccaactaaatcctcctcctataggtagctgagagaaacaccaatcaacacgcacacggaatcccatatttgcatgcaggagtaaccatcaacacaccaaatatctgattactaaccaaaaactcaaaatgcaatacttccctacttaaaccatgacattccacaaattccctaagcaaacattcaagcacattcatgtttcccctaatcgatttaatcaattctatatatgaatatatataatagacaaataccacaatatatacctactaaatataactaaacccaataccatgaaacactaactcacactacaactgcactgacatatttctcaaataaacattggcaactatatcaacctaatgggtaaagtcacattccaatcatcctaaacaagacgccacaacactcaatatatggataaataataatcagcaggtagcaatgataattattaacaatagcagcagtggtcacatcctatatcctaatcaagcatgccaaatctctagaaccaccacaacaacagtaaggaaggcaataaaccgagcataaatagatcaagccggagccacctcacctttcttcaccttaatggtcttcccggaatgcgaccgccgcacgtgcctcaccccacccccacccccaccgccgccgccgcccctggccgcagccgccgcggcggcggcgcgctgctgctcgtactgctgcaggagcgcggaggtggagcccccggtcggcgagcgcggggaggcgagcgacagcgtctcggcgttctgcaccgcgatccgcagcttctcccgctggtcctgcgtcaggaacccctcgttcctcggcgacgccatccccacctcaactcctaatcccaccaccaccacctgcacccaaaaaattacaccacgcatcagcaccggccgccgccgaaatggggactcgaatccgccgccgcctccgcggcggaggttgccgtacctagggtttcggccgcggatcgagcctgagccgccgccgccgccaacccgtgcgcgagatttgtgcaggcgaggcgagtggtaaatttttttttctacgctccttttttttccctttttttttctctccgagcgagtgagtgagatgagagagaaaggatagggagggtggcattttatacggaggcggattgggattcggggggacacgtcgcccgcccgcgcccgacacgccgtggggctcacgtctcgtgggccccgcatgtcatgggggtgcgcgtgtcctgtgggcttatcctttttctcggcccgctggttttttggtttgggccggctggccggccgctcatccctatcctctttccacgtggcactgccagcctcacctcgtgtctcaccacacgtttcactgacatgtggggaacatgatacggcggacccacatgtcagtgagtgatgggggtgtttttgaggaggtggatcgggccgtgggagttagggttttggccgtgggggaggaaaggggattaggatcttctgcggcggtggttaatggtgggtgcgtgtgtgtttttctgtgggcggtggttatgaatgattgggtggagtggataaggggatgagattcatgagaatgacgcgtcgggaatagtcaagcaagattcagtgtgcacctgacctgatctgacgatgagatcaaccacctgatacacacgtgattgttgatccatgatctcattagtggtaccgtctattcaaggtacagacaactgtatgtgcacctaaaaattttatcatctttattgggagagaaattcccagttgtttgtttcttcagctgggaatttttatttacagtgatgattgactctatctgaggtgttgtaggcttgcccattaggacacccacaatggttatctataggctttttacaagagatctatgtcagcatattttcctacttggaagagattaaatgaagagaggagcaaagctatcttactaacctagagatagtttatagagaaaaacgagacaatgtattagagagctatagatacccatgtagacatactattgaggtggtttactattaatttagtctattgctgacatgtacatgttttatagatagcaccttattttaccattgcgggtgctcttagtatgctctactagtggtgtctcttgagcttatccacaaatgaagtgctagttaagcaaaggtttgattgatagcgccagcttttaatggaggaggtaacggcggcagggcagatgccgactggttcttgttctgcaactgcaagcccaatcaactacaccatacttgggctgtctcacctgtcgtatctgggccgtgttataggccggcctgattaatggcccagtagtcagctcagaactttgttcaacttagatcactgtaaatttgtacaggcaactctgtgcacctaaaaactgacgagatcagatcaacttcagtgaaaaaaaagggtactaattctaattaatctttgttatctgatactctaatcaaattaaccacaagtataacccagatcaaagtgacagaaccaaaatcgcattgtcctggaatcatcaggtagtactccactttttaattcactgttaaacagcagacaaaatcactttgaattcatttcaaaattcagaaccaaaacaaaacactcgctaaacaagaccaagcaaaaatcaaaatcaaatacgcgacattgcgagagcatagaagcaatcgcagcttattgttacactacattataaaacaaaaatatcaattcgtcataaagcctcagtacttgtagtccttgacgtggaggttctcggagacgccctcgccggcggcggcgtcgccggcgtacgcgccgagcgtcgcctgggagttggccctgcagcgggcgagcagcgccgcctgcgccttgccgacgttctccgccttgccggcccacgccttgagcgtgctctgctgcagcgcgcggccgaaggagaaggtcagcgaccatggcttcttgcccctgctcgccacctggttcatggcgttcaggttcctcgtcgcctcctcctcgctctgcccgccggacaggaacacgatggccggcaccgccggcggcacggtgcggaggagcgcgcggacggtgtgctcggcgaccacctccggcggcgccctggcggcgtcggagcccggcgtcaccatgttgggcttgaggagggtgccctcgaggaggacgtggtggtcgctcagcgccttgtagcacgcggcgaggacgcgctccgtcacctcggcgcaagcctcgatgccgtgctcgccgtcgacgaggatctccggctcgacgatggggaccagcccgttctcctggcagatgatggcgtaccgcgcgaggccctgcgcgttggcgtcgacggcgagctgcgacggcctggacgacgccctgccgatgctgagcacggcgcgccacttggcgaaccgcgcgccggcggcgtagtaccgcctgcagcgctcgccgaggccgtcgtgcccctgtgtcgtcgtctcgcggtcggtgccggcgagctcgacggtgcccttgtcgaccttgatcccggccagaacgccggcggcggcgagcacgtcgacgaacggcgtcccgtcgcgggtgctctggtagagcgtctcctcgaacaggatgacgccgctgaggcagtccagcgcgccgggcgccgtgaacaggagctcccggagcgcgcggcggttctcctcgacattctccacgccgatgctcgccagccgcttcccgatcgtgcccgtcgactcgtcggcggcgaggatgcccttccccggcgtcccaatgtacgccgcgttcctgatcaactcatctgaaaaaaaacaaaaaaaaaacccataaatcattgatcaagaagcagaaacgcatggcttactcatcgaatcaagaaatgcatgtgttgcacaagtgttttttttggataatggaatataaatccatctccgccttcgctgaaacgagctacaaccaattattacaccaaatcgctcaaaacgagtgcaactcaaagagaacttaaaaaaaaacttttccaaacataaagcgaacacaaaatcataaacgaagcttactgtacccttgtacttgccgcagtaggccgacatgattgacagatgagagaaacgaaagcttcttggaggagaggtgatcagaaggaagaggaagaagaagaagatgcagagatggcgggaatgggatggagaaaattcttgtggcgttgtggcctatttaaacagctcggagctctgaagctggaggtgtcggaatgttgggtggtcagaggaagcagacatggttttggctttctctgcacattgtttttcgtttttttctcttgagaattattggcgccatggggccatggagaaaactgtgttgcttttgtccttgcagtattttattagcgttggaaattagtctttctccaactaatcggaaggagaaactaatgaatatgcgtggaattctagattgattggttgttatttttcctccctttgagctcatcgatcatgacttctcccagttgaattctccgtccaaagaaataggctctcttgtttctaagcttccaagttccaacttgttctcttctcctgacaggaaagttgaccctcgtgagatcttcttcttcagaaacatgttgcgtaaataccttatggaaatattttgatttgctgaaaccaagcaattcagggtatcccaaatttctgtgctttttatgtgatgcagaccaaacaacttttctaatttctatgccggaattgctagaattatagcgtcacatttttcgcttaatttcagtcattttatccctatgtgattgtctctctcctatttgttcctatatgtaaggatgctttttatatcttctatctatttaagataataaattacttttaatcctaactggataaaacccatgttttgtatgataatatatagtagaaataacatgtaaaatagctagacaatataattttgtaatactttatataattttcatctttgaccgactattgaaaaaaaatgttcgaacaattaagatgatgtggtttataattcaaattatacatagattaatcattccaaagcaaaattaaggtgagaagaaaaggaaggaagatatatagattaatcatccgaagacaaaactaaaatgatatgacttcataaaataagaaaaaagagagataatttgtagcgtagatcaaccatccaagagctaaaaataataaatgtgatgtaacttaatgatagaaaagagaaataacattaacaacacttagtgggaatgaactttataaatatataggattctcttgtacattgtttattagaaaaattacagtgtaatgtatataggattctcttggcaagtcgagaaaatccaagcccaaatttgacttagaaatagaaaagaaaaagatcaaggagggcctccaaaagaatctcttgaatatcaaagcaaatggggatagcatgtgagtgccttccttttttttagctagctatagttgttttgaggtctcacatgtaaatatgagaaaacataaaggaggatacaatttgtatgattacatgcatggatcatgctctgatctgatacatagctgcaaagagaccatttgtgtgcaggcacaagtgactgatcccatgcatctgcagcacaacaccagcagattcgtggcatttgaattgaccaaataatgttaaagtcatacacacggaattcagatagtgttcattacaaagtcggaattaaggtacaagcaggaatttagttagaaaaataaaagggtacacaaggatggattatgcctactgctccgatcaggagcagtgagcatttgggcgtacatataaatgcaaaaggtaaatatttagtagggatttaaaccgacttaatccccctttttacctgtgctgtagcagcgtttttgattgttctgtttgggataactccctgtttttggagctttctgagactgcggattgcttgtgtaatgatttctctcttcttcttaagatgaaacaggcagaaactcctgcattttgccttgaaaaggaaaaaaaggaattaggtaatggaatggaagtatggcatgatggtacttataaaagcgcagatttatcagaaattcagaattcaagtaaaagctcggtgtgtaccgatcgatgaagccagctagcttgctaactataactgcatctgttgctcgatagagacgagtgttttgaagatgccgacgagaacgccgatgacggagaacacggtgacgatgatcctgtagttgttgtagaggaacttgtgtatgggaatccacatccacctttttcgctggtaggcctcaagatgtgccagcaagcatacgtgttgcggggggaggctaatgagcccggcaaggttcttcagaaaactgagcgtgcacttgtcactgaatttgccatgcaatatacccttcagccgcagctcgtgtacttcttccttccggttcattagcatcgcgaggagggatatgtacgagctgaccgtttgcacgtcattcttaccagtaaatgccaagtaagactcgagcgccaccatgttgaggagccagcatgcattgaggtcgtccatgaccagcggtggcatggagagcttgccgaataggaggcctttgcttattttcatgtccgcgaaccatgacgcctcggtggcgacaacatcgatgccgatttctgcaagctcgatggcgctgctagattgtcgcagtgcagtagtgaccccttcagggcgcttgaggacccagctgctttcaccaagcttgctcaatcctgattggtagtatcggaggaggccaaggagatgtggtttgcagctaatttcattcaagtcgaaaggattaatgttatcatccaacctgacattgaaacttgcccctgcattagagatgaagttatccacgggcacgggtacgggcatgaaggtcatcagggcctcgagcacaacccacgggatctggttctccagcataaacatgtccctcaagatgctaggttgcttggagccgaaccaagtttgtaacaatgggtcaacggctacatcgcacatatgagccataaattgcagcaagaaacaaccatcgcgtatcatcatagctgcaaactcggcttttcgaacgcctactaccgcatcgccctcgtagcagcttcgggcaccgcttgcgatggggaggatcttccagtatacttcatctgccgagtgccctgtgttcttgcagaaatcgcagacggcactccacttgatcttctccgcctcctgaaggtggcgtgcaccatggtggtaggggccaattgccacaacactcgggacgaagtagcggtagtaatccatttttagattttgaagaatcgcaggatacctgcagatatggaagatgaattacacctttggcttctacatgcagggcttgtgcacatcaaccatagttcttgtgattaatctttgtttatcctatattaattggatgtcctcctagaaacctatagcccatacaagaacacaaaatgtcaagcagtggagataggtaaggataacaacccagttcagctcgggttgttaactttaacgagttaaaatcctagctaagtgtaagctgtgagtgtctgcgtttgtattgtgcttctaaaaaaaatcctagctagcgcagctcgctcgttaagctcgttatgctcattaattaacgagctatatatatatatctcatttgtattacatgtacaattttaaatttaccattttatcatatattaacgtaataataaacaataattagcaaagaaatcactaaatacaaatatatagtttgactataactaaaagactaattaagtagtagttaacaagagtaattaagtatataaagatacgatgatattttatactagtgagctaaatgagcagctcacgagctggcttgttaagcttacactgaagtctctgttaatctaattttagcatcttaatttagttctatcggctatctctcgttttagggtttctgtcagtatcagctaaatcgtcttgctagattagattaccttagacaactaccaccctgaaaatcagtcaacagcttgattgtctagatattatgtttcttttcacatttaatgctgcatcaatacattcgatctactaagtcgtgcttagaaccatagtccctagcctgcttttgattgccaataaaggttttatcggggtttcagccgatgagttatctggatgttgcaacggcttataaggattacatacaagttagattggccgatcacaacaaagattttactgtttatctaatcttgtgaatttcatggcatcggatcttcagccgatgtatgctttaacctttggatcagtgcttatttgatcaactcattgttagccgattggtttctactggattatattgttatttcattatattaccatcaactgattgtcagattctacatcaaccatatagccgatagctcaaaatattatcgctatcggctggtatcggcatcggttagaattactctatcggcttattaatttgctatttgtatctcttgtcagttgtaggatcaaactgtctggcacgcacgtatctcatcaacctttggacctacacttgagctaagcagatctcccaggccgttgttttcgtcgacttagtccgtgccaacacagttccggtactatcggccgagcgcggatttctcgtcaacaggtacattcttttatatggccctttcgtataaatctgttgattcttataatgcacattttaatttttaaaagtatctgaggtcttgtttgaatcttctgaagatgaagattaaaagcgggcacgcaaaacaagaaagctattagcgtgtgattaattaagttttaattattacaaacttgaaaaatggatatatttgatattttgaagcaactttcatatagaaagttttcgtacaaaacgcgtcgttttgtagtttgaaaagcgtgctaacagaaaccgaggtaaaatctttatcttcatgagaaaagaatagtacctaagattctttaaagcgttgatttcttgtaatatatattcttgacagccataaaaccaatattttttataaaatacttaaaacatgaatttatcggtatagttttgtaccctaattaaatttcattaattaaatgaaatttaattttactaactatatatttatcaaaaatctacaaagtttgaatttttaaaattaaaatataaaatcaatgtgggtggtggtcttggtggagtaataagtatattagttatatatcaatgtagttatcaagaaggaaagtactatttttgtcataaagcatgtatgcatatgcatgtacctcaagacaacaagcacatagtaaattttgtaagagaaagaacataggagtatattatatatttaacatacaatcacttaaattatagagtaagtacaacgatggttggagtggtcgtagaactagcaaggaagttaaatcaagggttaaattaatttttaagccgtagtgttatagtaatttgtttatggccccgaaaaaaaaatctagggatgtaatttatgttacctaaaagctttagttcgtattgtgaagaactaaagtgaacacaccaaaccaggaagactaaggttgtgttcggcatcccttcttcccaacatctctcatttgttttctacacgcacgtttttaaaactgctaaactgtgtttttttttaaaagtttatatatgaaagttgcttaaaaaatcaaattaatctatttttttaaaaaatagctaatacttaattaatcacgcgccaatggatcgctccgttttctgtgcgctctagtcatgttgggaaccaggtatgccgaacacagcctaggacatgtattatgtataaaaaaccgatggtcacacacacacactctctctctagtagcatgcatgtgtttttgcaatgtatgctgttgactactaccactactactgctactaaactagtactaatgttgaaatgtactagtagtacatatagcatgaatgtactccgtgtgttgtttatacaagaaagggaaaaaaaagttaattaaacattaatagctagctcgacatttatggtggatgcatgaagaaatcattagcaatagtatttgcatggtagtagtacctatgaatcatgattttattgatgcagaggtgaacctctgcgccgagagcagtttcagttgattcaacatgcctgccggagcaagcggcaacagaaagggtaaccggagtcacggtcaccgctacctcggcagcgcttggcttagcagccattggtcgaacttgcccggagctagcagcttaacagagttccgatcagttgctaattcgctacggggtagatgcatggcacgcttcttgctcggttctatatatagtactttcggcaggcggcagctcagctcaaaagtcaaaacaaacgagtagttgatggtaacaacaacaaaaaaaatatatattgctgatgaaaaaaaaggggataattcactttatattctagcataaattaaagtaattgaaagattctgtgcccaaaaaaaggaaaaaaataatagaaaagatcaatgatagcttgagttttagttgacatatatagctccagctcaggattgaagtttggaaccctttgacttcacacggtgtactgaaacggtgattttgggtgatttgtagccttattatactcacgtggagcttattatagtccaagttatataagatcataagattttgttacgtgacatataaccccgtgcactatggttttaaagttttacaaaaccactccaataatcaatttggcatgctcctatattaaaatttttgtaaaaactttacttacatgaatgtaagatttatctgatggataaaatacccataaatttgagatgtgattgtagaactcaaaagtatggtagatcaaagttaaaatgattaatagtgtgttttgttaaacttatgtgtcacatgctaaaactcatgctgttttattcaactcaaatcataatatttagggttaagtgaaatttactataacaagaattgaaaaagagaaccccaccatagattttaaagcctcacaaattaaaagaaaattttttccaccgtaaattcttaggtcatacttcatccatttcataatataaaggcacaactattttttagatgtttcataatataaggcatgtatgcatgcatgcacttaactagtatcttatctccactaaataattatgttttaaatccttcaccttcaccttcaagatctccaattctattgagtgcatgaattataatgcatattggttccttattccactaaacctgtgtatgttttactagttctgtactgtacttgctgtatatttttactcatttttatatttaatttggcttttaggtacttaatgatatggatttgtatgggataggagtagcacttttggactacacattttattgcacactattgaaatttagttttagtttatgctttagattagcattagttttgcttagaacttgtagaggtcatttgttattattttcatgtgtttttttaactaggatggtttggaatgtatgggttatatcgttattgatttatcttataactgtctgtcatctaaactaggagataataattattattttttagtgtttgagttaagggttattgtgtcttacattttgaaaggaaaaggagtattggtcatcatttatagcctctcatattgagataaattttccttgtttggtggtttggagttgaggaaaggactgaaattcacctacctcactacttatggatccacgtggcagtgggatggctggtgatagattcattgctcaccatcaacattagagttttttttaaagaagtttagaaaagagtagctctacctatagctctagtacgatcgatcagccttgcccaattgcgcctcattaaaatgacttaacggcaatcaatttgcacattactagtagtacactaccagggaaggtttagaaagcaaatgataataatagtactacaacatgtgcagctgaagttgagcatgaagtggatccctatgttaccctgatatggggatacggatacacgatacgggaatacgaggacacgtcattttcttaaaaacaccgatacggggatacgtctatatatatttaaaaaaataaaaaatacaaaggaaaaacataacacataaataactataagcctgcaaatagagttatacaaattacatgacatcattagagataattagaataaaacttgttccggatataagttcaactcaatagaagttcaagagctgcttgcattcatagccagcgatgtggttgaaagagctacatcctagacaggtcccatgcaccagatcttttaatagtactatcccaggagatcaagctcatcatgtagcttgcccctcgtaaataatatgctcccatgcctggtcacaagtgatcctgatgaatctgtagccgcgctagcagtacatactagtgctagataagtggttaagattccaattctaaaattcaccggatctaaatgacaaggaaaaacacataacaaaacaaccaggaaaagaggaaagaaccaaatagccggtgatgatggactgtacgcgttgggcttggtagccggcggagaagctacgcctggtgacggagatgccgcgactaccgacggcggaggccctgcgcccaggggaccaggggtggcgacgcgatgcacggctggcggtggaggccctactcctcaggtggcgagcggcggcggaacccggtggccaacccgtggaggccctgtgcagtgtgcccctggtagcgatgcaagcggcgctgcaggaggattggatctgcgcttctatgctgcgagcgtgggttcgttagttcagaagtatggggaacgtatcggagaagtatccaagtaattttctttattttatatcgtggtaattagggatacgtatcggagcgtatctgatacgtatccgtatccgatgaagtatccgatacagatacgtggcttgtgagccgtatctggtaggtggatcctgctggagtgacctgcctccaagcgccagacatacagatatgtttggagagtctctatctgttgtagtttttcttttttcagaatttttaactcctcaaaacagtctatatttggagaaactataactattcgaaacaatcaggcatgtcaagggtatacgacatggtgacccgctattccctttcctcttcatcctggcaatagatccactccagtgtatgctagacaagaccactaaaacatgaatcttaagcaagttgtgaggtagggcagtgcatttccgcacatccatgtgtgctgacgacgcggcggtcttcataaacacgatcaaggaggatgtatgcgcgttcgctgagttgctcaaccgctttggacaatcgactagattatgcacaaacctgcaaaagctagtcccacgtagtcctgatcaggtgtgacaatttggacttagatgacgtcctatagggcacgccagctaccacaaccaacttcccaatgaagtacctaggacttcctctgacagctaggcggctacaaagaagagacctccaaccgctttatgataaatcgatgaactgcatagcagggtggcgggggaaacataatggactggcgggactatctaccttggtaaagtcgatcctcacatcacaacctgacttcctcctgacgggcctgaaagcttccaaagaataagtcgagatccttgacaagcagagaaggaagttcctctgggccggcagagaagctttgacaggagggaaatataaaatcaactagacatgctggagggctgggcatcctaaaccttgaaaaagtttgcaagagcattacatctcagatggttctggcatgagtggaggtcaccagaaaaagcatgggtgggatcaggaacaccataagacgacaccgataaattcctcttcgcagcggcgatgaccttaacaattggagaggagccaaaataaggttttctgggattggcttggtaccaggggcgacgcctaaaggatataacaccgctggtctacgcgactactaagaaaaagagcgcaagtctacaacaagcgtcgcaatccgaccaatggttggttgacctcaacctactgacaagctcaggttggacgacggagctaattagccaactcgtcaatgtctggggtgttgtccacaacctataattgacggaacacgaagaggacaagatcacatggaaactaactagccacggcgaatacacgacggcttcggcctacaatgcataactacttggcaaaggagccaagagacggcccaccacctcctggtgggatgtatatacgtgaggagaatttgggcggcaatagcagactgggcgacatgcaaactactaaagccaacgcaaatggcaataaacatcaacgctcctcgagtggtgggaggctactacaacaccagtgaagcaccaaaaaaggccctacggacgctaatgctgctagtcgcctgggtgatttggaacgaaaggaaccgcaaggtcttctagcaaaaagagctcccgacgaccggtataataatcaaaatgaaggaagaggccagaatgggccttggagggagtgaaacacctcgcagctggcttactccctccggtttgagattaattgatgttatgggttactccctcaggtttgagtttaatttacgttttagctttctccactactctctcccttctatttctccagaatacctctcatgcatgcatgcaaacagaaaaaagtaactgctgattggagtattaatgaggggtataacaggaaatatggatctaattaatactgtcattggtatttgccatgatgtccaaaacatcagttaatctcaaaccggagggagtacgttgtaacaatctcgggccaaagaccttgagcctgtacttttttctttcttgtgccttgtgcctgtacagttttactcctttattcaatgaaattggcggctcgccaattcattaagaaaaaaaaagaaatcataagatggaaaacttaacttttccagattcttataaattggccatatctctaatcttctccaaatacaaccatagtctcgcttgttcataaatttgtttgctgttcagtgtagtggactttggagttcggagtaccgtagacactcccacaccagatacttcctttggttttagatatatattacgccgcagacttctaggcataatttgaacaacgcatcgtcttgctcaatagtacatgaatctgcttttgaatatcacatgaataaactaagctgcaagtgttgcaaatataaagttcaaaaaccaattctaaattaccattcttctagaacttgtaggtattaaaatgatacgatatgcaagtgtgctaaatatgaagttcacaaaatgcactcggaatgacagcatatcaatttgctccccggcccctagcgcgatatattctgttttgaacagcgcctaaccaaattccaaatattaattcccaattgaccagcgtataaactgaagtaaatgcctcgcatgctactccatgcggagtctgttggagtaccatgcgttgagaacttgagatgcatacgaattaaatccgttgaggtgcatgctgattggatggagggggtattaggccatccccaatccatgacactaacatagtttctataaactccacatcatcaaaaaactagtactagacactactctttcaatgcaaacatcactattccatacttaaattaaatgctacttatctcacatgatgtcttggatattgtgtagaaaccatgtctcatgcaagacatggtttccttctctttccttatttattcacttgccatattatttttcattctaggtggcagcttatttaatactatagacaccatcctaatcattaggttgggaatgaccttaacaacaaatgttgtgcaccaatcaattcattgagagattaaatcagttcaggtgcatgtgcacgccgagtcgatttggtttccttggtcttagcgtagagacgttagagcaactttaataatatactccatcagtttcatgttgcaagactttttttttctagtaaaactcttttaagtttgacaaggtttcttgaaaaatataatatttctaatacaaaataaacatattatcgaactatattcaatgatatatttaatgagactaatttagtgtcgtagatattactaaattgttctataaaagtcaaacttaaaaaagttttacttagaaaaaaaaataaaaacgacttatcatatgaaacaaagaaagtagctaactattgattattagtttatattaaagctaacatgtataataggttaaataaaatattagttttattttctcctctatctctttctctcatcatgaattgaatgtaaatattttggagcaagtttcactactggaaaaactatctttgatcagtcgaccaaattccacaatagtcccagttgcaataaaaactgggagtaaagataatctttagtcttggttcaaaaggttagagctactttttgatctttagtctctattggtgttaccaaccgagattaaagattattttcagtcccggttcaaaaaagataggcggtgtcagacccctttattatttttagtcctggttagtaacaccaaccgggaaaaaagatcggcatgggcggagaggacgaggcgtgcgcgtgagatcgaggaggaggtgcatggtaattaataagttctatctcctcctccctttatctcttcctcctctccaccccatctcctcatcttccttcttctctcctcattcaccccatctcttcctcttcctcatctcctcctcccctctcctccccattctcaggcggcctcgcggaggggacgatttggcggcgactgggcggcggcctcgcacggcggcggaggcggcctggcggcggcggcggcggtggcctcgtgtggagggccacgcccggctgtggccggtgcgacgacaggcggtggaggccggcgctgcggcgtgcattttttcttttctttcttttttccttaatgaatgattcgatctgtgttgaatgtgtgattcgatctgtgttgttgttgtgtgatatgtgttgaatatgtgattcgatctgtgttgttgtgaatgaactatgttgctgtgagtgatttgggatgactatattgctgtgaatgatttgagataatgggcgtgagatacacaaaatagaaaaaaaagaaaaaaactttagtcccggttatttgaaccgggactaaagatagcgatatttagtctcatattcttactcccgattggaaaatagagactatatggggttaccaaccggaactaaagatcgatctttattcccggttatttgaaccgggactaaagggggttaccaaccgggagtaaaaagcatttccccactattttttaatactatagttagctcttacatgagagctaatacttctcatttttctttatctctttctttcacataagtttagtatactccatcgatccgtttcatgttttaagtcttttttttctaatcaaacttttttaagtttgacaagttttcttgaaaaatataacagcatttctaatacaaaacaaacatattatcgaactatatatattcaatgttatatttaatgagactaatttagtgtcgtagatattgctaaattattctataaatttagtcaaagatgtttgatttaaaaaaatcaaaacggcttataatatatatcaaatggagggagcacccatatttgcagtggcttgtatccaattatccgtatattcatagtcaaatttgttatttttgttataatttgtagaagtcgaatttaaacttgcatgtttgtgagatgatatattacatattaacctataatgcatgtcaatttttttgaaaatttttcataaactatttagatgacatgcaagaaacgggtggacattcacccgagtgtttaaaacagtttcccccatacttaggcattttgtcatttactttcactgttccatacagtaccgtcgagaaaacatctcttcaggtgacaacccttttagatgggtatttcttgacctgcctctacccgagcacctgcaaaaatcaggtgtataagaaaacggcacgtaaaaaaaaactttacacgaccgaatatctagagcttccttcaaaaaagaatgtttttataggctatttcttaaggcagccacatgtgaaaataatttttgcatgcgctgttggaatattggaaaagaaaattcagttactatgcaacaatgcacccccatacacaaaaattagtagatttcttatccgcacacatacatatcatcacattacaaatttacaaccacattcacgtttactaaacattaacatacatagttttaataaaatcatacacattatccacatcaacattcacacttagatacaatatatatattgacatacaaagagttttaaaccatacaaattcaatctccacgactggctcgcatgagatatatagtataatttctatctttgctcgtagtaataaggttttcaccttacggcagcgcattaaacatactatcaatgattaattttacaagtaatattgagatgatataggataaggcaggataaagtcatattgatatatatgtttttttaagcaactttcgcatagaaactttttttaaaaaaacacattgttgagcaatttgaaacactagtaaagaacattccatctatgacagcctctaacatgcctgaaattagtgggctgtcacgaatgagtcatctgtgacgggccaaaatatcgtccgattgagatatgaccgcacagacatgttagacgggcataaaactcagacccgtcacggatgacacctatcagtgacgggccataatttagacccaattgagataacattacatatcttaattgagccccaagttggcgcccatcacagaattcaaatctatctattatattattaaaacagccttgaaaggaggcaccacgttcgctgtgagggctagaaattctcacattaatcggagaaaaagaaaaggagagtccaaatagaaatacagtttaaaaacagctgaaattcgaaattaaaaaaaaaagcaatatggaaagaagagtccgtataagaacctaatacgagattaatcaaaatatagaataaaaataaaataaaatctgaaattagaaaagaaaaggagagtacaagtaggaatacaatttaaaataactgaaattcggaattaaaaataaggaatattgagagaagagtccatataagaacccaatacaagattaattaatattcgaaataaaaataaaatctgaaattagcaaaaagaaaagaagagttcaagtaggaatacaatttaaaattaactaaaattcggaattaaaaataagcaatattgagagaagagtccatataagaacccaatacaagattaattaaaattcagaataaaaaataaaataatatccaaaattagaaaattaaaagagagttcaagtaggaatacaattttgaaacacatgaaattcaaaaataaaaaatattaaaatattaaaataaaaaaggtttttaaaaaataaattctgaaattataaaaagaaaaaagattttaattaggaatacaatttataaataactaaaattggtgataaaaaataaagactattgaaagaaaagaccatctaaaacatatgacgagataaattaagtaacaagcctataaagaagtagagtggtagcggttgatagtacatataaaaattgttaataaaacaccaaatagaatcttaatgacgattaaaaggagggacaacaggcatgccgtgaagcaaacgagcaaggtgattgccgggacttctagaaagtaaaaaaataaaccccatttataatcatatttgatttttaaaatctcaataataataaaaaggagaagccgccgatggttggcgggacctctagaaaataaaaaaaataaattccaacgatagttatattcgatttttagaatcacaatgacaataaagagtgggcggcatatgggccgtagaggagtataccggcatcgtttgacgggacttctaaaagttacaaaaaatgaaacccaaaaagaaaataaactctaaaaactacaaggtccaattaaggtccagaacttctaaaaagtaaaaaaaaacctaatgataatcatattcaattttaaaatctcaatgacaataaagaatggagacaacgggcgagccataaaggagtacaatggcaaagccgctaacggtttggtgggacttttagaaagtaaaaaatgaacctgaatgataattatgttcgatttttaaaatcccaacgataataaaagagaaaagacagtggacgggccgtagagaagtataatggcagcctttgacaggacttctagaaattataaaaatgaaactcagcgagacaataacctctaaaaactaagattcaatttttaaaggtttcaaagagaatgaataaaaatagtggtacatcgagcaagcaaataaagaagtatatgatagaagtaaggggtagcagctgttgtgacttttaaaaattatataattagaaatacgtggatgataatgtttggtttttcaaagtcttaagacaatgagatagatatttaataaattttaagtaaaatcataccgaaaaatattattttgttgctagccgcgcaattgcgtgggccacccagctagttatattattaaaacagctttgaaaggaggcaccacgttcgctgtggggctagaaattcccacattaatcggagaaaaagaaaaaaaagaaaaggagagtccaagtagaaatacgatttaaaaatagctgaaattcggaattaaaaataagcaatattgaaagaagttccatataagaacccaatacaagattaatcaaaattcgaaataaaaataaaataaaatccaaaattagaaaaggaaaggagagtctaagtaggaatacaatttaaaaatagctgaaattcgaaattaaaaataagaaatattaaaagaagagtccatataagaacccaatacgagattaattaaactcaaaataaaaataaaaataaatccgaaattagaaaaaagaaaataaaagaagagttcaagtaggaatacaatttaaaattagctgaaattcggaattaaaaataagcaatattgaaagaagaatccatataagaacccaatacaagattaattaaaattttgaaaaaaaataaaataatatccaaaattagaaaaactaaaagagagttcaagtagaaatacaattttgaaacaactgaaattgaaaataaaaaaaataaaaacattaaaagaacacaatacgttattaactaatttttttaaaaataaattatgaaatttgaaaaggaaaaataagatttcaattaggaatacaatttataaataattaaaatttgtgctaaaaataaagactattgaaagaaaataccatctaaaacacatgatgagataaaattaagtaacaggcctataaaggagtaaagtggtggcggttgatacgatatataaaaattgttaataaaaaaccaaatagaatactaatgacgattaaaaggagggacgtcaggcatgccgtaaagcaaacaagtaaggcggttgccgggacttctagaaagtaaaaaaaaaccccattgataatcatattcgatttttaaaatctcagtgacaataaaaaggagaaacagcgggcggagtgtacaagagtataattgcagagtcgccgacggttgatgggacttctagaaaataaaaaaatgaataccaacgatagttatgttcaatttttagaatcacagtgacaataagagtaggcagcagacaggctgtagaggggcatagtggcatcgtttgatgggacttctaaaaattataaaaaataaaactacaagtccaatttttaaaggttcagaacttttaaaaagtaaaaaaaacaatgataatcatgttcgattttaaaatctcaatgagaataaagaagggaggcagtgagcgagccgtagaggagtacaatggcaaagctgctgatggtttggcgggacttttagaaagtaaaaatgaacccaaatgataattatctttgatttttaaaatctcaatgacaataaagagaagagacagtggacaggccgtagagtagtataatgttaatgttcgacgggacatctagaaattataaaaacgaaacccaacgtgacaataaactctaaaaactataaaatccaatttttaaggttctaataagaatgaatagaaatagtaataaatcgagtaagcaaataaagaaggagatgacataagggatagtaactggtgtgacttttaaaaactatataattagaaacacgaggatgataaggtttggtctttcaaagtcttaagacaatgagatagctatttaataaattttaagtaaaatcatactaaaagaatatatgattttgtttgggtgctagctgcgcaattgcgcggaccaaccagctagttttgtacataatataaatatttttgaagtactaatcacatctatcacctcattcaatgagtaacggtataattatttttttctcaaccttaatttcaatttaaaactacaccatactttcacctcattcaatgagtaacggtataattatttttttctcaaccttaatttcaatttaaaactacaccatacttgctttgtttgttaacgtaaggagcagatgatgtggaagagataagcgagtgcacacttgaatgcaattgaccttcggttctatggatctctgtccatctccacgacacgtacacaattacacaaacggtcaccgcgactgcacgaagacattgccagaaatcatagagaatgaaatttagaacgtacgagggctttcggcttctgccatcatcagaaaagtttcttcgctgattgatcgccagaaatcgcatgcagtatagtgtgaagttaaagcagcatatatacaccaccaaacaaacaaagcaacgaatgattctagaacaaacggctgtgcagaggggcggaggcggtttcccgctgcgatgcttggcgaaaaaagtgtcacacgcgaggtgcctgaaagaaccaaatacccccctagctataagatggcttgaagtgcttccttacaaaaagattagttttgtcgatcaagctgaagcaaagcaacatgcttgagccatcagtcttagtatcagctgctgacagatagctcgagagtgtaccttatacgtacatctcactcgatcccagagagttccatgcatgcttgatagctataaatacctgccgcgacagcctagaaactgaaactacatatctactccattaattagcttattaccgtcaatcttgaataatttgagagcaacatttagctgccccaatggccggcgaagtggtggcaatacatgtcgacgtcggccatggcgtcccagatgaagcacaagcaagtaccaagatacagaaactggatggcagccacatcacccccattgcgcagggcaagatccacaggttccctcgaggcctgattgggatcggcggctcaaacgagcagcggtacatcgtgccgaccttcgtggccattggcccctaccaccatggcaagcctcacctgcacaagatggaggaggtcaagctcgcggcgatgaaccgcttcatcgcaaccgcgaacggcgcctctgccggtgatgtctccggcaagctcctctccgtcgtcggcgacgtgcgcggctgctacgccgacgacgagaagttgaagtgcttcagcgacgatgacttcgcggccatgatgctcgtcgacggctgcttcctcctgcagttcatgatggagaaaaggaagccgctgttcgagggccgcgcgctgtcgtcggagtacagcatcctcaaggacatgatgctgctcgagaaccaggtcccatggctggtgctcgacaccctcatggagttcctgcccatggagatggaggtggagcaaaatgtccgctgttttgtggccgacgtgggagacatgttcctccgcaataataaggaacacgaagtctcgttgacaacctcctgtttcagcgtattgttcgaggtcagtccacataaaagcagcttcctcaaggactacaagccggcgaacctcctcgacctcctccggtccagccaaatatttcgcatgccaacggaagagctctcggtacggctggtcggctcgtcgctgctgtccagcagcgccgtcgagctggcccagatcggcgtcaacctgacggcaagcacggcggagtggttcggggatatgagcgtcaaggagggccctgtctacggcgagctttccctgtcgccgatctttctcaacgacgtgagcgccggctggctcgtgaacatggcggccctggaggcgagcggcggcgccaccaccgcggatcagtcgtcctcgtcctcgtccgtgatgtgctcgttcctgtcggtggtggcgatgctgatggacagggaagaagacgtgcatcagctgcgggcgaagcaggtgctgtacagcacgctgagcaacgcgcagacgctggacttcttcaagcggatcagccagcacctcggcttcggccaccgctacttctacatcttgcaacagatcaacaagttcaagcaaggcaggccggtgaggtccgccgtccacaagttcctgtacaagcacataagggccatcagcatcatcttgtccatcgccagcgtgctcgttggcatcttcaaagcactcagggagctatagtaattaagctttcttagttaagcgttgttactttctccaacaaacaaaaaatatataatttgatttaatcgtttggacacttatacaaagccgtttttgagtaaattgtccacgaatattcttttagtactactatttatgttaataaatctttaattggttttgcttaaagaacatccgacatttttttggggtgactttcgattttcatacgcggtgctccttacctgctgagctattagcaatttcggtaagttacaagcaaattagtatatattagttgctaatcaatggagtgccgggtccacgcttccctcaccggaagggtctttggcaagaagatcctctatttcccatactcttcattctagtcatggatgtgctcaatgcgatgctccgcaaaacctccgactcaggcgggttccttttgctcaacgatcgtgccttgcgacaccgcgcgcctccctctatgcggatgatttggttctcttcctctccccggttcgacaggatcttaagttcatctagggcatcctctttgtctttggtgcagcgtccaggctatgcaccaactttgtcaaatgctcgattactctgatccgttgttcggttgaggacttggagttggttcagtcatgctttccctacgcgatttctgactttccttgtacctacctcagcattctgctgttcgtttgcatgttgccgaagacggccctgcaaccacttgtggataaaggggctatttggttgatgccctgagaagaacttgccctagtgaagacaagcctgaggctagcttgaaccttgtttggttgctatcctgagatcaactaccccttgcctagcctgattccttctgacttgcggttagcctgagccaggcgacccattttggtcgcctgaactccaggccgcaacagccaccgataattagcgctgctaatccgtcctgctgccctgcgcagccgagtagccgacaccccagatgccgcaccaaccccttgcccaatcctccgttcaactgttgctgctcgaagcttcgatgtcaactagatgcaagcgatacttgtgatcatcgtgcaattggatggactgctagtgtatatagatgagagattactgttgtaaaatgaatatgtattatatttttacgctttgttcacataataaacgtcattcaatggttgtgttttgagctcaggcacgcttgacctcaggcctgcaaccaaacagagtaatcttaggcttgcctgatcaagccgaacgcatcaagatttcagggatatttcaggcagcacttttcttcaggcatgtagctgagggcaccaaccaaacaagcccaaagtatcccattgtcttccaccctggaagggacgactcaccactctggctggccactctatgttggtttagtatgttctctcctctattccagtccatgtgtctatgacgatcggtcttccagtctaggtcattaaggccattgacaagaagcgtcgcaccttcttatggaagggttcagactcggctcataggagtagtgccaggtgtcctggacgaatgtctgtcatcccaaagctttcggagggttggaaattcctgaccttaggatggcacggtttgccctgcgtgtttgttggctttggcttcaacgctcatgacatccttactgcgatgtcctgaaggccctagtcgagcagaccgtctctaacatgttcgaggcatccacctacttcgtatagggcgatagtgagtcgatgctcttctggtctgaccaatggatcggcgtctgctcggtggcctccttggctccagatctcctcttcgttgtgcctgatcagcgcctccgaggttcgtgcccggttgcttctggcttggcaaacaattcctgggtttctgatatccgcggtgccctcactatcctggtcatctcccagtttcttcttgtttgggatgtggtgcttcacattcagctctcgccgggtgtcgggaatcgtcttatttggcgttggatgagtgaccagcgctactcgacacgttcggcataccaggcgtttttctatggccagcacacttttgcctgtgttgttcttcactggcacgcgaatgatcctgctaaatgcaagttcttcctctagtttgcattttagcagcactgctagatggccgatttcctccagaagcgtggtattgatagccactcggcctgtcccttttgcacttaggagctttgagttggcgaaccacattctccttgactgcatgtttgctcgataggtatggctctgtgtgctgtcgccttctgatcgggctgccctctctcctcctcgtggcagctggcttcaggactggtggccttcttctagggtatgtttacctgagcatctctgtgccggcttcgactccatggtcctcctagtatcttggcaactttggaaggaacagaactccaggattttcgactctatgctctcttttctgtctcaatggttctagagtccatcctcactaagggccatctatggtcgttagctagcgttgcttgttttggggttttcttggagggtagtatggctctgccccattcccgctgattggagttgtgtttagccgtcatagtagtctcttccttttttcctttgttttttttcttgttttgtcttttctcccttcccttggcataagctggtcagactgattgtgttgtgtaaacaaacactcttttcttctaatatattgatgtgcactacttttatgcatgcgcaaaaaaacatattagttgcattataactatagtacaattatggcccgcgcaataccatggctagcaccattacaaaaattatctaatttgtttacacctgattatcatcttattgtcttaggatttcaaattttattttttattctgaattttaattaatcttatattgcgttttatatggatttttctttcgacgttccttatttttattctgaaattcagttactttaaaattgtatttctgcttgaacttttttctctgtctccaattaatggtatttatagcctcaacaggaaatgtgatgtctccttttaagattgtttaataatatgatagatcattttagatttatagatacaccaatttttaatagtgatcaaattggtatcttgctaacttaatttcatggatgacaagtggttagtatttactatggagggaaatatgtattatttttagcctataatctcgcgaggtgtgcacgcatacagggcatccgatctacacatccatgtatggggcatcctgatctgcacaggagcagtgttgttatcatctaggaggctcgaacctgtatagggatatgtagcattgttcctaagcagctccaagcacgccaaagcatcttaattagagccccagacgtatatgagggctcgaccgggaatagtgtcggagccctccacttcttgtacgctagctgctatataccattataccaccgtcgtcatcacataaggatgctggcgacgggcaccggccggccacaacgtctgcagagtagtggccgccatcatcaattaatactacacttctccgcctcatctccgtataggttttcctgcactaataattctcgctctgcttgacatgagacttcttgtaacgtgtaagagacctcaggcatgcgtaggcaaaagtgcagggcatatgtgatagaaaatcagacagaatgaaggaacgtataatagctttagcctttagccatcatcacaaaagtttcttaggctctatttgttcataggactaatctctattttaagtcccttttagaccttaagaattcaaacatggatgactaaaaaggaatacaagtacatattagaactagaatccattagtccctcttgaaagtacttatagggtctctcttttctctccctaaaatggcagcctctctcttctctctcctttgatccacgtgcctttagtctatcttagtccctagatccaaataataggggactaaagtttttaatctagggactaaatgatccaaacatggccttagttgatcgatctccagatatcgcattcagtagtttgaaattaaagcacaatatatgcaccaaacagaaaaaaaaaaaagcaacgaattgaatgactacagaactaaagtttgcaatgctgcatgttgcttcgccaaaaaaaaagtgtcacatggtgcctaaaaagaaccagataccccctagaagatgacttgaagtgcttgcttacataaagattagtagtatcgtggatcaagctcaggcaaagcaacatgcttgagccattaatctaagtatctgactgacagctcgactgtaccttatacgtacatttcactgcacttgcatgcgtgctccctataaatacctgccgcgcgcgacagcccggccggaaactgaaactttgttatcctcaaacttgatttcttagtgagcaatatatagttagctagccaccgccatggctgacggtgaagcagtggcaatatatatcgacgtcccaggtgaagcacacaagccactttgaaggatatgaaagagaggatgaccaagaatacacggttgctggagggcagccagccacggcgccgccattgcgcagggaaagatccaccggttccctcgaggcctgcgagggatcggcggctccgacgagcggtacatcgcgccgaccgtcgtggccattggcccctaccgccacggcgagccgcctcacctgcaggacatggagaaggccaagctcgcggcggcgaaccacttcttcgcggcctctgtggaagatgtctacggcaagctcctctccgtcgtgggcaaggcgcgtgactgctacgacgacgacgacaaggtcaggcacttcagcgacggcgagttcgccgtcacgacggctgcttcctcctgcactacttgagccggggcagcgcggtcgcgtccgaccacaccatcctcaaggacgtgatgctgctcgagaaccagatcccatggctggtgctcgacaccctcatggagatggagttcctcaatgtggacgtgcgcaatttcgtcgccggattgggagacaaattcttccccaagaacggagacaaagctggcaggtggtggtccgtcgtctgggcgacaggccagcgtggaaacatcacgaagcttaaaagagacatcaatggcgggcagagttatgaaagctaccggccagctcatctcctcgttctcctccggttcagccagatatggcggatgcccgaacgagagatcaactacgtggcggccaacacatcgttgctgtccagcagcgccgtcgagctggcccagatcggcgtcaacctgacggccagcacggcggtgtggttcgcggacatgagatgatgagatgagactagtcagggagaagcgcatcttcggcgagttcctgctgtcgccggtgttcctgaacgacgtgaccgcctgctggctggtgaacatggcggcgctggaggcgacgagcagcggagcagcggcgtcgtacgtctacggcgactttgtggtgagctcgtacctgtcggcgctggcgatgctgatggacagggaggaggacgtgcagcagctgcgggggcatcgcgtggtgctcagcaccttcagcaacacgcagacgctggacttgttcaagcgcatcggccagcatctcagcttgggcagccgctacttcgtcgtcttggagcagatcgaggcgtaccggcggaaccggccggcaaggaccatggtctacaagttcctctacaagcacatcaaggccatcagcgtcatcttgtccatcgtcagcgtgttcgtcggcatcttcaaggcacttaggggacgctagccaatgccaaccaggcgagtttttttttttgaaaaataaataaaggaataataatctagcctctctacacccagattggtagtagatattaattggtagtactggatatatagacaagaacaattaacatatcctgcagtcgaattatattaactactttgattagtattttggctttaatactccctccgtttgttaagagcaaagataatagtagagctcacttcctactattagcccatatatataatagattagggagaggattctagtccctcgaggggtcctcgtatacctttttctttcaaattcgatgtaaatagttgtgaaaaattctgaaacaaataataatgtaaagtataatgatacctactagttcaccaaaatttaagttcaaattcgatctatacacatcgagaaacaaaaaaggcaaatttagatataacagtatgctactattcatacgctgaatttgtcttttttatatctcgacgtgtgagttgagtttggacttaagattttgtggagttgtatatatgtgttgtataaatgttgtcaaatttttctagaatttttcataactgcttagatagtttttaagcaaacgagggaacatcccctcgagggattagaatagtttcccaatagattagctataagattggctacaaatttcttctcctctctctatctctcacttatatatttaatatatttgtcttggagcttgcgataaactagctcttgcatgagagccaataccgttgatttttaattacctctcttctccatgtaagtttatattaggcttatagctcaggtgctcactattatacttgctctaatacttgaaattttgactttgcactgttttatttgacaatttctatttcattcaatgtcctagatgtattgtttatgacaatatttttgaaacgatggtcaaagtggcagctagttgactttcaaggataggaagtgatttatattgatggaggacaagattttgaataataagtttagacttctcagccttttgaaggtttatctgttaataatcagtttatgataatcatcggcgctggcgatgctgatgatctgatggacagcgaggaggatgtgcagcagctgcgagtgcgtcgcgtggtgctcagcaccttcagcaacttgcagaaagacgctgttcttcctcaagagcatcagccatcacctccgcttcggcagccactacctcttcgtacgtcttggagcggatcgaggagtaaccggcgccggaatcgcccggtgatagccgcctttcataagtttgtctacaacaactacaggtatttgggcgccctatcgtccctcgccaacatcgccaccagcccaccaccattatcaaactttaaaaaaaactaggaagatagtccgtgcattgcgcgggcatgtattttagattgcgttcgaaaaacttatatagatcgaatttcaactcaatgacattgccatgtttcataagtactatttctccataattttacttcatcggtattgcttagataatttttccaaactatttgttagcttttaaaatatataatatttaattcattcgtacaaacaattatctatgatccatataaacatctctcatatttcaaaagtatctatttagtttgtttggaaaaaaacatatctaacgaattaaacgtaaattaaaagtaaaatattttgtcttgtttaattgaatgtttattggctttttttaacaaatcctaaagcactattattgttattgttagtaaacagttttgaggctgcgttcggtaggacatcttcccaactcctcctcctcgttttccacgcgcacgcttttcaaactgttaaacggtgagttttttgcaaaagtttctatacgaaagttgctttaaaaaatcatattaatccattttttaaaaaaatagctaaaacttaattaatcacgcgctaaacgctgcttcattttgtgtgccgggaagtgaaggttcccaaccctcactcccgaacatagccttagttggtttatattcatgcaagttgttacatatttacatataagttaacaaagacatatcgtagattatcgcttccttgtaatacgtttgacctatagtatcttttttaaaagaaaatatagttaacatgagtttgaaaaattaaatttaatagtaataaatataatttttcaactaacaatatctatactgctaccatagcgtggcttaatagcctgacaaactcataatactatggtataggatagatgcaaggccattaacatgtaagtatttaaaaaatattataaaaatagaacatgtaatgggctgtctaattttagtgaaaggtacgaacttatttgattttctccaaatagttcaatttagtccctattggtattttatattttaaattttattttataccagttaaaactatagaggatatgaacctttaaattgttgatttaattatgaatagagcaatagttagattagaaatcagatgaacagctaaaaaaattgcatgttttaatattattgattatttctcactataaaaaggaggggtaaaggagagagtggagaactcaagctgagacaggaggggaggaggggacatgggtagtgttgtgttgtgcacatgtgaggggagggcgaagtgggggggccttttttttctaatgatttaagtgaaaatcgatgatccgcttttttttgtcaaaatttttaatatcctttgcgtctaaattttaaggcgtaacacatggcagcttaagattttctctaatattatatctattggttaaaataatggatccacctattaagtgaaaactgatggtcaaatgtcttttcttacaatttctaaggtcttacttttaattaagatgtagcacgtaagttacgtaccactgtaaatgcgctacagaggatgaacaatgattgaggtgatgtaatacttattgtcattttttttataatgctctattttttttttctatttggttacctgcaaaggataggtgtgtatgcttaaatggtatattttcatttttacgaagtgaaatatgagtaatatgcatcttgaattatttatttaattataaacaaaataacagttcaaataaactaaaaaacagatatgacataagaatcataattatttagctttgtaattattgatcattttttattattttggccagtgtatatttttcgcgtcaacatatggacgccggcacctgggagtctagccacttgaggcagccgcggtcctggcgcagcaggctgctcgatgacggcgccatcggcgagagcttgtggagcaagccgacgtcgaacaccgggacgtcgaggcctcgccgcagtgccgcgagttcgtcgtgctcgagcgaatcgaaggtgttgaggattagccctgacgacgtcctcgccaccgcgacggcctgggatactagctaagcatgagcaccgcgtttagtgctctgggacgagaaagaggacgataccgtcgcgggcgttgggagaacgggataccggtatctagctttctcgattcacaaggcctatcaagcaacacaacttccaatccaaatccctaagatccacagggcctcgtacccccggcgtgcgcgaggcgagattaactcgcgcgcgagatcagcagtacgggtagcgtttctcgcttttcttttatgttttcttcttgcttttatttttttttagaaaaataactgcccgcacatcttcttccttttatttaggacacggaaaattaggattggtacggaaatttaactacaacaaacttttaaattcaggatttaaaactttcaacttatgtttgaaaacttgtaagccaagatttgaaactttcaactcaatattttttaaaattttcatctcagattttaaaattctcaagtgaagacctaaaaacttttaattcagatttgaaaactttcaactcggatttgaaaactttctgttcagtcttgaaaagtttcagttcggatttgaaagttttcaaatcaaaatttgaaacttttcaactaaaatctaaaaaaattcaagtcaatatttgaaaacttttaacttaaatttgtaaacttttgtctcaaaattcaaaatattcaatttaaatttgaatttcgtctcaaaattcaaaacactcaacttaaattttaaaaaaaaattaactcaaattcaaaactctcaagtgaaattggtgaaagattcaatttattatattattaaaacatccatgaaagaaggcaccacgtttgctgtgggggctagaaattcccacattaatcggagaaaaagaaaagaagagtgcaagtagaagtacaattaaaaatagctgaaattcggaatcaaaagtaagcaatattgaaagaggagtacatataggaacccaatacgtgattaattaaaattcagaataaaaataaaataaatttcgaaattataaaaagaaaaaacaggagttcgagtatgaatacaatttaaaaataactgaaattcggaattaaaaataaggaatattgaaagcagagtccatacaataatccaatacgagattaattaaaattcgaaataaaaaaaattaaaaaatcaaaattagaaaaaagaaaaggaaataagagttcaagtagaaatacaatttaaaattaatttaaattctgaattaaatataagcagtattgaaaataaaagtacatataagaacccaatagtagaataattaaaattcaaaataaataataaataaaatccgaaattaggatgattgaaaagagagttaaagtaggaatacaatttagaaataactgtaattcggaattaaaaataaggaatattgagagaaaagtccatataagaacccaatacgagattaattaatattcggaataaaataaaaaataaaattcaaaattagcaaaaataaaaaagaaaagttcaagtaggaataaaatttaaaattaactaaaatttggaattaaaaataaacaatattgaaagaagaattcatataaaaacccattacgagatttattaaaattcagaataaaaaataaaataatatcaaaaattattagataggaatacaattttgaaattcaaaaataaaaaaatatttaaagaacattataaggtattaattaaaatttgggggaaaaaatctgaaattagaaaagaaaaaagatttcagttaggaatacaatttataaataactaaaattggtgataaaaactattgaaagaaacacatgacgagataaattaagtaataggcctataaaggagtagagtggtggcggttgatacgacatataaaaattgttaataaaacaccaaatataatcctaatgacgattaaaaggagggacgacacacaggccatgaagcaaacggacaaggtggttgccgggacttctagaaagtaaaaaaaaacctcattgataatcatattcgatttttaaaatctcaatgataataaaaaggaaaagcagcgggcgggcgtataggagtaagttgtagagccgccgacggttggcgggacttctagaaaataaaaaatgaattccaacgatagttatgttcgatttttagaatcccgataacaacaaagagtaggcgacggatgagccgtagaggagtatagtggcatcgtttgacaggacttctaaaaattataaaaaatgaaacccaacaagacaataaactctaaaaactacaaggtccaatttttaaaggttcgaaacttctaaaaagtaaaaaaaacaatgataatcatgttcgattttaaaatattaatgacgataaagaagggaggtagcgggtgagccataaaggagtacatagcaaagctgctgatggtttggcgggacttgatgcaaacccgctagggtttgtggcctgatctttcgatgagaggtaagggataactcgattagatgaagtcgacgttcacggcccgactacaactatccaaagacgctgcgccttagcaaccgatacaccgtctccaatggtcgccacgaacttgtggtgcgcgtcaacccggccacgagggcactcgtcctgcaagcaatcgaagaacaagcaagaacaagtaggacaagcactgaaattgctagataaagatgaaagtttcactatcaaacacaatatggtggggttccgattacaggcagacgggcggtttagccaacacgcgcgctgcgagccggtagcaagaagctatctctatcatcaaaacccgcctgttcttggcggcgactagaggtataaaaagaggggaagaacgaccatagggtcgtgctccaaccctaggacgcgcccctaatgggcccaacatggatacacagcccattgggccaaaagaggtgacgcagcaccatggacagaaaatagtcgggagtaaaatgataattgcgcccgctccagaacagatatggacatgtggctggatccattcgaaagtagacttgataagctttccatgaagtacttgcacgcccaaatcggagttcgcatgaagtcgtggcggccgtcagaagttggcgctgccctgcagtccgaatccaccccgcgcgaatcctcttccctttggatcctctccatcgttcctgagtaaaacacgagtgcacgcgtctccgaggtataaagacgaggaatatgaactcaagaaagaactcacctgataatttagttgacgtgcacgagcgcgggtaataggaccatcatgctgtatatggggggacgtggatgtatcgatggtgttgatgtcctcatcatcctccccttcttgcatttgagtcgtcctcgactcaagctcatcttcttctcccaaatacggcttcaaatctgcaacgttaaatgtgggactaaccctgaaatctgcaggcaaatcaatcttatatgcattctcattaatctttgctaacactttaaatggtccatcagctctaggcatcaatttagactttctcaaatcaggaaatcgttcttttcgcaaatgcaaccaaaccaaatctccaggttcaaaattcaattcccttctacctttgtcaccagcaaacttatacttagcattcatgcgctctatgttttctttagttgtctcatgcagttttaacatcaactcagcacgttgcttagcatcaaaattcagtttttcagaagatggtaaaggcatcaaatcaattggagcacgaggcaacaaaccatacacaatctgaaatgggcacatttttgtagtagaatgcaaggaacgattataagcaaattcaatatgaggcaagcattcttcccacatcttgatatttttcttcaaaacagccctaagcatagtagacaaggttctattcaccacttcagtttgtccatcagtttgggaatgacaagtagtagaaaacaaaagtttagtccccaatttagcccacaaagttctccaaaaatggctaagaaagtttgtgtcacgatcagaaacaattgtgtttggcacaccatgcaagcgaacaatttctcgaaagaacaaatcagcgatatgagaagcatcatcagttttatgacatggtatgaaatgtgccattttagaaaatctatccacaaccacaaaaatgctatcacgccccctcttggtcctaggcaatcctaacacaaaatccattgaaatatcttcccaaggaacagtaggaacaggaagaggcatatacaaaccatgtggatgtaagcgtgacttagccttttgacatgtagcgcaacgagcaacgaacctgccaacatctcttcgcatctgtggccaaaagaaatgactagcaaggatgtcatgtgtcggtgacatgggaccgggagtatcatgactagaggcttgggcaggagcaatcacccatgaggcctgaccccctcgggggggtcgggcccgagggtgatgtggccgcccccctcttagtctccccgaggggtcggaccgctcccgtttcggccccgagggttgaggcgccccaaccccttgggggttttgtgccgcgtgtatgggttaggtgagcgcagcggggctcacctaaccgcatttattgcggtttggacgagcgcgtcatgccgcatgtaacgcagtgcagcacgctcgtttatccggtctgtgaccagtcacagaccgaacagatcgtgggttaggtggcaacaggcggtctgacgcacgcctcgccccatcccgtcaggatgagagcctctaagcactcgtccctagccggtgccggcgtgttagctcctggagatggcacgttggtcccggtcagatgtatgccaggcttcatcctaaccattacaagcaaaatattgtatgaagaagggcgaacatgcagattgctaaactgacacgtggtggacaagaatgaccgatttgtgaccggtctgacactggtcatgtcgtcagcagacagccatgttcccacgtcgcgcctgcttccggcggaagtggaggtaggtatgggccatcccatcagaaggtcattcggacggcaaccatacaaagctccgtccatttatgaagagaaggcaagtcaagtttgagaaaagggaggataagtccccacacaaaagagagagatggtgcatgtggtatccccttggtataaaaggaggaccttgcccacttagaagggggattgatgggagattcagcaggagagaggctgggatgcgacccctagcgaagaggatcagccccaccggaaggtgcagcggcccgtctactttgttagtgaggccctccgggacgccaagacccgataccttgaggaaactgcgccattatttccaggcgcatcgggtcacggtggttacgtcttaccccctcggccaaatcttgcataatcgagagggtacaggacgggtggtgaaatgggcaattgaactttctgagttcgatttgcactttgaaccacgccacgctatcaagagccaggccctcgccgactttgtggcagagtggaccccagctcccgagcccgtctccattcccgaggccagctcgggcccctcgcagccgccgcacaccgcctactgggtaatgcagttcgacggctccctgtctcttcagggcgccggtgcgggggtcacgttgacctcgccaagcggagacgtcctcagatacctggtacgccttgactttcgggcgaccaataatatggcagagtacgagggactccttgcgggactcagggtggcagctggactggggatccgccgcctcttggtgttaggcgactcccagctggtcgttaaccaggtctgtaaggaataccggtgctctgacccgcagatggacgcttacgtgcgccaggtacggcgtatggagcgccattttgacgggatagagcttcggcacgtgcccagacgggataacacgattgccgacgaactctcacggctcgcttcctcgcgagcccagtccccaccgggcgcctttgaagaaaggcttgcccagccgtcggcgcgacccgaccccataggggagacggacgcgcctgaccggcccccgaggcccgtcggagtccaggcctcgggacccgaggggagcgctcccagctcccttagattgattgcttggatcgctgagatccaagcatacctcacagataagactctacccgaggaccgcgaagggagtgaacgcgtccagcgcatctccaaacgctacgtgctggtagaagggaccctctatcgacgcgcggctaacggaatcctcctgaagtgcattcctcgggaacaaggcgtcgagcttcttgccgatatccatgaaggcgaatgcggagcccactccgcctcgcgcaccttggttggcaaagcctttcgtcaaggtttctattggccgacagctctcaatgatgcggtcgacctggtccggcgatgcagagcgtgtcaattccacgccaagcaaatccatcagccggcccaggccctgcagatcataccactttcatggccatttgctgtctgggggctcgatatcctgggaccgtttaggcgggccccgggcggatttgagtatctgtatgtcgcgatcgacaagttcactaagtggcccgaggcttatccggtcgtcaagatcgataagcactccgcacttaaattcattaagggcatcacagcccggtttggagtgcctaaccgtattattacggataacggcacccaattcactagtgaacttttcggcgattactgcgaagacatgggcatcaagctctgcttcgcctcacctgcccaccccagaagcaatggccaagtggagcgcgccaatgcggaaatccttagaggccttaaaaccaagaccttcaacatcctcaagaagcacggcgattcgtgggtcgaggagttgccagcggtgctctgggcgaaccgaaccacaccaagccgagcaaccggggaaacgcctttcttcctcgtctacggcgcggaagcggttctcccatccgagctcaccctgaggtcccctcgggccaccatgtactgcgaggctgatcaagatcagcgtcgcagagatgacctcgactacttggaggagcgaagcggcgcgcggccctccgagccgcgcgctaccagcagagcctgcggcgctaccatcagcgccacgtccgggcccgatcactctgcgtcgacgacctcgtcctacgccgcgtccaaacgcgtgctggattgagcaagctctcaccgatgtgggagggtccgtatcgagtgatcggcgtcccccggctgggctccgttcgactggccacgggcgacggcacagagctgcctaacccgtggaacatcgaacaccttcgtcgcttctacccctaagggggatcgggtgtcaggtttcgggctcgggccaaccccgcacccccctcgggcgtgcagggttggccgggggctaccacatatgcatatttttatttcttttatatctgtatttcaataaaagcattttcaatttcctaaaagttgtatctgtgctgttatttccttttgaagaatcttgacttgaaataggtcgcttgtgctcaatcctgccctcgggggctcgggccggctaaaatcgccaaacggggcccagaaccgagccgtgccccggggcgtggtgaactccgggggggaatcggcaaaaacccacaatcgggtcacccataaccctcggtcaccacgctcccggcctggccagtctcgacatgtggatctccccaggcactagccccgacccgagccgtttgaggactgggacctgggcacgagtccttgatcaagccaagacacaaaaggactgtggcacagaccatcctcgtctcatacacacaacaaatagaattgacacaaaaaatttcctctttatttgattgcagattaaattagtctatacaagaagggggcccgaaggcctcggaagaagaaagaagaaactatttagagattggcgggggcctgggggctcactccgatgcacccgggttgccagcctcgtcgccactgtcgcccactccgccgtcatcgtcctcctcgtcggagttgagggcgaacgcgagccgaggggccgaaccctcgaagctgtggacgatgtggtcggcggcgtcccggacctgcgcgcgcgcatcgtcctcggttccgggagggaactcgtctagcgccgcccatggggagaagtccgggtctctggcctggtagctcgccagtacaagctccactgccccccgggcgaggtctctagaggatgacttaatcgtcctctcgagctcctcgaggagccgttgaagagtctcggctatctccgagaggcgctgggcgaggcccccctggttggcggcgtacttcgcgatccgcccaccccagaggcccgcctgccggccggcgcggtctagacgggagacggcgtcccgaagcatgccgggccctacctcgcctgccaagcggagggcctcgacctccccggcggacgagtctagcgcgccctgcagatcggcgatggtgtgttcggcagctgcgaggcgggcggctaagtcgctttcgcccgcggccgccccgccgctgcgcgccctcgcgtccagctcctttgcctgcgcctcgagttcagtgacccgctggttcagtgcggccctctcggcgcggacgccttccagattacggcgcgcctactcctcccgcgctgcctcgcggagggacagactgtccgccagccgttgcgccgcggcctcggcctcctcgagagctcgctcccgctcggtgagcgcgtcctcgcggaggcggagtgtggactcctcttcggcgcaggcggcctcgtgcgccgccagcgttgcctcccggatggagacggcggcctcgcggtccgcaaggtccctctccacgacgcaggcacgctcttccagcgccatggcacgggcctcaagggcttcttcgcgccgccgggatgccacctcggtctccgtcgcccgccgttctcgggcagcggcagcgtcaaggaccccccgggcggcgtcgagcttcttccctagctccgcctcccagctcccgtattgaaggcggagggtgtcctgcgcctcgttcatcacggtagtggcgatgagggcagccccccgctcctcctccacctccttggcgatctcccctagcaccttccgacgggcttcgagctctgagacgtgccggcggtgtgccttgcggcccacctccaccatggcctccaccgagcgtcgcccctcttcgacacgcgcccatgcggcatcgagctccgcccgctctgctttcagggcctccacctgggcacttaacccgtccaacaccgtggtgtttgcgacggccaaggcctgcagaaggggttctgcgctcagtggggcaacggaaggtgtggggaagagccgccttggagaggatgccgcgcggctcagcccgccgatggacgtgccggactcggggatgtcacccggacctggttggtcctgagcgtcgcacgagggagtgggcccaagcgatgcgcccgcggcctcgtcgcgagctgcctcggaagtcgtcgtcgcctcggccgaccgaagtctggcctcctcccgagcggcttcttcagcttggcgagcttggacggccacctgggcagcttcctcggtttcccgaaggcgatccgcagcctcttgccggtcagtttcacgggtcgcctcggaagatgtcgtcgcctcggcctggtggagtccggcctcctcccgagcggcttcctcggtctggcgagcccgggcggtctcccgagcggcctcctcggcttcccgaaggcgatccgcggcttctcgccggtcagattcccgcctccgggcctctgcggccgccgaatcctcggcctcagactggccggacttggaatggcgggaggaacgcgatgggatctcgctgaaacagaagaaagaccagaagacaaacaaaatgggtgagtggaaactcgcgttgagagaatgaatacagccacgatgggtgtgggacgaacctgcgagggggtcggttaaacgaccaccttggaggggaaataaggtttccccgggatggttctgtcccccccatcttgcggagccgtttcttcttccgctccccctcgggctgcgacgtcggcgtggccccctccaggtgcctgctgctggcacgcgccgccccgccccctcggggaggagatgggggaggggttccttcctgcttcctcttcccccgggcgtcggcagggcggctgctccccgggcccccgtcgcggggcccagaagcacgaccccctcctggggtagattgttcccccctgtggctcccgcccgtgccattgtggcctcgaggagcccgctcctccgacgccccgaccgcctgcatgatggtcaggatggaggcgcggtctggatcgctgcagagggggaggactccttggggaataagggatgcctccacggagctgagattcagcaccctttggaccactatcttgaagtcctcaggagcccagtcccatctgactccctgatgggtcctcatgtagtcttcagacccggtgtactcccaggcgccccgggcgcgccgctggagcggcgcaatccggcgacgaaggtagtcgtcgtacaccatggcccctgtgagcccctgggatcgcaggcccgccaggcggtcgaggacggcgtcatagccatctcccagatctaccggcgcccgccagtaggaggcctgcgccgggggctggctcggaagttggaggcgcgcttcgtcggcaaggggggtgtagaaccagtcgctcttccagtcatcccacttcttgcggaggacgcaggggatgtagcggttcagcaccggcccccgcggctggaagtagcagccaccaaccaccgacggcggcgacaccgactgtacggtgaagaaccaccggaacagccgaagggatgggcgcaccccgatgaacatctcgcacaggtgcgcgaagatggccaatgtcattaccgcgttgggggtgaggtgcgccatctggagatcgtaaaactccagaacatccatgaagaaagaagaaaatggcggaaccagccctgccattgcaaaagggaggaagaagacggaccgccccgggtagcatggcgccgggcgtccctcacccagcgtgactatctcccggccggtggcagattccggcatgaagcggcgcggcagcccggcctgcctctcgctcacgatgcgggaaggcggcagcacgctaccatcaagcagagtggagccccgtgccatgacgccggaggaagagatgtttgaaagcgagcgcgtgtggcgaaggtagggcacaggaaacaaggagttagggtgcaagcggcgaagacaaggggaataatggtgagaggaaggaagcaaatctcttcctcggagtctttatacccttgccaacgttgtgcccggctcctcgcttctcgcgcccactatatcgctccctcgtttctcgcgcccacgcttccactaatcccattcgcccgcttgcggcgcatgaggtggatatgcggctgtggcagtcgagatggaacatatcgtgcgcgcgttaattacgctcgccaatcgaagcgccatcaccatatctccaggcaaaacgaaccggctcgtcccgattcgcgtgctactcgagtaatgtggcagtcttgaagagaccgctcattattgacagtcgagttaccattgccgatgtgcgtgattggcgaccgttgggtttctgcccaactatggagaccggtcccacctgtcaccaggccttagggagtggcgtcacgcccgaccgcttccctcgaggagggcgatcgccctagcataacgccgggggctactgtcggtgacatgggaccgggagtatcatgactagaggcttgggcaggagcaatcacccatgaggcctgaccccctctggagggtcgggcccgagggtgatgtggccgcccccctcttagtctccccgaggggtcggaccgctcccgtttcggccccgagggttgaggcgccccgaccccttgggagttttgtgccgcgtgtatgggttaggtgagcgcagcggggctcacctaaccgcatttattgaggttcg

SEQ ID NO: 5786 - DNA, 3430 bp, Oryza sativa
gcctgcaggtcgactctagaggatccccagcgcatattaatttgtagcttcagttgctttggaatttggtaggaggtttctgcattttatatagagctcggatggtggggattaatttgtgatgccccttacgttcgagaggcccttttaaaattttctatttcctcgtttttcatgcgcccattaagactcatagtactaaatagtaagtgtgctttctcaaaataattataaaaaatattctgaaaaattatagtattaatttattttaaagttattttaactaataattaattaacctcagtccctggcagcttgggacatggtatgcaaacccaagaataaaggaggagttctgggagtcattgaccttgaataccaaaacattactcttctaatgaaacatcttgacaaattcttcaacaagcacgagctcctatgggtaaagcttatctggaccaaatattatctcaacgctgacctgccccctcatgcttgcaaagaaacagggtccttttgatggaaagatattttcagactaattcctatgttcagagcaatcacgacaataacaattcaaagtggagacacggctcttttctagaaagataactggaattggacaggcaactccttggaacaacaatttgccactcttttctcctttgttgcaaaagaagatatctcagtctttggttttctatcagaacaaaatttagaaaacctgctacacacacctttatctacccaagcaatgcaggaggggcaaacaatccagtccaatctcaattgggtttcccttaatagctcagaagacacttggacatacaaatggaacagtcccctttatcggacgaaagtggtttactccctgttctttgctcatatcacacctgatctgcctctctctctcattaggaagagcaagtgtaccctgaagctaaaggtgtttttaggctacttcttgtggatcgtctcaacacaaaggaacttctttacaggaaaaatctatttgtcagcactgggcccaactgtgttctatgccctctatcaatcattgaagatttcaaacatctcttcttcacttgcccctttgccatcaattgctagaactatcttggaatcaactggctcacaaaccaggacttcatgatcatgataatctctgcatgaagaagtttcggccacccctttttttatagaaaccattgttgtggatctttggaatatttggaaaagaagcaatgatttcatttacagcagctgtcagccttctttccacacttggaaatctctttttagagaagattttactctacttttgcatagagtaaaagctcaggaccgacccttctgactgttttcccgtaaaaaaaaagaaaaagagttaaaaccttgtgttagaacacaacctaaagttgtaatgttgtggcatctccgtaagtttataagcgaaagcccagcctatttaggcaccatggagttcaagttcgccgagatcgtcaatgcagtggaggcaaccatccaggttcgagtcaccgaaggatcaagggacttcagagcacggttcttcgttcgcacagcggagcatcgatgaagatttcgtgctacttaattgattctaaggacgagaagaatgtcatcgttgacgatgatgatgatggcctcatcttgtttcagcgatctgttgcagtggtggagaatagggggaattgaggctgttcatgatgaggttgaagaaggtggtggtgctactgctagctagtccggtgaccatggagtacccgttcaatcctaggacagctttgaggagcaagctagggtgggtttgaccttggtttttgcaagatggatatcacggttgctacttgattggtctatgcttccatagcttaatttaccatgcatgcagtgacgaaccctgaataaaaattaccgagggttcaatacatattaattatttaattattgattaatatattaattaatataatgtaatttagataggatttgaataatctatccagggtcctgtgactccgccgggtagtataacgtagacacgcccctgcgtgcatggctgatgctcgatgcaaagcgagttaggagtaacaggtcgaagtaattgatcgtgtgtgcttttgcatgtagtaacttaatgaaatgtatggacatcttgtgaccctaatgtgaatattaagtaatatgactttttgagttttggggcgtagtgattttgtgaactgtcgatgatggggcgtagtgtctattttgtttctcattttcccaatagttttgacgaccatgaaaaaaacttataaaaaaaactggataattagtttgttttaattatgcctacaactacaattacattatcataatcaaccgcagtataaaagtactcctaatcaattacaatatggcatgtaatctctatatttgctagattagcattcaaatcatgtgttgccttgtctacagataaacttcttctctccaacccattcctctatgggtctgtttggcccaactctaaacttcggcaaatagtttcagctccacctaaaatagaaacggagcagagtggagcgctctcacaaaataaattagggagatggagctgggctgggtttaaacagcttcacaactacactacagacttaactcctgaagctaaatttagaagttagagctagctttaccaaacagtccctatatatacccctcaagaatcaatagaaatccaccgaattcctccactgttttgaagaacctctctatatatatacccctcaagattcaataatacagcctcaggatttactcccggaagtgctaatgggcgatcgatcgcccgacgacaagggtagcgatcgatcccgcttccccctccctcccttcacctggtttccttttttggcaccgcattacttttctattttagtaaatttatgcacctaaagtttatacacctcaagtttacacatctaaagtttatacacctcaagtttacatatctaaagtttagagatcaaaagtttatatatccgattcaaatttgaatttgaattcaaatattttttttatatatagtatttctatacatctaaagtttatagacctgaagtttatagacccaaagtttataagtcaaaagtttacatacccgattcaaatttgaatttaaattatatcaggattcaaatttgaatttgaattcaaatattttctatatatagtatttttatgcatctaaagtttatacacttaaagtttatagacccaaagtttataagtcaaaagtttacatacccgattcaaatttgaatttgaattatatccattcaaatttgaatttgaattcaaatattttctatatatgggatttctatgcatctaaagtttatacacctaaagtttatagacccaa

SEQ ID NO: 5787 - DNA, 10036 bp, Oryza sativa
gagggcattgattgcgagctcggcacccgaaaatttatacatatactttcaatagtattacatctacgtgcaaagtcgcatcttcaaattcattctacatagagaataacaaaaaagataaaattctgacaaaattgcaaccttaaaactgttagattttttgtttttttgttacagctaaaatataatgaatttgacgttaagattttaacactaggtataatacaattgaaagtatgtgtatagttttttttagattttttagtgatattttttagttggtgtgcacgtgtgtacacgtgagggcctgtgtgtataggatatgttgccagggttaggagttgataggtaccgcttttatacgaagccatatgcaattgggctcttccgtcacacacgtaagatggacaagttatgaataagtccaccttggtcccccaactatgactcgaattctatttacatctttttaactatactagcaaatatgcccgtgcgttgcaacgggtgaaaaaacgtaatgataatatacgtttttcatgcataaccatgtcgataacaatcagaaaattagaacaacgaaactttattttctagcgcgttttcttttgtgcttttttctgacatttttccctcacgtgtttttttaaaccgtttttattttctcgtgacattttatagttagattagattagattagagataaagaagatatataaatggactaaaaaacgacgaatataaatttgacttttttcctccgcgcttttttccgtctttttaattttttttctcgtacatttcttttacgaagggtttttttcaccactttcacatagtgtcaaacctttctagatataataggattcgattttttttaccgcatcacgtataattcctttttctttagaaacagacaattttttcgcccttttttatcgcgtcaacggagtcggaatcgttttgattttttcccttttattggatcggacagatttttttttgcccggtttatttcacccgatcgattttttttaccgcgtcacatataattccttttactttggatttttttcgccctttttttaccgcgtcgacggagtcggattcgttttgattttttttctccctttactttggaattttttcgccctgttttcaccacgtcgacggagtcggattcgttttgatttttcccctttttggctttttttggataggaccgatttgtttttttttcgccccgtttttttatcggacttttatcttttttttcgcctggtttttttattttttttaccgtgtcacatataattcctttttctttatcggaaagttttttttcgcctttttttaccgcatcgatggagtcagattcttttcagctttttccttttcttttatcggacaaatttttttttcgcccatttttttttctcctgtttttttcggatcggactatttttttcttttttcgcccggtcgatttttttaccacgatacatataattcatttttctttggaataagaccgttttctttttatttttttaaactctttttaccgcgtcgatgtagtcggattcgtttcggtattttttccttttttttcctttttttttgtcggacatatttgttttttttccgcccggttttttttccccaggtttttttatcggacttttctttttttttcgctcggtttttttctcccgttttttgacggacgatagaagcacctagagaagtgttaagcacctagagaagtgtttttttttcttttctccaatccaatacagatcggatcttttttagggaaatcagattttttttctccagggaatcggactcttttttttcgctttttttattcattaaacggtttgtctctgggactttttttccctttttaagggatcgggtgttttttttgccagggacgggtgtttttttcgcccgttttttttttcactttttttttggatcggactttttttttcgtccggttttttgatcggacaaacttggttttttctgcccggttttttttcacccggttttttttacggacgatagaagcacctcttattttttaagtagtagtagactagcaaaatacctgtgcgtgactgaagttagatattaatgatttaccaaaatatcatagtatgattataaacatcggctatatgtagagtgataaacaaaccatgtttgtttttcacaattaatctaatttatatttgcgtgatgtggatgacgcttctgacgcatgggcctaacgattatagcaagggaggaacaaatgatgaacaattaaagtgattgtttttgcatagaaagtgattgatgaaaatttgagcgatctatagaaaaatcaatatttttaaagtacataatcctaatgaaaaatgaatggaattgaccaaaggacacatctgaatataagtcatgcggaaattatattttcttgtaatccatataatgtaattgtgagaatatactcgattttctatgcattgtacttgtgagagctgaattttgttttaggttaaatatagtgtgcaacagaaatctgtaaaatcatattagtgggagcgctaaaaatagcagaaagaaaagcggggcagacccacactcctggacgaaaagggaaagaaaagctaactgaactcctgtactgcaaaacttttttttgtgtattttggttttctttttgtattttggaataaaaaaatatgaattataaaataaataatattggaagagagtaatattctccaatagaggctatagtccacataaaaaataattaatattatttattttagtccaaatttaaattctatatcatgaaaaatatacaattacattttttgttgactccatttagatataaataatttaacatgaagaaataaaaactatatcaaatctcatcaatttttaatggctcaaaataatgcttatattaagtttgttaatggagaaatagtttaaatcaactcagaatagataaaactcaattaggcccataaggatgggccgaatgtcttccacaacttggcctgttaagtgcacataacccatgtggcccaagtcggcttaaatacgctgagagccgtcggattcaatcgaacggttaggatcgctcgatatatatatatatatatatatataacattccatgttgaaaccctaaccctaaactcattatcctccctctccaaccgcgagtggcgcggcggcggtggcgacgcgtccaaggcgaggcggcggctacctgccctaccacgagcagcgacgacgatggtggcggcgacggcagtggctacctcccaaccacgagctacggcagctacctccctaccgcgagcagcggcagcgacggcggcgtcctcccccgtcgtgagcggccaggatggtgccctcctccattgctagcggcggcggcggcgaccggcgatctcgcggcggaggcggggcggcggctacttgccctaccgcgagcaacggcggcgacggcagcgatagcgatggctacctccctaccgcgatccccatcttcctcagcggcggccggtgatctcgcgactgacgcggggcagcggctaccttcctcatcacgagcagcggtggcgatggcgacgccctcccccatcgtgtgcggccacggcggtgccctctcccaccgctagcgacggcgacgacggccttctccaccgcgagcggccgcggcggcgtcctccgatgggtagatccggtggcagcggtgtcctgcgggtcggcggagcggcctcgacgacggcgcgtctcgaggcgctggcgctcgcctctcctccccatcttccttcgccaccaccgcccatcctctcgtcggatgacgagcttgtcgccatcgtcaaaacgataaatcgaggttgctttgtgattaatttgcttgattccattgatttcaaactttctatcccgttgatcatcccagctgattttattgagttcgattctgagtctgttggtttaatttgtagatgattttgtatcaaactcttgttttttttttctttggccattgtactgacctaactgcgctaggtcggattgacggacccaaaaatactgtgatgattggaaaaatacaaatatttatattagttatagatatactattgcgcgttgtaacagatgaagacaacttttataattgataaaaactcccaccaatttaaacgataaatgtcaaaactagattttggctaatctaaagtgggtagcgaacaagcagaaaagtggatgggttatgatacaaggaaatttttacaggttcaggcattctcgataagaaataataccctactcatgtctggggaaatattccgccgattgtgttatcgatctgatgatcttatgtgtgattatgccccaagaggcatctaacccttctttagatagtctgaagagctagcattacaatgcaagactatcccttacggttcagagtcctgttaatgccaaaatttggtaagccccgaagtcatcatcggcccagagtcagtatcggcttcagagttatggaatcggccgatgggatttgtcaagtcgccagcagtcggattcttgatatatccagttaagaaaatttatctagaagagaccaagttcaaggaggatgcggcatgacagtttatctattaattaggaagagtctgttagtttccttctatctttagaaaagtgtgtttagtatccgataaaaactttatgttttctttttaactttaggaaagtttttcttgtccaagaaggactagtgtctacccatgggtactttaggaaagtttttcttgtccaagaaggactagtgtttacccatgggtataaatatgtacacccggagttattgtaaactatctctatagatcaataaaattcggcgcatctccaccctttttacttttctactttttcgacaagttcctgcttcaagttagggcattggctttgatctccgacgatgagtaaaacttgctatggttgtttacatcggcagagctagggctttgacactttgatcttgtcaatgtatgcacctatttatcatatatcttagtttatctagtttagcatcttaatttgatcatatcggatgagattcgttttagggtttatgctggtatcggctaaattatcttgctagattagattaaataaggtatccaccaccctaaaaaccagttaaaggcttgattgtctacataatatgtttcttttcatactttgcactgcatcagccttagtcgtgcttagaaccataatctctagcatgctttttgattttcaataagggtttcatcggggtttcagccgatgagttatctggacgttgcatcggcttataaggattatatacaagatggatttagccgattgtgacaaagatttcattgtttatctaatcgtttggatttcatgacatcggtcctccagccgatgtatgctttaaccttcggatcattgtttattctatcatattattattagttgattgatttctactggattatattgttatttatcatcatcagtcgattgtctttatatcattatctatattggatatataaccgatagctcaaaacactattgatatcggttggcatcagcatggactgaactactccatcggctccttgctgctcctcgttgacctcctccccggcctcctgaacttgttctctaagttcctcttcctcctccttaacctcttcctcctcaatctcctcttcttcctcctccacaacctcttcctcctcaatatcctcctcttcctcaacttcttcctcctcctcctcctcctcttcctcctcctcgtcgctgtgaagctgctcgtcaagtgataaacaagcaaacttttctgacatgactatgtcttgtgcatcaagtagtgatttagttgtgttccctctgaaggaaatggaaggaaataggggatgactgggtgcggctgcacaactccggtggcgatggtggtagctcggttctaagtacgacattgtgttttgtttcaaagttttctagatctgtttttgtttaggtgataactttgattgatgttgtttgtttcgtggttggagctgatggtgattctaaaatccaaagcaggagctaccaaaatgctcaggtaactttctcttcaacaatccaatgctggcaagcgttgtggttcttgcttagcaattccccataattaaactcatctcactacctttagtttttttccttttaaattctgtggagaaaggtttagtctgcatcaccccatcctccagtacgaccgctgccaccatgcccgaagcgctcttccgcacagtacgacgaacacggggtgctcagcgaaatgtcccgtccgtctcctcacctgcaatgcatcatgaaggtgtgtatctgccgactatcgttgtttcgtcgaactattatgaatgatctttaggtgataaaatattgattgaattgtctactgctatcgctcagaatccatactccagcaatcttacatatatacatatttgttgcgtcaatcctaagcatgcttttcatatatccctgaacaattcagcctcacaactgctcttcatgtatctcattcagaattttttttctcaaattagttggactgatagcaaaatattgcttttcaagattgtaaaataaccaactagcatggacgttcataaatttttcccttctgtttggtgttattttatcagacatatataatgaaggcgtatatagcaaagggaggagctgttgagggaaaggacaatagctcaattttttttttttttgcggggaagacaatagctcaattgactgggaagttgatgtcaaatgtcgggagcaatctgctaaaatgttaaagaggtgcatgagtgaactggaaatatctatcttgtttttgattagtagtttctttggtttcaaagtaactcttgacatgagaattttattagcagaggaatgggacacattcttggaaaaatatatttcaccattgaaagggtcaattaggcctagagggggggtgaataggctaatttaacaaactaaacaaatgcggaagcaggaattttcgaaactttcgaaaataggcagaacagttgaacaatgcagtaaaagtctagatctagagggctaccacaagtaaatcaaggaacatacaacaactagacctatagcggctcaagcaaataaatctagaggatgggaaggaggaatatcacccaaaatgaagctcacgaagtttttaccggagttcaaatccttgagggattctactctccgttgaggagctcaaaaagagccgggtcttagctaactctttcctcaagaggttgcacaaagcactcctctttccactaaggggtatctctttccttgcggaggcgagatccggccttcacaaacttcccacggccaaccacaagtagatcggtggctcgggagtgacacctagctgtctaggagtcctcaatctccaagagtaaaagatgatgcgaagaactcttggagatgatgcaagtgctcacaaatcttcacgaaaaccacaagaagcattcacacaaactcgaatccacactcacacacacgccaaatccgaatcaaacccgggtggagagaggaatcgagaaagcaaggctcaaatgagtagagagagaagcaagccaagggctcaaataattgcaatgtcaccagcaacacttacaagaggggggatgggggctatttatagccacagcctcatatctgcccgttggtgcataataattgcgattttcagaacttctgaaaatcattttcggaacttccaaaaatttccagatctgaaaactcgaagtcaacgcacctttttggaacttccgaaaaatattttcagatatttccgaaaaatatccagaacccaaaacaaccttttgcaaattttcggaactttcgaaaattattttcggaaacttccaaaaatatccagaagtgaaattttagttatgtgaatttttggaacttccgaaaatccttttcgaaatttccgaaaatttccagaacacacggccaaggagaaaatgcttccaaaaattgattgtgagcacacacatcactccttatatgtctatgtctatgcatcatcccccttaatagtacgacattcctaagacgtaaagaaagtaagatatacaatataccatttgctcatgccataaattcatcgtgatgtcacattcaaaggggtatgcatcgcattacaacacatcgaggacgtaacatccttcacatttgctttcatgaaaattgttagtcatctctaatcgtattgtaatcaatcatcaaaacaattaggggcctagatgcactttcaatctccccctttttagtaattggtgacaatacaattagatcacaagagagaatgaatataatagattgatttggtgcaaaggtttagtgaaagctccccctaaaagtgtgcattaaggcaagtggagagctccccctaaatctttgcatccacattgaagctcaaaaagatatgaatcaattcatagtacattcatcacatttcatatctcattcatgacaagcacaattataaagggaataagaacattgcaagatcataatataaagcatataagtcattacatcccaatcatccataataaagcattaaagtctcacaatagtaatagctattacacaaatgacttaaaatcacacatagtctcatacactgaaacaccaacaatgttcgaccacaagctaaaatgaaaaagagatagatattctccccctttggcatcgaagcaccaaaaagagaggatgaagcgaagatggctcacacgaacggggcctgaggtggatcctcgggaggtggaggaggagggtagccatggccaaacccaccaaagaagtcgtactccggaggaagatcaacaaagggatcctcgatgtcatcctcaggcccatcgggctcagcctcatagcctggtggggacggtggagcacccaactgaaaccgagagtagaggtgcgcctgtgtttgctttgctcgccgggatgctttcttgattttgtttcgcgccctgcgattctgtttggcctctgcagagcaaagaccgaacaaacttcgcaagatgcgaaacaaagccgaaggctagcgatgagccccaggagagggttgcgcacgctcaggaggaggctgagtggaggaagacgggatgtcccgagtaggcggccaagaggatgaggtgggtatgtcaggagccgcagagcaagccttgggcactcgcagagtgagataggaatgggactcctcacaaataaactgggtttgagtgacatgctcgatcatccgcatcaggtgaggggcaaaaggaagcgccctcctgtactgaatcgaggccatgcggatctcctccaacacaaagttgtaagcatgaaagggattgccagtaggattaaacccgaggagcacattacgagagtgatggttgatgttgctagcattaccatctttgggagtgagggtccttctcaggatacggttgaggtagacatggaaaggcttgaaaccctcagttgtgcccaacttgccgccatcaagatacaggggatgccgctcatgatgcataggaatggaatagtcatggaggttagcaaagtacctcatccagttttcatcaaaaccccaaagagtggcaagagcctcataggtaatggagtaccactccccttgagtcatccaatgtatgccccgccggctgtcaaagaaaacggtggcataaaattgggcaataacctccttgcaccaaggttgatggagggtcataaaattgtggacacacatctcctcacacatggcaatcatagagttgagggtggggtcatcatgtgcctacaagtcctcccaattgatccattgcataggaacaatgggatcggttatgggaaagataacggtttcatagaaatcttgctgaaaaga

SEQ ID NO: 5788 - DNA, 21650 bp, Oryza sativa
  unsure (1)..(21650): unsure at all n locations
tctctatttttgaaacggaggaaataattgatataggagaaggtgaagaagcagatcctcggacacctcactcccctttccaaccggcaaaccctacttttccggcggcggcggcggtgatggagtccggccagtctggtgacggggctagccacggccacacgagtacggtggtggagactgccaaggaggaagcgctcgccggcggctacgatgaggaggaggaggactgcacaccgctacctaatgggctcatatgctcgcggcagaattgggaaacgatgtacggcaaattcggtgccttcgaggacgagagtaagtggatttctctgatatatatatatatatatatatatatgtatgtatatatatgtgtatatatatatatgtatgtatgtatatattctctctttggctctttggattcgctagcctgattcaaaatcaatctaatttcttctatcttcattgtgcaccgccctctcatttgtgatttttgacacaatcatttgacagaaataatgaacggacttagcaatcttgtatgttgtagatgcactgcacgcacatatattaatcttatagatgaacacttttcaatgtattgggatgcccaaccacacaaacctagttggggcagtcatattttgcaatttgcatttctttcctgggtcttgggtttgaaggcttgaagggtggccatggacagttataagaacagagtgaattttgggaaccaggagccattggaaggaagcagattgtaaaaaaaaaaaagaagttaactcatatgtatattttcttactcacatttgtcatttggttgtcaatttctgctccagtccaataatcactcgatgaatttgtgtgtccagcggatgcttctccaatgaggaacacggataggccagtgccaccatattatctgccaattagcatgatgcaattcttctcagtgaaggtgatcgagatcatgggaggtctccaatggccactccacgtctatggtatcgttgctacgcgtgactcacaagataacaagaggaacttcttgtttcgttgtgatagagagcactgccagacccttgcctcaccacaggtatgtgcattgtgtagcccttcattatttctggtccatttcattttgttttagttttatttgtcgtcagtcatgaatcaagtgggtgcattatcattggtagttaaccaatttactgctaccaaaagctaaatagagggaacccatgttttccaaagctttcttactgttcctgttatgaaattttggggatgatctcatccttaacctagcacttagcagcaatgagttacagccatgagttattcttttttggaaagagatgcaatcattacttcagtccacattaacaactacagtttttactacccatcttgctgcatggtgacatgtttcttacaaaccgttggattgaagtcatgcgcagtatctttgcaggtgacacagcctatcaaagattatgaaacatgttgatctgattgcccctctttctgtcgcccatgcgtgcaggattcatgtttgagacttacacgtcctagtcgagctattgtaatagtgaaccctgtagttgttgaggttgacttgaaagtgaagggcagcagaggacccccatctgaagacaaggttttaagcgagcatgcttttgttcacaaccacactggtcataggattaaacctggctttcctcatagacagctggaatcaacagaggacagcacgatggagtttgtgtttgcacatctgcagagtgcagtggaggccaccatcacggttggagtcgttgaaggatcgcctgatttcagggctcgttttactgctcgaactgctgggattgatgaggatgtgttgcttcttgactttcaggatggtaagggcctctttagttcgcgaactgaaattttttgcgtgtcacatcggatatacggacacacatttgaattatttaacgtagactaataacaaaaacaaattacagatttcgcctggaaactgcgagacgaatttattaagcctaattaatccgtcattagcaaatgtttactgtagcaccacattgtcaaatcatggcgcaattaggcttaaaagattcgtctcgcaatttacacgcaatctgtgtaattattttttttctatatttaatactccatgtatatgtccaaatattcgatgtaactgggtgaaaattctttgtttgggaactaaacagggcctaaggtggtggtcgatgatgatgggttcgtcgtgctccggcgacgtgttgtttctgttgaagggacagggaagctgattctccggatggaggctacagatcacggtggcgatgacacggctgttgttaaggaagaaatcttctgtgctagaaagacatcaaggagccaaagttacttcatgcttgggttttgtaagctgtcgatcatcatcgcctggtcgttacttccatagatgtagcgccagtttaagtccttgcgtaattgtgtgtattgtgtactagtagtactgctttgactaagccagattggtgtgactctgggttcttactaaagagcatctccaaaagagcaaatcaggtgaagaaaaagataggagtcgatattcatctgatactatcttggtaaagaaaaagataggaataggagactatgcattcattataggcaattaaatgctaagaacaaatactcattcttattataaaaagacctgctagataaactccatagtaatgccttttggtctcacaaagccccagcaacatctcatgttctcatgaataaggtgttggctcctatcttgagaaaagatatgctagtatcttttgatgacattctaagaccatagaagaacatgtgatacatgcattttggacattttaaggtctaactagggtttttttttttgcataatcaagtaaatgtgtgttcagtcaacagcaagtagaataccggggctacattattagctattaatcgaagctgtataactttgaccagaactcactaatgtcactcagttgagaggctttctggtttagttggctattatagaagatttatcaaagttatggagtgatctaattgcatatctaccatcgcaaaagattggattcgcgaatgcgagcatcaggtggcggcggtggcgattcctgtactaggcaacaaaacgagcggcaagcgtaggcggcagttcctcttgggggcagacagaaggcaaccagagggaaagtttgctacatggaactcctctatttgttgctgacaatttgattcgtatgattgtatcatccggctggatcgatttttttctgtcatccctcctgagattgattcctctttcgccggaatcaatttccgttgattcatgccatgtaatttgcattcatcactgctaattgggacgatgacaaaggagattaatcttggatgattttgctattttttttaattgctggtgcccatgacgtgcagttgttgccgtccaccgatcgttgccgtcgagcatcttcggcgcatgaaggaggaagaagaggagccagggtattcttgcgaagtcgttttggttgagtgtggtattttctgaagcatacttaagttatggtaccgtagcgaatctttctttttcgatggtagaaatataattttttgattgtgagaaaacagaagcaatgtctgaacgtagtttcacagttagccgtgctcctcccaacaagctatttcagatttcttgtttcctgacagcattccgaaatgagaaggggaatcatttcaacatttgttcttgttttgcagaaacagaggtgcagagtgggaggtgctgcaataatataatgcacaccccaaattaaggagaaactaaatcacgatcacacacgtcaatggtccaaccttttcactatcaacaagagtccacatttcaccattcattatcatcacagtgctttcgctcaaaaaattaacacggtccaaaataagcatccgcagtgcacggtacagaagtacaaactgggtttagatcctatttaagagagtttctagctgctgcagcttctttcacagtcataaatttctctaaacagttcggtttttagttcagattctaaaaagctaaacaagtgacaatcacctctagcttaccttaattagttcggacttaatttagagcacatgataatgcccacacattcactaatattactaattaagaattcatttgctatttttattacgagtaaattgcattaacggtacataaacttgtcaggtgcgtgtaatttagtgtatgaatttgtaaaatgcttattttggtgcatgaacttgtttggtacgtgcaaactaagactaaaatggcacgataagattgatttttctatgttgaccattataaattacaaattagtagatgactaacgtgtacgtagtagaaatgttatatttgtaaacttagataccattttatctttctttatttctatcccttgcattattactcggtttttttatgcaatcattatgtcttattatatatttatccttcttagactaatgtttacacagagtttaaatcaacaacagaatcagcaaaattaaccttatagtgcgatgttgaccttgttcgcacgcaccaagttcatgcaccaaaacgagcgttttacaagttcatgtactagattacacccacctgacaaattcatgtaccgccgatgcaatttactcattaccataggaagttagtgtaacacatctatggaagggaagcaccgaccatgaagtgacctccaattatcaaggtgaggcatagccctgatgatgctcacctgcttgggtgcaatgcaagttgcgcgcgcagaggctacctcaacccaggttcacaatcccgatactagatcaaaatccgctcacgaccagtatcattggatccattgataaactaacaaaaaatcgatgaagtacggatagaatttgtcaaaaaataaagaataaaataaaattcggttgttgatttggacattttgatttgtgtacatatctcaaaaacttttcatcatcacattacatatctcaaattattatatatggacacatcacaaattgtgtacgtacatttaggtcgtatctcaaatttttctaatacacgttcaaatcatgtacgcattcttgagatattccaaattttatacacattcggaaactactactccttttttttcacattttctttatatgtagtttttctttagcccatcaaagacacatgctacaacagtcaggggtatatatcatttttttttaaaaaaaaacatacatgtctattgttcagaaagcaaaaggtgagagaaatttaaatagaagagaatactacctgttcttttttctcataaagataaagattttaccttggtttccatttggtttccattagcacgcttttccaactacaaaacatcgttttgtatgaaaactttctatataaaagttgttttaaaataacaacataacactttttcaaatttgtaataattaaaacttaattaatcatgtgataataactttctcgttttgcatgcctgcttttaatctttatctttagaagattagacgatcagtcccattcgtttcctctataaaaactggatacaaatttgatacttttggtacgcttttcaaactgctaaacggtacattttgtgtaaaaactttgtgtaaaaactttctatatgaaagttattctaaaatatcaaattaatctattttttaagtttgtaataattaaaactcaattaatcacacgttattatcacctcattttacgtgaaacaatctccatctggatgttggagatttaaacaccaccgatgttggagatggatgcggggtcggtacagcatagcagaggacgatctgcactgcacgaggaagcatagcaaccaagtgaagaaatcaaacttccacacataaacttaggaaaattgagatgcatattaatatgggcatgaagatgagatgggatcaaaggaacagatcaacagaaaccgaatgcgaggcttgatagagcttataagggccagaccaatgtgaagcctgagaaaatctgggttaatttggcccgtgcaaacccattttacaagtatagccgaagacatgcaaacacacgatcagaagtttgctcctctaatacactaagtattttcctctttcatcatagggtataacagtacagtatattcgaccacaaaattttgcaaatttcaaccatggatacccggaagagaagacggccaagataaagctatactcctaacaacgcgctgttacatgtcacgcaagataacgctgcactcctaggaacttgggaagttaagtttgtgccctatcagaattctgaagactgccaatgctccagcaaaatgttgatgtggcagaagattctcaggtgttgcgctatactttttgccgtttcgactgcgactgcttcatccactcgatgcactcctccgtggttccccttggataagcaagctgccacttcaacagtcgttgttgctaccagaacgaaggaaaaatgtgttaaaatgtgttcaggaactagaacaattcagacatagtcgattagtgtcaggtatacccattttccgataagtggacctcccttgacctgcataatccccataatggccttcccatcaagcaacggtttcatcttccatacgccatcaagctctggagaagaggtagtaagatataaatcagaaaatcttaacaaggatatgaataagttggttttcacattgaggtgttcagacagtaatacaacatcatgtagaaagtcataaggaagtcggcagtcatcagttgattctttacccagttcagttattaaacgttcagctcttgtgtatttttctttcctttgatgtaattcgtctggctggccgagagaatcaccaccactgctaacctccgggtaggtaagagtgcagataaacagtgccacacgccaaaagtcctttatctcccgaagtataagccctgtaactctcgaagtcacaatttttagattactaggcaaattaaattcccaaattaagcaactggcacacaaaaatagacagtaaatactaaccaatataaattattttcaaattttaaaatcaaactctctgctgacctgccaaaacacgtttaactgagtctgttgggatctcaaggtattcatcatccaatttctctttcacagttgtcagattttcattcgactcaaggagattaattaattcagcaaacttttcacttgcagcatgtacgttgacaaccttcaagtgcagaacagattataagttgatttattttctcaccgtacaaagtaacgggaataatattcgaggaaaaaaatagcagtaataagctaaaaaggacgatgaggcctgctcaggaaattgtaccgtgtcagcatcactagcttttaacttcagagagtcacgaataatatagttagtgacaggaatctgtagatgatgcaacaatcttgtcaggatacttgctacaaaacaatacaatacaaaagaaagtggtgattaaatagttgtttggttagtaaaatggttcactgctaataattgttgtaggctctgttctgatcttctagcccattttttacattaagttgaatatagctgtggcagttaaaacaagcaccagctatttcctcacacaaagatattgtttaatagccacggttcgtcagcaaccaacctcaaaagaatttcaagcacagtaaagctaattaacagaaaactcagggatatgtggcatttgaaataagatctgattatctagatgctacaaaccagttaaatctacaatttgccaactggttttactggagaacataaattaacagtcataggtaaccaatgctggcattgtacaattgtacagaaattaatctaagaactactctacatattcagctcagtccgtagaaacaaaactatggctacatatgtatctaaatggtcacaatatactctcttcactctttgacagccacacaaacaacctgacatcttatcaaaacttaggatggacttccaggcaaatctaagcactacctcataatattcagcatctatacttctatactcctttaaaaagactccaatggtggtggcagtgaatctgccattccacctactcccattgaacttttacatattaccctttgaacttcttgatattatataacagctaaatctaaatggataaccacatataaattaaagtaaggccagtcttccctataaaaaaaggaaggtacgaaatttcatgaacaatatacttttatttattttataaaatattataaaatgttttcgattgtagcaaagcacaggcatttagctaatacctaaaaaaaatcttaaccatgatgcacaaaaactgctctcaagaaattctagtacttcacactgcaaaatacaagtgcacccacaagtaaactaaaagttgaaaaaaaattttgctagtacaaaaatgaacgaacttgatgaacttactgttcagtctgtacaaaaaaatatggccatgatgcatctagcctgcactctcctacaggggcagacaacccaggtcccaggccacctgggccatggcctgggtggcctaagtctaaagcccatggaagcctatgtaatttcaccatgtattcactgtgggggccaatatacaccatgggttgcccgaggcctggagaaatgctgggttcgccccatctctcctgctaacctagtaggaagcaagtctagctataacatccttgtagaaaagggagatgatttgtttaaccaaagtagattaagctgacataatttacctgcttaaaaagttaaaagcatttacataggagaaaagtgtggaggatgcatgagtaagaatttagacattaccttcttcgactttttatccaaatatattgtattccgaacaggagtgaatagtgcactataaaagcaaagccttcggtgctcatcctaaacacaatcacagatcttaatgttaggaaagcaaagatacaccaatgtatagcaaattgtttaattcggtttagccataacatggaaagtgtaacataggaaccaatcacagaaataagatgggactatagtgaaaagtttagtgtcataggtcctctgaataataataactattattttttactccaaaacttaatggttcaatcaggtgtacaaatttctgtaagttctctacgtcatttattccaccaaagattaagggtgactatggtttgttaattatttgcagtgaagttattgaagtaccattttgaccataaagcaatttttgtgtgtgtgtgtgtgtgtgtgtgtgagagagagagagagagagagagagagaggttgtttgacttaatggtgtgtgcttaacaaagaaaaggacacattctgaagtttctcacacctgtgacttggaatcagaaccaccactgaacacagagcagccaatagaatgagcaagattccatgcaacttcaatatgtgaaacacaaagcctgcatacaaatataagattaggagataaaactgtcaagtgaagcacacatgctaatggaaataactagaagaagctctacaggtacagatgtctgaaatgtaattgtgtggccctttagtagaatgaattcaaaacatatagtagatatatgttatagcaagaacacaccggtcacatttgtcaggaactggagggtcgggcttctcaggaaaagcaaagacaacataaaataaccccaaatcacgaatataacacattgcattaacaggatgtttgtctgacatcataagatctacctgcacgaaatacaagcagattaaattggtgataatgggcgttctattatgttactcaatacatattgaatgatgatgtctggttagttttacgttcatgaagaaagaaaagaggaattgtaggttggctataagtaggaccaaaaccaaacctcatgaccgatgcgctctttgctaatcttgctaccaagttcagacttcaccttttcatcagaagcagcatctttcaaatcttcagttaatgtaaagttgaatctagcagctgtgagagatatgcattagtatatgcaaaagaaatgcaatgttccatgcacgctattcaatgataaatctataaacaaggtatccagttcaattatcagtagacaattacatgtctactgatatcatgcctataattatcaagctcttatatgcaaagaaaattcaaatatcatgattcgtgcacatgataacataagcatataaagtgaatctaaactggctattgatgaacattcagcaaagagtatctaacttgaaacagaaaagcaattctggagttttcagcggccaatttgcccagtacgaatgcaattaaatatgagatgttatttacttttaggaaaataaacttgtcatgaataaatctgtaatctgaaagtatatttgtgatgataatgatgataacaccatcaagtcctaaaaagccaacaacaatggtatagcttagcataaaattagcaatggaaatattgtatatcaattaaaaggatgttttaccaaatcggattgctcgaagaactctaagggggtcatccaagaaggtagctttggcaggtaaaggagtaacaataagaccctttttcagatcttcaataccttcatggaatatgaaatcaacatgattacaaacagcatgaacatttgaaaaaggttatgtatatctaaaagcttctatgttaggatccaacaaccaagctcacctcttccggttaaatcttccactgtgttagtgttgatattgaagaataaactgtccaagtttgaatatagaaagagtttactagacaactcaacattgtagcaataaaagcattactttaaatgcagagcagaactgatctgaaaacaaatacctatttattgttaggtccctacggaatgcatcttctttggctgtaccaatctcctgcgtattgaaaaaaatgtcatagctaagagggagatcagagttaaaaacatgaataacagaataagcaagaaagaattatagattgctcccaaaaatgctaatggttatttaggacatctgagtcaacaaatgtaccattccctagtactatacccatataaagccacaccaaaaagacacatgtcaatgcaaatttaactaaaaactcagatagtcagtacatgcaaatatataatggaaatatgaacataacagcatatacacaattctggaaaaaaaaacaatgcttgatatgtgtgcataccacggtaggaatccgactgttttcagcatatttttcagacctcaagttgacaaagtcaatccaaatgtcgaatataagcatccttgcagtttccaagtgctttgattgatcaggattgctgaaagaaattacgaaacatcacgatcccatgacagcatgcatctggcattatacaaatgccaatatgacaaagcatgataaacttaaggtacagaaagtattcataattttcttgcactaaaggtcatgatactctatgagaaggttatttgtttcacaaattcaactgagaatattttgtaggactaactcaaaccaacatgaaacttataatggcaaaaaggtcgtggaatttatttgataaactgtgtgctgatgtgctctgtgatctcagtgaattaattgctgctgctgagcttgaccaaataagtgataaaaacaaactgagataacagtaataggatatactcgctgggaataaaattataaagattgcataccactgaataacgccaattcctttctgttcctcacccaataattctgaatactcatttactttctcgcagaaattctggcccgtcatattatcaagtgcaatatcaatgtcagtggagtctttccccaatagctgacgattatatgaaaagagaaaggttgagtcagcaaaactactcaacaatatattcttattagagatgagctgcaaatgacaacagtagtgcaaatccttgtttttcaaagcagggatctacctgcatctcctttgactgtttgtcatacaatgcagtatccaatatccatcatgcaaaccttgaatgtgtaatacaacattcacatagcacacatccaataagacccaaattatgcatatcaacaaggaaatattcacttctctgctcttaaaggaagatgcctgtaaattacactatgccatgtgcaggtgcactatttgcatctaaaatttccaactaaatgcagtggaagcacatgtctcccgcttacagactagaagaagccaagaccaacaaaacaagttgattgagccattccctgagcccatcagcctgacaatccccacaattcacaggcagtcacctaatttctcctgtcaggaaccctaaacatagccatacaaggaactctccacaggaaacactaatttgaaactataacagccaaaaatccactgatttttttttataaaaaaaatgtcaatgacatagcaaaacaatgtcttcaaaatgcccaggaaaaaacccctaaaacttacatgacaaagcacacattccagtacctaaacaaactagtatcgagctcttcaaagttaaaattcgaagggccacaaaccccaaaagccctaaaccaagtttcccaagattttttttctccaaaatggtttgatacaatcactacttctcgtactgttctccatgtactctactgacaatgcggaaaaggagatgtgtccaccttttctcaaaaaaaaaaagggaaggggggggaactcaccttgtccctgacccagccgccggcgacgcggagctgggtgccgaggccgaagtggcggacgacatcgagcaggcgacggaagatccgctcctccttctccgtcagctccacgccctccctcacctccaccacgcaccgctgctgctgctgctgcggcgtcggcggagacaccgccgccatgcccgagaagccggaggaagcgcaggctcgggcgggtaagccggaggaaccgaaggctctagatgggatcgctgagacgagcggcggaggccaaccgcgaagaaggcggcggcggcgaagaaggagaggggagcagttcggcggcggaggacagggaggaggaggagcccgcggaggcgaagagacatgggcggcgagcgatttgcggttgccagccgccgcctgttcggctctgcttcttgtgggccgtctgtgtttgggcccttttgtgtgggccggtcgttttctggtggctggttcgttgggccgtgattccagtgggcctactgcttgcgagctgtgcttatacgctttagggcatgttcggtaaatctccaactcgcttcaggagcttggactggagtagagtagcaacctaactccgctcgtgtttcatgtggaactgaaattttttggctgggctaattggagttgtaccaaatagacccaaactattccataactccactctatacctaactcctgtagttaaatttaggagttaaactctaccaaacaggccctaaccacctgagcccttattcgttttgtttaattgtttttgcagaagacggtagtacaggggttcgcatcctctgccattaggaggtaaatggcagaggggaacagtaaaacgtgagtagcgctacagtgttttgccattgctacagtaccgaacagtaaaaatcactgttcggttattttattggaattactgtatcgattgatctcgtacgtccacgcttgatccgacggatgtaagtggctaatggcatggatcactgtagccctatgccattccagttggaatggcagatgatacgaacccgtagtacaggctgaggtagcctatgaaacatgacaggaaagcttctggcgccaaaacggtatagcccatttctctgaatttctgaaccacgaaatgctgtacctgcctgtcgaacaatttctgaatattgtttttttaggaatacgcaaggagcgcattttttttcattaagagaaataaaagttatttacaatgaaaaatgaaaaacaagcacgggactgatactggagactagcgatctaacgggatatctcgcgctagatttggctaccacgacctcgcagagataatatggaagggacccctgcatttgccgacttccaaagtacggcttcttccaccattactttcgctacttcgatccaagacttggactgctgattgaagatccgtttatttcgctccttccaaatcgaccaggccaccagcgttgcaatggtgtcaaagccccggcgatgttgctctctcaatttcatccggcttccacagagccagaggtgaaaggatggttcgttgatgggtagacaatctgaatattgttttggtgttgatcagtcactgcaagttaggcacaggcaagaatgccaaaccttcatcatccttaacaattgtggttcgcaagcccggtgacgacggcccaggagcaggcagcgcttcatcagtggcagaactaccttattatactagtcagaaccccacgcgttgccgcggggagcttaagcaaaacaaaatatttaacatatgaacaaacataaagatttctgatgggaaaatttttctatacagaacacctataatttacatagacaaaagtgtattcgagaaatattccatcctataaacctagaagataaatacctaagtagaaaaaacatggaggtgacatgattttaattggaagtacaaacatgacaaagtatgacaaatacaggtgattggctgcaagtctatgatgaacaatggactatctatgctcaattggctgttaacctaggtagcttgattccatctatgattttattaccagtattgactctcttactatgtgacgttgagttaaaagacagatcagatttcttgcaaactcatcatcactgacatcaatttgtagccagcacactctgaataatcgacaaatataagaattaatcttaatgatttgtttttgatatggtgtataatacaaataaagagcatcttcacatgattcttcgtgaactaaagcatcagatgaatttagaataagaaatgtcatatatgaagggcaatatgtacttttatgaatgataatttcatccttgaatagagcaatagatcatttacaaacaaatagaatgtcaacatgtatatgagatgctctttttttttcatctgtggatcattgtggaaatggaaaccatgatattaaaggtaatattcatggcaaggatattgcttgtaagatttgactgtgtttaagaaggaatttaccttcggaagtaaagatggaataacacgtgcagagccgtaggatattgtatgatttgaatgtaaagtctgattaacttgtcagtaattttgcatagctggcatcacaaccatcaagctgcaacatttgtatcaagacataacttaacagttagcacatttgaatgttgcgatccaaaaagaaaaataatgcaaaagcttttgtatgagataaatatgagtaaatccaatgtataaattgcaacagagcatctcctatgtatgatttatgagcctttttaccattcaacatttggtatctcgaggtacgacaaagtgttggatggcaaaattgctcatgatttatggcacatgaaaatgaattgatgtatgtatgtatatatatatatatgtatatgtatatgtatatgtatatgtatatgtatatgtatatatatatatagataaattaactggtgctacatggagtataggctccaacagaatccaccgtgtacgatgctttgagatccgtgctacttgaaaccggagtgttagacatagtaacgggttaaacccgattagacctttgtatcctcatgatttgcatgcagcgtgtgcacgacacgatgagaatccctttccatataagagcaaacatgcatgtactacctctcaaaaaaaaaacatgcatgtactaattttctggtgattgcatgataatttgtttccatatgattgcgtgattatttatttccatatttgagataacattgaattgatccacaaatttcgatgtaaatccactaattgcgttgtaattgatttaattatttccatcataccgattagtactttccattttttgtgtacatataaaatgatggagatgacacactccagtcgactcaatgctactacaccgatggccggacgtcggcgagcttattcgtcgccaagctattgcaccaccggcctgacgtggccgacatcttcttaattcgtagcgggctgctggtcgtttgcgagattcgtcaacacacaaccaggtctccgacgccaatctgttgcttttttttttgcgccgccgatcgtccgtgactctcaagctcgttcctcgccatgaaaattttttaaggtaccttatgtatgtatcgatgatttttcgttttcaaaggtattttactgatctgggagcgtaacatatgttctgtcgcgcttccgtgttgtacgtagcttcgtcgccacgcgcggctcgccgccgccggtcgtctttgagattcgtcgtcaccgccgccggcatcggtcatccacgatcgcgcagccttgtcatcgtgtgcttcgtcgccatgcaccgccatcaccagtcgtcggcgaggttcgtcaccactgtcggcgccggtcgtccacgatatgatgttcgtcgttaaccccgttactttcaatttgaattatttgattcatatgtatgtatgtatatatatgtatatgtatatatatgtatatatgtatatgtatatgtatgtatatgtatatatatatatgtatatatatatacatatatatgtatatatatatatatacatatatatgtatatatatatatagtagtactcattttccaaaaatacagctagccaccgcgtgatgtgtacttacgagacttttgaatttgaccaacactatatcttagcctctttgtttcaacttaaaaactattatagtttagattatttagtcaaattactataagttgtattataataagatatcgtataataagtatgaggtatttgtttctctggattattggagacatggattattgggttttgaaaagctaatgtctataatgacctcagctattttggatgccttgatcatccttttgtcaccatatacaacaaatacataatttgaaatagctaaaaaatattaccatatattaataaataaaacattcatgcatattttttttacaataggctgaacacaaaattattatctcttagccaagagagtatagggttggagcttggggaaggattcacgcgtggggtggggtggggtggggggcttggggaaggattcgcacgtgactggggagagaggaagcagatgtgcgtgcgcttgagggagagaggaagcggatgtgctcgacctgttgggtttgatggcgctagttggtaatttgtataaaatttttaggggtggtgggtctttaaccacccaataatctgaaaaaagcatgtttagaggagattgccagattatactaatctggcttatagattataataatctatcataataatctacatgtttatttctgattacggataataatatagactataataatccaagctaaaacaaatcaggctgacggttcataattaacaaataaaggatatactctagcataaaattataaaattagatttacttttcgtaaatatatgtttgctacaaataattatcattgggtcggtatctttaccacaagttgcaatctactacgtcatataaaaaaaattgttaacatgtcgtatcatcatttttgtgaagtgtacgtatttacgggctgacttttgaatttgaccaacattatcatttagacggtccataattgacaaattgttaacgaccaaatttgataaatttatgtcggatttggagttaaggccgaagcggatttgggaggaaatcgttaatggaaacagggtatgattcggcttcggaaccgcatctgctacagtgtgcatcggcagttactgaatcggataaggcaagccgatgtagttcattccggcaaggtgatattggaatcattgtcggattgagttgatatgcttcatgatgattgccacgtgcggatcgagtccgaagaaggcagttgtatctattaattaggaatagtttgttagtaggaaagtgtgtttagtgtcctataagtactttatgttttccttttatctttaagaaagtttctttcttgtccgataaagacttgtatcaacccatgtgtataaatatgtacacccggggtctatgtaatctatcttcacaatcaatacaattcggcgcatcgccaccttttaccttttctactttattttatcgtccgggggaacttggcacctgacgcgaggctgcatcggtgttcgatctccggctaaggggtaagtccaatgttccgccggcccaggcaatagtatcgtttacgtcggcgtcgttcaaggctgcatcagtacattcgacctcttggattgctctggtttggatgatatattgcctacctatttatcatatgtctttgttaatctagtattagaatatcaatttagctctatcggctgcttctcgttttagggtttctgccggtatcgactaaatcgcgttgctagattagattagattagacatctaccaccctgaaaactcagtcaacggctttattgtctagatattatgtttctttttatacttagtgctacatcagttaagtttgatctactaagtcatgcttagaacccataatatctagcctgcttcttgattgccaataagggtttcattggggtttcagccggtgagttatctggacgttgcatcggctcataaggattgcgtatacatataagttggatttagccgatgacaacaaaggtttcactgtttaatctaatcttgtgaatttcatgacatcggacctccagcctgtcggtgatatgggcccgggggtatcccagctagagggaggaggccgccctcaaacccacgtggctccccccgaggggggtcgagcccagggtgaagcggcggctgccccctccctgcttggggtcgagctgtcccgaccccctccacgtatcagcccacgtgtacagggttaggtgggtgcgcttaacgcccacctaaccacatttaaagcggtctatgcagccacgccatgccgcatttaatgcggtgtgctgcgcatctaaccggtcgaatgaccgatgggacggtgactatataccatcgccctgtcagtgtgtcaggcggcgcgcaacgtgctccatcctatcccatcattatgatgaggggcttcacagcctcttatcccggtcagagctggtccaaccactctgaactgacccgggtatctgtttcctggtgtgaacaggaacctggaagtcctcaaccattaaacggcgaatgacaaggacgccccgcatgatctgatagaccccacgcagcagccgacgcgcagatagctttgggctaaggcacaagacatgtaattaagatagagattattttcccttctccctaggtagcactcgcagcatatgtgggatccccttagagtataaaaggaggaccatgcctagcgagagaggggatcggattctggatccccaaactaaagcttctctaaccctagcttgtacttgggagattaagaggctttgcaagcatagaagaatcatcatacacacaggagtagggtattacgcttcatagcggcccgaacctatataaatcccttaggtctcttttgtctcggaaaaccttagatctcacccgctcccccggccgaactcacaaaggggggtctcacgacctctcgctagagaggatcactcctcgacacagccgatgtgtgctttaaccttcggatcgatgattatttatcatatcattattttattacatcatcatcagtcgattacctttatatcattatctacattggacgtatagccgattgctcaaaaccctatcgctaccggctggtatcggcatcggctatcggctggaactactccatcggcttgtcagccgatcggctgttttgatctactatttgtatatcttgtcagttgcaggatcaaactgactggtatgcctgcatctcatcaagatttggacctgcacaggagctaagcagatctctcaggccggtgtgttcgattttttcgtcaacacaaattgaaaattatgctctcgcataaaattataaaattagatttagttcccataaatatatgtttgttgcaaatcattgtcatcgagttggtatcgataccttgtatgcccgccgtcgtaaaatataaaggattttgcatagaggagatatttccaagaactataaatctactctaaaatttcacatctgtccaaactgaacggggggagtaagatataacccattatttttataaaataataacataaacatgtcacatcgttatctttagcgatttagcgatttgttcgataactgactgatatatggagcattatactccctccgtcccattttaattgcaaccataaatttacgtgtccaactttaatcgtccgtcttattttaagttttttcataattagtatttttactgttatgaggtgataaaatatgaactttatatgtgacttatgttttttaaatttttcaaaaattttttaaataagatggacaatcaaagttgtacacaaaaaatcatggttgcatttaaaatgggacggcgggagtaaattactagcagcaagcagtagatcgagtgattaattaagcatttactccgtaatttattgatttaattaactaactaattaatcaagcacgtcatcgtaattaatcaactagcaacgagcgcacgcaccgtcatcctgatctccgtctttggtttggttttgctccgcggcgtgtggggcttgtcgtcggagaagacccacagccgcctcaccgttccgtcgaagctgtacctcgagctgttcttcacgtcgtacggccactgcagctggaagttcctctcgccaagcctcaccgccgtgaagccgtccgtcgggtcggccgccgccggcgacgacggcgccgccgccgccgccatggccaccgccaacaccaccagacaccaagcacaggaggaggaagaagccatattaatttgtagcttcagttgctttggaatttggtaggaggtttctgcagtttatatagagctcggatggtggggattaatttgtgatgccccttacgttcgagaggcccttttaaaattttctatttcctcgtttttcatgcgcccattaagactcatagtactaaatagtaagtgtgctttgttcaaataattattaaaaatattctgaaaaatcatagtattaatttattttaaagttatttaaagtaataattaattaatataagcccctggcagatggggaccctctagagtcgncatgcnggcngcnagtacagcantaattcccatg

SEQ ID NO: 5789 - DNA, 18209 bp, Oryza sativa
atgacaggtgggccccacaattttttttaaaatagagtgctaactggactgccacgcgtacgccacgtggaccaaaaccaccgtggattaggtcgaggggggtaatttgtccggtttgtatagttgagggtgaagaatgcccggttttgtggttcggggagataattcagacgaccgcaatagttcggggggtaattcgtacttttcctttatttttattttgtgatggtttgttttatcaatgtattctaagtctgacttatactttttacatttacactaatacttttagataagacaatttgttagtggtatgtaaaaaatgaacgacgttaacagagggattaatttagctaatacactctaaaataaaaacagatgtggcatattctaatacaatgagtttaagcaagagtctgatcagcatcgttggattaggatctgtctaatccagtcttaggttatcatatttcaggaatgagagaatactactatgtattccgcacgtagtactgttgagatgaaaatgatgtcgtcgtcgtcttcgtttgctcgcaaattaacgaatgatagaggtaaatccgtagtacaatatcgtctactctcgctatcccaagatagatgtagtttaagattcaaagttcaaaaagaacttatcattttggagtataattcaatttaaaattttcttcattctacctccaaggctccaactacctttccacactaaaccatacatcatttaaagaagacactattgttattttttcataaaacttacttcatccgtttcacaatgtaagtcattctaacatttctcacattcatattgatttaatgaatctagatagatatatatgtctagattcattaacattaatatgaatgtggaaaatgttagaatgatttacattgtaaaacggagggagtattaatctttactgagtaacctaaaaagataactattttgaaacagaggtactactgtactagtaatgtactacttgtattttagtattttcttcttgttttagtatcaaaccaaaccagtagtacactctcttgttttctcaatacattaataagaaacatggtatagtataactttctgcttaatttgtctttgactaaggtcttatttagttccaaactttttctttaaactttcaatttttccatcacatcaaaacttttctacacacataaacttccaacttttccatcacatcgttgcaatttcaaccaaactttcaattttagcgtgaactaaacacaccctacataaaacataccctcctgggaatggaaatttgttgatactagcttactagaatggctattactgttaggccggctgtcctcggaccaccagagggcagcattgtatcaccggcggtggtgtcagtagttttaaaacagattgtcgtgtatgaattttggcaaaattaactcaatcaacaaccgcaattttccaggtttttttttgacagcctcgatcctccggtttatgggcaatggtcggcatgaaaatcatcacacaccaatacgatttacaacttgcccacctaaatatcacggcaggtaagactcccataaatatttaatgtttaagacatgattcgttcaaacttttaaaattctccaccatcaataacttccaaatatttagcttacacaaaaaatgtattcatatatttatcttgaaaaatacaatatcataaattcgctggatattatgaaattattttaatataaaccctatggtccaaatcttatcctaagcatagaatatttacgacgggagggagtaactactggttagctccattaattttaccagtatctaagtatattcatgattgaattattttttgtggaattcataattgaattctacttgaattatattaaacttgaacaacaggacaaaattatcaatacttcatcactcattaagagtaaaaaaaacatgactactacatagtagtccctccgtaagaaaaacaaatccactattgagtgtgacttaatctaattttagatttatttttttataggatggagggagtatacttttaggttagttaaaatattgttcccatttccaggccatactatgcatcagtccatcctcgatcttgtactgggccaagtttttagatcccctaattccattcatttggacgcatacgtaattccataagtacgcaaaaactatgaatatttctcgtctaaattaaattagtccaaataattcctaaatccttatggttttgtttttatctctttaactgtacgtaaaaggacatgaaaatttgttgggaatgcatgcatgcatatgttcccacagatcgagggtgtatatgtacgtaagtacagtacaggcgtatgtacgtataatatacagcacaggagtatactacggcctagcctggtttagttactaacttttttttatttgaacttccaactttttaatcacatccaaacttttctacatactacgtgaacttctaacttttttttcttcaaactagtaaaattctattctagttttagcgtggtactaaaacacaccctgcgttcatttggtgtttacgtgaaggcgttgcgttgcgttgcgtgccgtcccggccagccgccggtcgacgtgatcgcccggggtcacctcaactcctctccatcgatcatctgaattttactccgtcagataggagtactctgctggtgtacaagatttgacgggacagactacaggtgctccttctattaaaaaaacctactacctccgtctcgtctcaaaataagtgcagccatgagtttccccgtctaactttgatcatctattttatttaaaaattttttataattaacattttttgttgctatgagatgataaaacatgaatagtacttttactcgtgacttatgttttcaatttttttttgaaaaattttaaataagacgaacggtcaaagttgggcgcggaaaaccatggctacacttattttgcgacggagatagtaccttcctccaatctcataatataacggattattttattttgagaaagattaaggatgaagacaaaataccacagtacccctattaaatgtatttttggttatggtgagtgggtagttggaggttaaaataggtagagattcaaattagagttgatggatgtgtatattgtatgacttgtagaagggataaaatatcttactccatattattgaacagagggagtaggttatttaggccgagtttagttctaattttttttaaactttcaactttttcatcacatcaaaattttcctatacacaatcttccaacttccgtcacatcttttcaatccaaacaaactttcaattttggcgtgaactaaacacaccttttagcataaattaatgtttgaaaagtaaaactacattaccccttatttgattggaagcaagagaatagtagtgaggatagaataggtagaaattgaatcggaggtaactgatgtgataagtagtactccatccattctataaaaacgaatttagaatcggatatgacccatcctagtactataaatctggatagatatatatctaaatttgtagtacaaggatatgtcacatctgttactaggttggttttttatggacaaagggagtactctcaagcaagggtggagacaggagtagggcagctagggctgcagccctactctggatcctaaaaattcattgaaattccgtttctaaatttcaaaaactagaagataaaggcaaaatcatataaattcaactaattgagctctaggtttagaaaatttctagctcctccactgctctcaagtaacaagtattgtggaacaaaatttgaagtccagatagacaactattttgggacggagagagtaatctaggtggagatttaacaccatagaggacaacaaatttggacaagaattgtctatattcattgttccagatggtgtctaattctcacttaggtttttttgttttgacgaaaagagcacttcactttatttgtagtttacttctttataaagggtttggtgattcggagataattctttattctccaccaatctattttttataatttgtttatccatctattcattttcattttgtatcagtttaatcctcatgtatcataatcgtattttttagataatggaaatggattacatctccggcttctatcataagacacacagtcataaatttaatagtaataaaaaggtaagataaaagtaaatcaaaataagaaataaggtgatgggacaaatccccaactcccctttattattgactagtgttaaaccacataaaatttttttagctagcaattctaatgtatcataatcgtataagttctgaagggcgagtagggaatttgggttagtagtagagagacatggctagacagcccaggataccacatcttccaaaatactccctctattcaaaataactaatatggacataaacatgtctaaattcattgtcataagcttatgtctatatttgttgtactaggttatattttattcttgcttaggttggtttattttttagtatggaggaagtaaaaccgggtaggattgccaccggtcatggtttagttagagctttgttaagagattgcttatactatgtagctacttaaatacttttctgaaacatttttttataatttattttgaaaacaaaccttcattatcctcataatagggataagaaaatgttatcacatcattcactatggtgtggtcaaaatatctatatattttgtagtacttaaaatattagtagtggtggtgtccgttctgtcagaacacccgtccatctttccaaatttcaaaatcaccaacttgtttaataaggaaaatcatataagtattatttggactaaatatatgcttaattgacttttctagaaactcaatttgttttccgttgcaacgcatggatttttggctaggataaatctaaattttcgttgaaagggttggaaaattaactccttttttcatgcagtttttgcgatgcttgtattatatgcgttcaactcactttgtccgaatctaaggcacacgctcgtgttctgcattagcaatcgctgttgagaatataaaggcacagatgctcattatgcttcaactaaataaactaatttttactttttacaagtctaagaataagatttagttcatttatccgaagtaaaatggatccactattacccacggatccacgtacgtctaatttattctacatagtactatataaaactacgctactctcgcccaagtcctgaaaaaagataagtcattaacgtatgattaattaagtattaattattttaaatttgaaaatgaatcaatatgatttttttaaatttttttaaaaaacactggtttaggaagcttatatgcagagaacgaaaagaaatgtcactctttatgcatggctcaaacgcagaatactagtactagaactcatatactccactctctctgctgcttttgcttggtcccttatccagtcgtgtcagcatatatagtgacatggcagtgcgtgtcagcatcacgtttttcacgctagccgggtgtagtgtcatcgcaagatctggtcccttcaattccatcaccgccacgtggcgatctaggatcgagtcgatgatcagtggattagagcaagttttttagtatagcccactgctaactttaaatcatctatagtcaatgtaatagccaattcatacaatagttgcttactatactattaatacctggtcccacatatcatacacacattacgtcttgaagtccgtgctgcagctggctatagatctgtagcccgctgctcttctctcattttctttatctctttaaaatatgcttatagctatcttataggctgctattgtacctactcttagcaagcaagagagggtacagattgaaggacagtcggcacggagcaacggtatttaggctatactcctatgtaaaaaaaaactaatccttagaatgaatctggatatactgttttcctctattttattttaaatgaaatagcatattctcgtgctaattctcttaaaaaaagtttggatatgctataagtttggactcatctttagaattgaattttctttggatggagaaagtatgtgtaaacccttttggttttttagtttttgattgatcatacttagaatatactctacttttatacgcatagttttacgtttttatattatgaaaagtagaatacatttcaaggtaacaactaatcacttctccaatgttcttttccacctataattagctaatagattattgcggacacgcttcataaaccactaaaaaatacaacttttttataaaaagaaaacctttctacataaaagtcactaaaaaattcaaacaaatccatttttaatatttttaatagttaatatttaattaatcatgccttaatcagatttcttctcttgcaagccaatcgttcctattccatccgtctcaaaatataagcatttttagcatagtatcaagttaaacatttttaactctggctattaatagcaaaaaatttaaaaatatcgatcatgtaaaattgacattactagattcatcattaagcaaactatcataatatataacttttttttatttaaaacatcttatttttatagatattattggttaaaataacatcttgaaaaccgtgtccaagtaaaaaatgtttatattttaggactgagtgagtaatgagtacctctaagagcaggtacaatagtaggctataagccaactgcaaacatattttaagaagataaatgaggagagagaagagtagcaggctacatatttgtagccagctgtggcatggactccaagacgcagtgtgtttatgacatgtgggactaggtattaatagtgtagtatgtaactattgtatgaataagctattaaattgactatagataaattaaagctagtagttgactatactattaaacttgctctaataccataccctgtcctgacaaagtgaatgccattggaccaattggactacctctaatagaatctaatattctatgatctctatttggttgattgttgtaataataaaattactgttgtttctgaaagtattatactacaagtagaactaatctgaaccgtttattcttaagggtacaatagtaaagtactaagacagattaggggtaaatttgacatcacggcaacgtcggttacgtcgttgtgttcgatcgtcggtggcggcggcggtggagatcatcttgagggcggagccgccggtggtgaaggccttcttgcggacggccttgtaccccggccacgtgacggcgcggtaggcggcgctccggccgggcgacacggcgtccgtcaacggcgccaccttgacgtccggcaggcgggccgaggaagtatccgagcgatatcctgtcacggtcgcggttgacgacggcgcggtggtatacgctgtggaagcggccgttggtgagtatgcatgtggaagagaggtcgccgacgttgaggacgaagttgcccggaacgatcgccggcaccgccacccaccggtctagtcctcgccggaatagctacagccctgacacaatgctctggagcataagccggagtcggtgtgtgcgatgagtcccagagctcgccgcaggtccgggcacctctggtaccagtgcatcgtcgccgtcatcgtcttggcgatcctcctctccgcctcaacgccagtgagacctagcgcccaccctgaggaacaactccagcagctcgtcggctagccgccgcatctccttgtggaactcctccatgacgtcaccgcgtatattatacgtgcatcagtacacttatacgtgtacacgtagtagtagacgagcagctcgagagagggtgtgtgcatggcggcgacgggtgtacgtgagaataccagaagaggagccgaggaggtagtcgtcgccggacttgggccagagacggcggagcttttgcttatccaattgcaaatgcgtgccggatcagaacgagagacgagtgagtgtagctaggtttagaaagtgaaaaggacaaatacctctccacaaataatttttctgggacaaaaatatccctccacaattctactaccattaaatgtggtgggagtagaaatagatctgagccgttcaatcatatacaattaacggttcaaattattttctactcctagtagaaagcaccggagtgggactcatgattgtttgggaccgatggctgttacgcgaggtacaaaatcattaaaactgatgttaattcgcgggtgcagacatgctccctctcttggtctcaattggtcagccacacagtctcacctgtctcatacctgttcgatttttttttccttttaattcctcatccaacccgtgccaaaattcactactgaattattatacaatattgaagagaaatgatcggtagaaaatgagtaatgttctgagtaaatttcaagagctaagtttagctatgtgatgaagaggcaaactgaaagtctgaaagcaattacatttctgaatcctgaaggtacgaagaactgacggagtgatgcaattgccagaaatgcatgtcgcgatgagcacctctctctctgtctctctgtctctgtctctgcagcatgtgagctctgaatatgcaaatcagagctgcaatttttgggaccatggcgtgcctgattgcttgcctgcttgccgtgttggattcatctcccagccaagaatttcaccaggacaagataacatgactcatcagctagccttgaagaattcacacgtctgctgctctagaattcacagtgtaggtagctgctgcactgtcgactgttcttcggtcatcacacacagcgtcataaaagtataaaacagagattttatgagagtttagcttctttttctttgttttttgtcttagcacatcttcattcttcctgcactgatgcagcttcctcttcatcaggttcagaggcagtgatttggtctgatcgtttgaacagggctatgtttttctatcaatatattcagctgcttcacagctcttttgttcccaacatgtactcaaattcagcaccattagttgatccattcagactgattcagcaccattaggagcagaacgctagggtcttcgactctgacctctcttctgtctcagtggttctggattccatccattcggagggccgtctgtggtcgttagctggcgttgccgcttttggggacctgttgggagtatagcgcggctcagccccttcccgctgttttagagtttttgtttagcctccgtagttttctttttctaagcctcagttttttttattttgctttttctcctttcccctggcataggccggtctggccgattgcgtggtgtaataactcttttcttctaatatattgacgtgcaatccttttgcgcgttcgcgaaaaaagactgattcagtgatgaaagttcattcagatatcacccatcagtcattcgacagtgagatggagcatggactacaaacttgttgatcatcgtgtttctcatgtaatctggattaaggatgtttctccctttgtgcatatgtttgcattaatgtctgctcattgagctaatgcatcatacagttgttctttccttttcttttccttcaaatcctgaatctacttcatgtgttaccttgaaactttggttgtctggcactagtaagcagtagtataatagttttggagcataatagggaatattgtccccaagatcacaggatatgaagttggaatatatgcttgaattagaaaggacaatctaaaatagatgaacaagaaaaaaaaattgcagtgataaaccatagtgttcagtgcagcatagaggatcaacatcatctatttgcctgcactgcaaccgcatagtgctagtcagaattcatgtttttctggagcatgtttgagtatcagagacttcagtcgtaagaaaaaatgtactcctagctcgaacttcagcccaaaaagaagtagcagaaaaatgcaaaaatactatgcatacgatgtttggttacgatatttgtagttcttgcagaaaatgtcctgaaaaaggtcctgtttgattgaaccagcaacgatgcaatctacaataagaaggtggtagatgttaaactcgaaacacaacatcaaaagtagaatccaaaataatcacgacatggtttcagatatatatatatatactagcaaatatgcccgtgcgttgcaacgggtgaaaaaacgtaatgataatatacgtttttcatgcataaccatgtcgataacaatcagaaaattagaactacgaaactttattttctagcgcgttttcttttgtgcttttttctgacatttttccctcacgtgtttttttaaaccgtttttattttctcgcgcattttttccttttttaatatactgtagaaacttctctttttatagttagattagattagattagagataaagaagatatataaatggactaaaaaacgacgaatataaatttgacttttttcctccgcgcttttttccgtccttttaattttttttctcgtgcatttcttttacgaagggtttttttcaccactttcacatagtgtcaaacctttctagatataataggattcgattttttttaccgcatcacgtataattcctttttctttagaaacagacaattttttcgcccttttttatcgcgtcaacggagtcggaatcgttttgattttttccctttttttggatcggacagatttttttttgcccggtttatttcgcccgatcgatttttttaccgcgtcacatataattccttttactttggatttttttcgccctttttttaccgcgtcgacggagtcggattcgttttgattttttttctccctttactttggaattttttcgccctgttttcaccacgtcgacggagtcggattcgttttgatttttcccctttttggctttttttggataggacagatttgtttttttttcgccccgtttttttatcggacttttatcttttttttcgcctggtttttttatttttttaccgcgtcacatataattcctttttctttatcggaaagttttttttcgcctttttttaccgcgtcgatggagtcagattcttttcagctttttccttttcttttattggacaaatttttttttcgcccatttttttttctcctgtttttttcggatcggactatttttttcttttttcgcccggtcgatttttttaccacgatatatataattcctttttctttggaataggacagttttctttttatttttttaaactctttttaccgcgtcgatgtagtcggattcgtttcgatttttttcctttttttgctttcttttttgtcggacagatttgttttttttccacccggtttttttccgcccaggtttttttatcggacttttcttttttttttctccacgatacatataattcatttttctttggaataggacagttttctttttatttttttaaactctttttaccgcatcgatgtagtcggattcgtttcggtattttttccttttttttccttttttttgtcggacatatttgttttttttccgcccggtttttttcgccaggttttttttatcagacttttctttttttttcgctcggtttttttctcccgttttttgacagacgacagaagcacatagagaagtgtttttttttcttttctccaatccaatacagatcggatctcttccagggaaatcagattttttttctccaggatcggactctttttttttcgctttttttattcattaaacggtttgtctctcggacttttttttccctttttaagggatcgggtgtttttttgccagggacgggtgtttttttcgcccggttttttttttcactttttttttggatcggacttttttttcgtccggttttttttatcggacaaacttggttttttctgcccggttttttttcacccggtttttttgacggacgatggaagcacctcttattttttaaaagtagtagtagaagtagaagtagatatacacactccctccttcccgttttatttgacgccgcaagtcaaaaaaattagtgtcacaatgtttgacgccgtaagccaaatcaattgaagcattccgtctttgcccttgtcctccaacaccgtgatgccgctgccgcgccagtgggaggcggcagggcgaactgatgccactgccgcgccaggagatcgagcatggagctgggatgcgcttccctacggctgcatccacaactccctcatgccgtcccccccgctactgcttgctatcgaagaggtgatgatgtcgctgctcgccgacgatggcctcgtcctctgcctcggtgccgtaagccatcgccggcggcggcggcggcatggcggacgtcgaggccggtgcccgacgacgaacaccatatggtgcttgtgtagaattcgatatgcacgagagaggtaagcaactcagattgagtgttaattctattgatgaatttgtgtttgaggaatcaaaagaatcgatttctgagccgtaattggaattcaatccttggttgcagttgtggatttcgatttctgagccgtaattggaatacagtcattggttgtagttgtgggttttttatctctaccctgccaatggtttatggttcacattttcatgtgaggaccgacttttttcaagattaggagaagctgatttctgaatatttcagaccagcacccagcagcatcaagttcagatcagaacgcagcaacagcagcacgagcaccatttcagaccagcaacaacagcaatgctgtgggttcctgctcttgtgtggcggcgacggcgtggggagacgacatgcaagacaaaatcgagacgacgagctggaggcctcgtgcggcatcaaggcggcgaggcagacggccgcctcgtcgccgagccggcggagacagcagtatgtacgagacatgaacaaataagggcaaaatcgtaacttcattgcttccttaatcctgtcgaactggtcggaaacgtcaaataaaacaggaaggagggagtatatttttgcaactgaagtcctgaattcagaagaaaaactggcaagatggactctctaatacagaagtatatactgaatttattaagattctgatgccgcaacatattcttgaatgtctgcagagtaaagttgatgtgtccaacagtccaagctgtgttttgagtataaaactacgtttggatgccatgtctttggctctgaaataaacaaaagagcaagagagacaacattctttcaaaagttcagattggtcttagctgatactacggatgatggctgggttcagaatgggccatgttctgttttttcgatgggccggccaaggaatgctgagaaacgtcagggcaacaattaaggcccttttcagaagagctaattgagtttagctactcctcgttttctatttgtatgttttttaaaaccactaagactgtatatttcatatgaaaactttctatatagatgatttaaaaaataaaataaattcatttttaaatttttaataattaatattaatcatatgctaatcatgtttctcgttttgcgtgcaaatcatatgtcgaaaataacgtatcctaagtatttatttttttttcagaatatttatccgattattgaaacggattatttgctccacacttcacaaaagacatttctttcagaaaactttcttctattctgttacttggaccaattgttttaagctattcttttagtttatttatcaaaatatttaatttatccttatagtcaagtagattatccacaacaacaatccataaaaaaatttgtttcaaacttggccttaagtttgttgaagcaccatcctcaggctgtgtctgttcccttgtgttgggaactaatttccttcacacagaaaacgagataccttattagcgcatgattaactaagcattagcttgaaaaacttgaaaaatgaattgatatgatttttaaaacaactttaatatagaaacttttaaaaaaatcctaggcaacaacggaaaatcattgagagcgtcaaagggttgcttggtaatacaggatatctccagaatctgtggggtttcagtgatggggatatatggaatttgcatcactgaagaggaagagcacacgctatggttgtaatttattcaggtttgaaggcaatggtgagttttctctttgggcttgttcagattgatgtcatttcaaatcataccttttttttggtaaagttgccaaatatgtgcatccatttagtttcttaccaaactctagtaaaaaaaagaaatcctgccaaaacttggcaatattgctaaattgataaaaatttggcaataccaaaaattggtaaggtttattttggctacaatctgaacaaacccaaagtatcataggatcagtctatggcaccgtgtacgtgaaaaaatgaggaagtgaagttagaaatgttatccaaagaacacagcctaataaaccagtctacactatgacgcacaaggaaaaacacccaagggatgatctgagcatttcgttcctttcaaagtagccgtatttggcaattgacacatttgcagctgaagaagaagagatgaatggcagattccttgtttgagatagattatcgattggattatcaacttcattatagggataagttaaatgatttaaaaaataaaattaagtctaaacaatgcaacaaaagaatgttcttttatgagaactatctgtagagacgtagagtaaataatctgtgacaaacaatacacattcagaaaagtatagtacaatggacatggccaaagaagaatatcttgtagctaggccgctgaagttgaacatagcccatccaccaaagatgaccagcagatttcaccaggacccctcaattgcagttgtaccccggacgattttattgccatgttcagaggattcttggtccgctcatctacatcaaagatatgatagaatatttttcaaccatttaataaattcttaaaaattaactcggccaactttccacgtatagcagtattgagtgtatatgtattgactattggtcactaccttcgtgtttactatttggagttctgcctataatatattcatgtttaggcgggagtcatgaatatagttgtaatgtaaataaatacatcgtttttatattaaccgataacccaaatgtaatatatcctacaataatagattacaatatataagcttctttaaaatctagggaacattaaaaaaaacacttaggaacattcatgcattataaaatcatgtacttccttcatttcatattataagatttcttatatatatatctagattcattaacatatatataaatgtgagcaatgctaggaagtcttataatatgaaatagaggaagtagatttcaaaacgctagagtactatagttgatatgtctatatggttcaaagcaaataaatataaacaattctctactctaattgcgattatggatttggtttattacttatattttctcggatgagtgtgacattgcctttgactatttttctagctatggtatgccatgttcaatatctataattgcatatattgcataaatggaaaacccacgggtactcaaacggcatgtgcatgtgttctatttacagttgataagtgtattgtgtataggccaaacaagtaattttaggtctcaaattaagcatattcttgctccgcagaggttgatccaattcatcgccaacatcagatatggttcaaatcatagctaccaacacccaacagataccccatttccatattaagtgcatcaatattacttatagccattggatagttatcataaggtagcaactgtttaagttagatttattatttatttaagttattttcactttggaacactttcaatcccgttttggacaactctttaattaatattttcattctagaccaaacaattttacatgatgacactttgaccaccctcaacacttttatctatctatatgttcttttaatacatcaaagaaatattctagatatagttatgggagtttagagacgaataactgacgtaatcaaaatcatttatatgcttgataagagcattggtgtggttaaaagaaaagcaagattagccggctaaaaacttaagttagaccaaaataaaattacgagttgtcagtgctgtgcctatatgtgcacgcgtgctattatcttaaaaagaaatgtgcacgcgtgtgggagccattttaatcattttaataaggaaaaaaaaaggagagaagaaagtaacaatcccgctattattacgtcatatttccgcccaaccatgagcccatttcattttcctcctcctcgcctcggtctcctctcctctcctctcccaaatcgaagccgcctcctcctccgcctccgccgccctcctcgccgccgcgtggatccatctcatcccctcgccgccgaaaccctagacccgcgcttccatggtggtatgaccggttggcctcgcgattggggggtgggaagccggtgcggtggtggtggtggttagggtagcagaggcattcggcgggcgatcgccgtgaagcgggtgtgtgtgggggccagcggtggcgccgggcatggcggcagcggcgaattcctcggcctccgcggcgggggccggcggcggctccgcggcggcggccgggctcaagacctacttcaagacccccgaggggaggtacaagctgcagtacgagaagacgcactccgccgccgtgcttcactacaaccacggcgggaagaccgtctcgcaggtgagctcgctcgtctccgggaggggatctagattggggtggcgtcggactcgcgtcgagggtttccgcggtttttgcagtgtgttagtgggatctcgattggcttcgaggcgggttctagaggaacatttttttaggtagtccaagtttttaggtcgctggtgcagattttagatggcgctaatttatttcatgaacaacttacgtcgctgctagccttatagagatcttattcgttagattttagcgattcgttgagttgataaggttgcaagttcaatcggtagatctctctcgatcatgtggtagtagtgtctcagcttgtgtaatgcttagttgtgctgtgtggcctatatgtgttattcctgaaaatagtttttgtggcgttgtaagtgctgttgttgatggttctagttattgcagttgacggtagcgtatctcaaggagaagcctgccggacagggctccacgccttccacgccaagctccagcagcgggatgcgttctgcagcagcgaggcttcttggctctgggaatggtaaccggacgcttagctttgttgggggaaatggtgtaagccgggctgtgtctgggagcagccgcattgggggtggccttggtacatccggaggcattggtagttcacaagctgtggcaaattacgatggcaagggtacatacatcattttcaacaccgctgatacactattcatcagtgacctcaattctcaagacaaggtctgtaccttttataatggtttagtgtgaaatgtagtttctagtgtttattgtctgctgataagcctgataactgcaccaggatccaataaagtccatccatttcagcaactcgaacccactatgccatgcattcgacccagaggccaaggagggacatgacctgatcattggtatggggtcaggggatggttagtatcgttattagcttgaatcactccattttttgaagtgtattttgtataatcacgagttttatatttgcccattctgcagtctattcaatgtcactgaggcaacaattgcaagattctggaaggaagcctgttgcggcccaacattacaacaagggtgataaagatggaacaagcactggcaggcatgtttaaatttttcacttttcatttaggtgtcagatatgattgcttgactttgtttgcacttactccctccatcccaaaatataagaacctaggaccagatgg

SEQ ID NO: 5790 - DNA, 23751 bp, Oryza sativa
ttatgcatctaaagtttatacacttaaagtttatagacccaaagtttataagtcaaaagtttacatacccgattcaaatttgaatttgaattatatccattcaaatttgaatttgaattcaaatattttctatatatggtatttctatgcatctaaagtttatacacctaaagtttatagacccaaagtttataagtcaaaagtttacatacccgattcaaatttgaatttaaattcaaatattagtttatagacccaaagtttataggtcaaaagtttacatacccatttcaaatttgaatttgaatttgaatttgaatttaaatattagtttatagacccaaagtttataagtaaaaaattacatacccatttgaaatttgaattttaatttaaatttgtatggtgtagtagtaagaaaaaaaggggaggtaaattagtaagggggaggggcgggtgatcgcttggaagttgggagggaagggagcgatcacccgctcattaggagtactcatttaccccctccgtcccataaaaacccaacctaatatcagatgtgacatattttagtactacgaatctggacatacacatattcaaattcatcgtactaaaatatatcacatcagattctagattcgtttttaatgagacggcgggagtaggtagcaacatgggtggaagagaccacaacggcaaggaaaagaagacgaaagaggaggcgccaactcatgggtaaatcagttgtatacatttccatcacactcttgtccagaatcagaatgattattctattttcacctattaacattaaatgtttttaatttgtctgttgtttgtttgcaagaagacaatagcataggttgaggtagcctgtgaacatgacaagaaagcttgtggagccaaaaatgtaagcccatttctctgaatttctgagccatggaatgttgtgcatgttgaacaatgtctgaatattgtcttggtgttgatcagtcagtgcagcgcaagttaggcacagggcaagaatgccaaaccttgatcttccgtaacaattgttgttcgcaagcccggtgacgacggcccaggtggcccaggagcaggcagcgctgcagcagtagcagaactacccaattgactgagtgatttgatgtggcatcgatcttagttagagagatccatgcacttatgaataagaactttatataaggattgtcgaaacaagatttcggtaagatttcggtaatactagaagggatggcaattaagttagaaaagtgaatggatcaggagacagagaatttatacaggttcagatcatctcaatgagaagtaatacctactcctgtccggaaaaatattccaccgagtttgttattaatctgatgatctgggagaaacgttatgcccctaagagcatccggacccctccttatataggggaaggagacgagattacaacatacaacctataacccttaattacttgatacacaaattaacataatacccgagtcatttcctaaacataatctatctacatgatatatcccttataaaccaatcggatatccatattatgcgggtatatgatacccataatctccacaagaattggattagttgaattgttaagaagaattggatgtgattttagatttgatgcaaagctacgtactggcctattactagtagtatgaggtatcaatttaatcccttgatatgctcgacatttaatagatcatgtctgaactttctaagggcaacgacaataatatagccgattgcctactataaaaatctccaactcaactagagtaagcactacagacaacgtttttaataattgtctctaccacttactcaaaaatattattattttatctatctttgtgggcctaatttttatctttgttccactgtatttatggtgagcctagggatgaagcatactgctggctgcatgagccttggcgcccgtgcatcatcgtcgattatttagtcgacgacttccttctctctcctgctttctctctcctccacctcatatttctctttctctgacgtatgcaggctaatagacggcttccctagccttattgcacttgccctaagtgaactctctggatgcgttgtggtacttgataattaaggtgtgtgttgatgtgattaattaccaagaaactaatgtaatttactgttaggaatacacacacataaagaaccaagaggtatgtagtgacaattgacaactgacaatgatatgtaactgaataaaatgtaaaagtattatatttggttgagtgccaaattttatttttcatcacttgcggctaggttaacggaagtgagccccatggcactctttattctaactcacctgacccgcttgacttacggtcaacaattcaccaaagtggaccatacttaactatattctttccaacaagggtcccttccaacaaagtatatataatgcggataaaacactctcacttaacactagttttattagaaaaaactccctttcgtttctaaattcttgaaaatagacactattcatatttaaataaccactcgtgctttttgctaaaagaaaaaaaatacaaatatctaaaaagatgatgtactttaaacgtaacttacgtaagaagttatgtttatatcgtagattaaccatttaaaaattattagtggccaaactcgtaatagtagcttgccaacaaaaaagatacttagatagaaagagtaagaatttatccatcggtcgttaaataagtataattttaactagtcaaagacattaaacaaaagatttaaaaaaactatgcactttattaatatggagagaaagtaaggagatggagaaaataataagagagattactattgattcaatggctaaaaacaagattaaaaagatgaattagtagtgttagaagagttctactccacattaaaactacatatttaaggataaatcttgagactaacattatatttattcaggaacatagggagtatattcttaacaatagatagtacacataaatgtattatcacataattaagtacttttcttaatgcaaagatatcatatatacgtacactcaatatatagatgaaacaaaattgacatacacaaccatacatataggcatgtgcatagtactccacgcatgtaagaacacaagtagagacatgcgtgtttacacaatgtccagttataatttactccaagtactatctccatcttaaaatataataactttatacccgatagatttgacacaatctaatattattgaatctagatagatttattcataacatcaatttatgtctaatttcgatactaggttactatgtcttgttgaggatgctgatgcctttccagcgagactccatgcggttggacgggttcgtctgcatgtacacgccgaacttgaagtagtgcgagtcgccacccttgccggcgacgcggagcctctcccggccatcaatgaagacggtgagctgggaggcggcgacgtcgtggatgacattgaggcggaaccagcggtcgtagatgttggtctccaccacctgctggtggtagtaccaaaggtcgccgccatagacgtggagcatgagggtggtggcggtcccgccaccgaacacctgcatgatggacacgccggtggtgccggaggggacgtaaccggtgccctcgaattgccacacccctgacgagtagtcataaccctgcatgcaattaattaatgtattgtccaaatcaaatcacttttagattcctcgttaatttatttggatgtgattatctatagtaccttcatcccagaataattactccctctatcccataatataagacgtgctcacattctaaggtttaactttgaccactaattattgtaatataaattaaattttatttgctaaattaataccattggattgacatttaaatttactttaagatagttataattttgttacaataaaccttatagtatatgagaattataagtcaaaaattagttttgaagattgtgccaaatttgaccatgtcttatattatgggatggagggaatatattttaccatttaaattttatctaaaaatattgtatttgtaataaggtgaaacttatccaattagtttgacggagatatcatgtcttctgccctcccttttttatatccccatgtgtcttacctttagttctatgtatgtagagttattatgatcatttgtgtgtactgataatatgtctgaattttcaaaaaaaaattattattttttgggacaaagggattatggtcttatgcttatatgacgtggttgaagtttgatgtttaaattaatcaaactaaaacaattatgatgaaattaatcagtagttctgctctttttttccctaataatttaccactacacctcataaaaattacttaactcaaatcatacaattttttttctattcaaactttattaagtttgaccaaatttatagaacaatttagcaacgtctaaaacatcaaattcattttattaaatctagcatggaatatatttaatttaataatatatttgttttgtgttgaaaatgctaatatatttttctataaacttgatcaaagttaaataagtttgacacgacttataatattaaaaggatggagtagtataaatggagtggaatagctagtgagtacttcctccgtcccaaagaaaagcaatataggaggggtcacacctcttagtacaatgattctggataaaccccctcctgctacaacgaaacccctcacatctcctcttagattgcctagtcaactagtggtattcatttttccaacgaaacccctcacatcccctcttagattgtctagtcaactagtggtattcatttttccaaaaatataggtagctatcacgtgaagtatacgtatgggcagacttttgaatttgaccaacattatcttttagacacaaattaatgaaaacaatataaattatataattagatttatctccataaatacgtgttttcatgtcccatctcgtcatctctatcgatgtgttcgatgactggactgatttagagcattattattacataaattactgtagcagaaagtagtagactgagtgattattaatcattttattaatttattgaagctaactaattaattaatgaattaatcaagcacgccattatgataatacgcaccgtcatcctgatctccgtccttgggttggttccgctctgcggcttgaagggcttgtcgtcggagaagacccacagccgcctcaccgtgccgtcgaagctgtacctcgagctgctctccacgtcgtacggccactgcagctggaagttgccatcgcccaggctcaccgccgtgaacccgtccctcgggtcggccgccgccgccgccgccaacaccacgcacgccgctacaacccaccaagaagaagcagccatgtttgtagcttgtgtgtgtgtgtgtcggttgctttgggaattggggtgatttggaagaggtttatgtggtttatatagagctcggagggaagcagctcctatgacctggggcattattaaagaagcctcatcgagttcggatgggtggggattagagatcccatcgtttcgccaaataagtcaaagcaaaaaatttaaatttggtattgattttaagatattttctacgtaatttttttattattgatttttaagtcgctacgaaaaaatatatataaaagttttacatataaattattttttaatctctaataagccgttttggtttatcagggaatatgggcaactaatcaggctcttaatatatgacacaccttttttttaattatatggtacaacgcagacactcacaacgcacgcacacttacccctatgaacatacgcacgtaaaccctacctctataagcatctttgaagactaagccggcaaatccttgagattgacgaagtcaccacaggcgctcaccgtcgacgggtatgtcgcctaccactgaaagcacaacgccgttaaatcctacaaaattcgctcccatgaagagtcgaactagagtaattgaaataaataacacagtggagtctacttgttcacactttgatcaataataatttctaaactattttattttatatgttaaaaatcatatcgctatattcattttgtatcatgattttgtaattaatatgtagagtttagaggctatttctagaattctttgttggaaaatagtgataaaagcgtagatgtgcagtttagtcaacattttggattattaaaaccagtagtaatattgttaagtacggagaattccttcttaaaaaagattatggagaattaccacaagtggtaaatatgtttagtccccagtgtccttttcatgacataaaaaagttctataccatattttaagctttaagttgtctatagtaagagaaaaaacatagacgattggttgtttccatcagttttagtgcattcttatactatattggcaatcaaaaccagtcaagcacgaaagtaggtcataattggtgataggttgttaaaatcatcatcctgaatcgaaatgagaaattctaaccatgatcacaattatataatcgtatatataaaaatcataaaattatatattttacttatgtagaatcttacaatcaaagcatcttaattagaatcgtaaaatcgtattaaagaattgagattggctagctaggtttctaattaggacagcttcatttttgctttgttttaccctgtctccatggatttggtctatggtcatgttttttaacacttcgttgtacgcttcgctaagcgcttgcttctgaacatcggaattaccttccgatctgaacatgctcgtcagtgacaacgaaccgtcgatcatctgtaccgtgcggacaacttcttgtttctttttggggtaaaagagctactagtatttttttgaaatctatttggcatggacagcatgtgtgtaactttaaaattaaatattttatttcaaaagtatgtactccctccgtccctaaatatttgacgctgttgacttttttaaatatgtttgaccgttcgtcttatttaaaaaatttaagtaattaataattcttttcttattatctgattcattgttaatactactactactcaagtttttaaataatattcacaaaagttcttgaataagacgaacggtcaaacatactttaaaaagtcaacggcatcaatatttagggacggagggagtatgtgccaacaaagacttttcgggtcaaatatatcggaacaatttatttatttatttatttatgcattagttccatccaaagttcacgggtgtcgcatacagagttgaagatgcaatttcagtgttgtctgaagttcacaagctgatgaaatgacgataataatggaggagaaatctctctgcttgactgcttctgttcggtaaccgacttcatcctacgctgagtttgaaagagagaatagtattgaggtttttctggcaccgaaatcaaggtgagtcattagcatatgattaattaagtattagctattataaatttaaaaatagatttatctattttagaaaataaaatacaccttttaataatttaaaaatcgtgctatcgaaaaaagatagagtagcgcgctccaacttatctttagaagtcaagccaagtaccaagcctctggctgtgttcggacagcttggttcccaatgttaacgcgcggaaaacgaaacggttcattagcgcgtgattaattaagtattaactatttttttaaaaaatagattaatttaatttttttaagcaacttttgtatagaaacttttttttaaaaaatacaccgcctaatagtttgagaagcgtgtgtgtataaaaaaaggaagaggggttgggaagaaggggtgcccaacacagcctagctccaaccaaacataacagtaactgatagctggatgcctggaaacatctgaaactgtgaaacatccacatcttgcatctgcagaatcacgagcacaagtcgccgcaagcttgtgtatgtacacacacacctagataaacttgaatttctaagcgataagacaagatcgcaattcgcaagccatattcaggccctattttgtttaggtttataagccaacttataagccgaaaagtctaagcctaaacaaacaagcagcttatttttgtttagtttttttaagccataagccactctaacactattaaaccaaaagctaggttggagaagcttttttggcttatgtgaggttgatgtatgactccactactaaacttaggacattaaatccaccggcttataaatcatataagccaataaacctaagcctaataaaagagtggcctcagtcagctgtcaattgagaaggatgatacaggtgtgttgaaaaattgtgcaggttggtcaatcatcatcaacccggctgctaacaatattcagcttacaaattagcagtcaatagtctcactagcaggcagagagatggcaaaggctccattttctagggtctatgtttgaactgctgtgtcactttgaagatgagatgagataattcatagatgaagatagtatcatggtattggttcagctaatattcagcttacggattttgcctgtgaagtgaaacggttgaaatttgatagctagtattcttcaagcgtatcatgatattgcttcctttctacgccctgtttgggaaacttggtttgtagcaaccagggtttacaattccgacaggcttttccgtttcgggcactggtggaattcggaatttcgcgaaatccggtggaaaaccggtaaattctgaacaaatttcataaaccaaaatttgaatacaaattccctaagtttaccgacaaattttcgaaaaccgatcagttttggcgaaattccgatcgaaatcatcgaaatttcgatcagtaatttgttttcctttttttaattctttattcttttcttttctgatgtaagtttcagtaaatacacataatacataatgtttttcgaaaatttatatctcaataagttatatgaatatcatagtatttataagattttatttgattttatttttttttatgaattcaaatttgaatttggatgaaacttctcgaaatcttaaacggtttatactttcgagcctcatcgaaacatcaaaatttcgcgaaatcctgtcggaaatgtaaaccctggtagcaacagaatctgaatgaaaatctaagcgtggaggaaaaagcctttcaggaagagcttcctcgttcagaattgctagggcttgcaggttcagaattcagaacgcttgggaagtgtgaactggggaaggaaggttttctttgctgaaattagaatcaggagaggagatgacacgatgacagaacccaagtgcacgcatgttctctataactgtttttttaaaaaattacatattacaacgcagacactcacaacacacacactcatccctataaatgcacgcaagcaaaccctacctctatgagcatcttcgaagactgggctgacaaatcctagagattgacgaagtcaccacagacgtctcactgtcgacaggtacatcgcttaccactgaaagcacaaagccgttaaatcctggaacctaggacctaaggtgtaactgtttttttagtgttaggctgtgtttagttccacaccaaaattgaaagttttgagaaattgaaataatgtgatggaaaagttgaaagtttgtgtggataagaaagttcgatgtgacggaaaagttaaaagtttaaagaaaaaagttgaaatctaaatagggccttacacgtatatgtacaactcatatacagctagagacacgccactatataaatcaatcaaaagagagcatatttatatgcactgcgaccgtttacaaccgttgatccgttgatcaaattcagtcgtacgtaagtaagacaattaagttatatgcatagcactttcctaattttttttatttcaggatgtttttgcgattgcagtcattccttgttttgtaattgtgatttcagaatcttaggacaaatctagcaacagacatggtcaggttctttcttttggaccttgcatttataaaatacaaaaaaaacacaccatcaccatgttgcatcgcacacgaccgttctttgatcgttttaaactcttacaataacgaaccagcacattttttagagcacccgcaatgataaagtaaggtgctatctataaaatatgtacatctcagcaatagactagattaatcgtataccacctcaatagtatatctacacatgggtttctatagctctctaatcaattgtctcgtttttctctatagattatttccaggttaatagatagttttgctctctctcttcatttaatctcttccaagtaggaaaatatgctgacatggatctcttgtagagagcctataaataaccattgtgggtgcccttaaggataaatgcccactgaaccccaaaaagcgcaagcaatataggaataaaatcctatatgtagtaaggatttcccacacttagcaaacaagtaagctgcaattttcttccataacaaaattaactgtgctacagtgaggatacagcaaaactatagtaatattctaagaaattgaaacatcaaaattgatggctgctggtgccagatgttttctggagaacttgtctgctcctttgagccccccttgtgagatgaacacgttttcgaggctttgtgttagcagggcttcctcagcatgcacagggagtttttctggtaagttttacgagccaccgaggtcaacttgtttctcgtgagtttcacaagctaccgaggtcaactttctggaagtgctaatttaaattgatgattcaagacctcttcttcttagactcagatttctctccatcatttcctttcctttttgatttcttcatttctttgcgcttctcttgcttgtcagcctttgtcttgttggatttcacactgataacaccgcttgcggaaatctttcctccgttcagcgccttctcaatctcatcgtcatcggcatcaattgcatacttttgcagaaactttgggtccacatcatcctcatctattgctcttctttgttcctatatttgcccaagataaggttagcaaagaaaccacaactttggcatgcaaatgcaacctttttttttattcgtgtttaaatgtgtcacgatattgtccacatctaataatggtgctcaaataatttaggtgttttctgtacgagacatatggccagttttaatattttaatcggggatcaactgcacttgaactcataaaatatttcaacatcctcattactcctcagtggacgactcaggattttaagtatgcaacgcattactgtatctaaactctaaagaaaacatacctttacttccctggctgcttcatcaaggtcctcatccaatgatttaagaggagctgtatcaatctggaagtagtagtcagacatagcagctattatgagattatggccatgcacaaaattttatctaactacaccatgagcattgcttccatgcccaccaatgaacaatgccaaatctggaagtgcaactattacgtgtcaatactaagttgacaaaaggaaacaaaatatggttgcttacttcctttagtcgtggtaatgttgcttcaatttcttttcctgcaatattatgaaggtaaccgtataacttcttcattgtcttgatgaagtttgatagaacctgttccctctctatccccagttcttcctgtcaacagaaaaaccaaaagaataagacatgccatctcgatgaattttaattccaagtattttgaatttgcttgggatcaacttgagctaacctttgtagcacctatgtctttgtcttgtagtcccatacagaacaaaacagctgcttgggcaccatgtagtgtaacaggaagcttctctgaaaaatactggtgtgcaagaatagggacaaggtccagaatctacaaaaataacagaaaaaggtgaaaattggaagtgtttcaatgtagctttataacacaacttgtattcatataaaggcaaatgacaacatctgaacttctaacctgattgagaaaatgctttcatgagatggaatttaataaacgaaaaggagagaagataaccttctctgatcatagcaacaaaagctacatttgcagaagtgaacggtaataaaatcataaggaggcagtgatttgcagagtagctgtgcaggtattaaatatttccagaaatctgaaagttgctgagtgatctataacaatgtagaaccccaatttgcatccctaccaaacctgggcctagaaattttgccttgaacaagtggaatcaaactaaagatccttcataaatttcttaccagatgataatcgaccaaattgttagaatatgcttccagccgcttcatatcatgtggtgatagcatatctcccaatatctttgaggtaatattggtataatagtctgagggttcgtgatctgaaaaatcaatcttggaagccaatacactgggaatacacagccaataattagaacatcaccaaatttctttcccatgaaaaaaaatttgaaacttcaatatacctcattgcaagcttaaaattgagatgccggaaagatgttcctaagagacgcctgaatctttgtctgaaatctgggcacattgttccaaaatttagctaatgcaccaaaaaaatcaagcaaaaggcaaaatctgaaccgtaaaccttccgtcagatttgctgtgtacagttaagaaatcaagcagcttcagtttgaaatgcattagatgaggaaacagaactcatgattttgtaccttgataaaatggatccaaaaatccacatttgcttgactcattaacttcaatgtcatcgctatttaagggcctcaagaccatacaagtatgctcaccagtcacagcactctgaagaatagatggaggaaacataagaagctactacaaaagaagaactgcagaggtgaagaacaacaaatagatcagattagatcattacaggaatttggcccacatagaatggatagaagttgtgcttccgccaaaaacggaaaagctcttgtgtaagtccaaaagatacaccaagataatggagcttttcaggacgacgttcgcgaagatggacaaggagtggtgggagatttgccctaggctttacggtctcttctagtagagaagcctgcaatagtaatatacaaaactgtaaggtagagacttgtggtcaagcaaaataatattgtttggtcacaatatattaattcaaataatatggtaggcaaacagaggcttgcatcacaatgtacataataaaagctgctgtgctatgtgcagaaataaaaaagaactactatctaaaaatattacaccatgcttattttgttcaaagtttgcaaatttaaaactgttcatacattaaaatatgtagtatgaaaaccatacaatatagttctaattgtagagctatttcaaactgttgcacaataagatatcaaatgggcataataaatagttgttcaaatgaaccttctctgcagcctcagtgatcctgacttcaggctcttcattttcctcctcatcctcagcaaatagagtcatttgcccttcatagtacctttcaaaccaaataaataaatgtcagtaattgagtatgggtaaacaaatccttgtgaaaaaattactaattaaattgccagtaagattagacaagtccgttccctatatctaccatcattaatcatcaaataccagtttcagccaaaaaaaaaacagaagagcatcaacagatactacaatccacagcacccataacccctagttggggtaaagaagagaaatgcataccttgtcaaaaggtccacagcagctgaaccatatccaagctgcattgacaaaggagaatatttagagtgtggagagtgatgttaacacgtgcataacagagttctataaaggcaataaacctcaccctcacagcacttggatggacagcaattcgtacaatccgagctcctgagagacttggaaacacgttgtcttgaaactgttcacaaaatttccatggtatttgatcaccagaaggtgaccgaccctcacttaggcttttcatagctgattttcgagatatttgaccttccaaacagacctgaagatcacaaacaagtatatttacaagaaaggtcaacatcttgaaatgttgtggcggttgtattcagtaggaactaccctttaaattttcagtctagattgttcatatcatctgaagatgggcatcagtggaagtgaagtggagaagttaaattttaacaagagttaagtactgaatttaacaaccacgtgaataaattagttcaatcaaggaaaggttcagcttccagcaaagctaaaaatgtattcagcaaacaatgcatagtaagaacaatgagttgaagctaaagatatgaagtaatagattttttttgtagggaatgggaattagttttaaattaaaagaacttttaaaaaacataaagcctgagccctacagatcagtcgttaaaaagttgaaccagatttgcataatgtggtgtgcacatataatgagttattacaccagggccaacacatgaagcttgagcacattctgatgaggtaaaaaataaacaatgcaaaactcactaaaaggttcacaattgaaagtaaacagtaagctatgaaacattgcagtgtctttacattgtcaactaaaaactgaagttggatgttttccaaaatagcatagcaccggagtgttgccgcagatgacaaatacatatatgatgagataaaaaaataaaaatgcaaaaaaatcccttaaattaaaataagtatacagacgaccacatgagatcatttcaagcgggagcaggtgcagaacatactcactccattcttttttacttgtcatttagggcattggcatggtccaatgcatatcatttattttgccttttctaatgatatatccataaaaacatattgaaaatataactacagaataatatttcattaaaaaaatgctaatatcttatttacatatgaaaccttaatgttttttgtgtatattagtgagttaagattactaggtttgactgcatggatcctaagatgacatctatttctgaatgatgggagtaccatcaaactgaacttcccttttttataacagtatgggcagatatggtgattcctatggcaaattgactcaacaacatcaaatagattgataaacgctgaatagtacaatagcaaattaagatgtatgtaatttttgttactggtgcatggcattaggatgcatttctacaattatgtaagaaactttaatgttgttcggctacaccgcaattagagaatcatatatttcacacttttggctactgtgcaagcaaagaatcagcatatggccatcattaagagaaaatttcaaaataaaatactaagaagatcaagcaggaagcagtttagaacctggactacacatagaatatccgggagctgatttttagactcatcgactgggcctagaaaataaagaacataagttagtacttagtacagcctgacagtgttgccatggtgaacagttgggaatgctgggcaattagtccctaccaagcaatacaaataggtgatgagccggcgcatcagccattagttgcaagtcattgggtgaatttttgtaatgggaagcaacataaagtgccatcatccgctgaaatattaaggaattatgataagcatccattcatgaataaggaaaaaagagcatttctaatccatacctgtaaaaatatctcactctccttatgatatgagaaaagtgtgtctcggttgacataataaagatcacattcttttggatgaggtagcctaaagaaaaccataaattgtttcagacatgcaagtaacttggaagaatacaaaatgcaatttagatgatgctcacctactgatattggggatggagttcgcaagatccaaacaaagtaaatcattaagccagctctcaataggatcaccagatgcatacctaatggactcatttaattcaattttcttaaaaagcctacctacaaaccaaaacaaaacacaaaataagtgtaaaacatccaaaaatccaaggttcttcaaaagaagtgcattaaacataagaacctctgttttagatgaaagtaagaagactcttacttgaattgggtccattatttggagcagatggctggctttgggattccaactgctgtaggagcttcaaagacaaggatcgcccagttccttcgtaccttcaatacaaaaacatccagaatgattacaaccatgattttcagtgttatctcatttcgaaaggaaagcaaacatacccattgacagtggatgataggaaaacaaggtatggaccaagcaaggacttaacaattggcaatggaatagcagcagcttcatcaatgacaaggagctcaacttgagaaagcttcccatgatcatgtggtttcagatactgcaacattaaaaacagttgaactgggttgattgatatcaagcaaaatattgctcaatgtgggaataagctagtaaaaattatgtctgggaaacaacaaactataaatacaattttcaaggtatgaaccttaattgaatttatcaatgatcatcaaacacactttattgaatgatctacaaacaaagaacattatcacgaaaacaataatggtatattatatatatgttttatgaactacagaggatacagctcatgtgaagaagaccacccaacaatctacccagaataacgtaaactttgccattgtgagatttttacataaaatctcaggaaggaccagtatgcattaaaaaagtaccagtcctaattaaattttgtatcatatatgctgcgtttgtgtaccttcacaggcaagtaatagtaataacaaggacataagtttttcaatcttctgcagcatttaatagactggattattgaatgtgatatttatagcagataacaacatcagcctttggtcaaaggtaagttgggactaggctaaggatgaaacctaagtagaaacaaatgagctaaaaggggggaatagctaaaaaggcaaaagattaagctagttaacaaaaagcattccagctcatggttctagcatatgaatagctactttccacaaactcctacccaaagccagttctttcgacaccatgtcttcttttaactggttcctcccatgacagttttacataacccatgcctccttgtatttttgaaatggtttcgagtgcactacagactagttcttcagggggggctccatggtatgccaaaccaccacaagcgatgttggacaagcttctccccaatcagtgccactcctaccctaccatgtttacaataatttctaattcaatccgtccctgtatgaccacaaatccaccatagcatacaaatctctgctacaatcaacttctggatgtgttttcatattataaccagacataaggtaagcaaagaactatggtaagcaaaaatagcataatctcaaagtaccaagtcaactaccataatattggcatggccataagataatgtgcattttaaatccaccaaaagtttagtcctcccaaacaggatactaaaggtttctagggaagctaaaggatccctttgctcatacagtttgaactttgaagcccctttccaccaacatctgataagtgataagtctaaacagaacagaaagaacctttgggtggaagtagtaactgtctacctggatcgtctgacgatgctgcttgtagacatttatttgaatagttgccttcttgagttctggatctgcactcttcaccacatcataatgcaaatgctcctgaaaggggtgaaatgatacatacattaactgcataatacagaattaaactttttaactccaagactagactagacagacaccttgtactccagtgcattcattcccttgcacacaaaatcaaacagtgtttttaggttctctggacttggggctgtgacaaatatgtttgaatacctagaaagacaaaagattagaattaatcacggagaacgcaacagataattaactttaattgagttgagcattacccagcagcaatggctccagcaatagcaagaccaagggcagctgatttcccgcgtccgcgagcagcaagcaaggcaactgtgctcctcagggacttgtccaaaatagagtcaaggaaattgatcacagctttaccctgtacataactcttaagtttcagcatgctgcaaaatgaaagatttcatgtgtaaggtaaactaaaacaggataggcactaaacagtacctgatccatcgtgaagcactttccaattaaaggaccaactggaaagtcttcacggaattgatcttttagatctttcaactctctctccctttctgacagtccctcagaatcctaaacatatgttaaaatatatatgacatagcagaataagatggcctggttgaaacaaccagaatatccaagagattcataaaaaaggggaacaactcagcaggagcattcataagatcaaaaggcaccatcagcatgagtagacaagacgagttatatggaaaaaaaaagagagagagagaaattaagcacacatacctcattgttcgtaactggttgtataaatttcatgtgagaggatataggcaaaatgttgagttcgtcatccatgacgacacatgatttgcaagacgctatggatagcaagaacctctcgttgaacctagcagcagcctgggtatgcgactctgtccggaatctttcatggacatcctgttggagcaggaacaactcaacttagtcaagttatctcagcaccgaagctaagatgtagcatgtaaaccaaaattgtcccaagtttattgatagaaatgggatcatgtatgtatgcatgagagaacaagagaagcagaaggtccaacagagaattgagctcaccatgaccattgtataaagactggtgagagaggaaagggagcggagcagcaggatgatcaaaccaccaccctcaaccgtctcgatggtcctcgcgagtaggttgggcgtgagcgcctcaaaatcctgcggcgccaacaaacaccatatcagtacaggggaattacactacaccacaccacagcagcaccaaaaaggagaaaaaccaagctaagcttgatgttagacagacagacctgcaggatgcacatgccgaatgtgttgccaagaaccctctcggagtccttgtagaggcagtaggtgatgtcagacgtctccaagaagagcgagaaggggtcggccttctcggggtccatgagccccctctgcatgagcttcttgatctgcttggcccgcttcttcttgtggctacacaaagcattccatacaggtaactggaacggcattgctcacacatctccaattcaattcaacaatcaatcaatcggtgcagcaaccaatcgagtactcgaatcgaatcttaagctaagcgaatatggtagagtagggatgggtaaggaacctgctgatctcgagcttgtcgcggtagcaccagaggacggaggggcgggacttgacgcgggacttggcgagcatgtagttgaggttgacgatctggtcgcgcgacttgtcgccgacgatgacgaacatggaccgctgccgctcccgcacgccgttctcgatcagcgtccggatgcgctcgtccaccttcttcctcatcctcgccctcctctcctcttccccgccgccgggccggtctcgtgtggtcacaggagatgagagcgcgcgacggatagcgcggggcggacggcggcggaggcgggctagaggaaggaaggcgccggcggagggtggtgcggcgaggcgcggaggcgcgtacgaggtacgagtgatggagaggaggaggtccggaagcgtggggatttagggtttaagacatagatgggcctttcatgggctcaaacttgaatctacggagataggagatgctgataactttttctataaatttagggtaaatttaattaaatctttattaggactttgactagtaaatttaattaaatctaaatttggctgtgctcttctccctcctttcccaactaacctccctctttttaccgtctgcacgctgctaaacgttgtattttttgcaaaagaatttctgtagaaaaattgttttacaaaatcatattaatccattttttaaaaaaaaattaatacttaattaattatgtttcatgagtcgtacgtgcgcgtgaatgagttcctaacttatggtgccgaactcatgatgaaacggagggagtaataatctaatgcataccgacactgaaaagaagccctaatcgaactcatacaattcttaaccagaacaaacaaactccaataccacaacacagtccatcttgccttgcatgaacgaatttagctgtgcagactaaagttctctgcactctggaactctactgtagtagcatctacacaaaataagcgcagagcttactctattgtagcctctccatagaattggttaggcattaagcagcatacacattttctagttaatgctgattctgtattatcacatttcttcaagacatcagtatgacagatggtcataaagaccgtataatattagcgatataatgtgcattcataccttttttttttcctacaaacatgaatccctaactactgtatacatctctcaactctggagacaaaaagaaattcaaaaaacgcaaaagaaacaaagtgtgttatgacaacaatatcaaactattttcttctgatatccgagcacttcatcttcattgacataccaactaggtacatgtcctgcatttgagttcaagtcatttgattatcgtcaaaagtatagccacaaaaatatcacctcgtagtacgaaagttttatcagactatgttaacaacaaagtgaacattagtatgcaagtcaggatactaaccagtctatcacaattcacaatgcatctgcatttctaccacctctcttactaactagttcacaaagtcggcaaggcagtgtgtcaaggctcatttcacgcgaccttccaaagttacccagggtaccacacctcctccatgcatggtattctgcataggctacgggatcatttgcaacagctttcacatatgatgccaactcacggagtgagctgaattttgaggcatctataatagaattgggaggaatgaagtcccagacattgggtgccccgaagtatattggcactgacccagcctccaaggcatagaacaatttctcggtcacatagctttctgtcttagtattctcaattgcaagaccaaacttgtaatgtgacattgcgcagtgaagatgatcccaccagtgtggttttccattatcattggttgaacaaactggatacatggataatgccatgtcaggaccatcaacattattcaagcatttcccgaaagagtggtgcggaaccaatgacaggaaatcttttgcaaccttgtctctatgaggaagacaccttgaagatgaccagtaaataagtgcatcctgacaccatacaggagatcagacattgagatgattaaataaactttttttaaaaaaaaaaaagtactactacagcagaactgattgtgtctcagagtgtgcaaaaataacaaagcaatagacatccacaatttcatatttacaaaaagcattcaggtataccggtaagtaacaggagcaccttagcccccgctgagttatgttgttaacttgttttgaacactacacacaatcggatcttgttggcagttgaaaattgtatgaagtttaaaataaaaatatgagaaaaaatgaaatccagaaaaaaaaaagtatcgaagggaacagctcgacctaaatgtgtgaggttgtgcagctgtggtgcactggtgcctgctaaagtcttaatattatacttctacagtcaactacgcacacttaatcctatcatgctatgatgagcagtgagctagcagagtcaggaacaatgatgtcatgcgccatgtttacataatatattattggcaatacgcaatgaatggaaagttaagcatcatgttgggcttacatttctcttttcagttgatacatggtaacttcggctagtgtggaatgattttccagcatatgttacttgcacatcatctttagcatggtaacctataaaaatgtcctcgaaaccagttggtttcctagcagcctccagatccagatatacacgaagaggcaggcctttcattctctgcaaaacatgttcaagaatatgttaaacttggaaatcagaaagatgttaacatttactttgtttaaaacagcatccttacataagtaatgaaatacagtatcctcaggaaaaagagaactaaactactaacggaaatggtatgtaatggttagtaaaaaaaccaattgtatttgattccatgattaagttttgtcagaattgtaagcctgtaactcatgccactcaatactggcactatatatgtgaatccacaaatattttcgtggagactcttcatgctgttttcgacaagatgaaactaacaatcattgggtttttttattgtatggtggctatatgtgcctaggcagttgttggcacttccatttgggccaggcaggtcaacggctagagtcttttaggaaatatatgtggtgcattagacatcatttgccatatggctacaaggttcattagcacgacatacaaccatttgctgggtaataaggaagcatcaaaactgagcatgtcttcggaataagatgatctgatctcctgctgaggacattgtgctttttcattcctggaattttggacaggccttcagggagcgaatgtcaaagaagtgatgaaggcaggggctgcaacacagccaacactacaggatgaaccacttcggtggcatgaggctcctaaacaccaagcccaaaacgaaaacagagaggaataccatgctgttgcttctgactttatgagagaagggaacatcaaccaaatgttgctgaattcacgtaacctggataccatacaagattactccgttcatcatgtgtttgagggataactctgggagaatgaacagcaatatgtccatatttcacatagttagcaaccgccatccaagagtacgcaatatttacaaactaagggtgcttttggatcagtgagacgcattgcctagccagcaaaaaataactgcctgcggctatagcccacgcaacaagcgacctgttttaagtctagctgaggatgtatgaccctcttgaaactaccaaggtattacttggcaatgccactcagatacaaaagcaagaaagggggcaagcattctatagaaaataaaaaaaactgcctcaattaattaaggttgtttctctaactgatagtacttccagatatgcattaacactcgaagaatttattaaggccttgttcggtttgaaggggattgaaaaggattggaggggattgagggggaataattccacaccacagtaggtgtggaataaatcctctccaatccctctctcatgg

SEQ ID NO: 5791 - DNA, 45097 bp, Oryza sativa
ccatccggtcctaggttcttatattttgggatggagggagtagatttgtatcaccattgcctgttaaatattttggctgcatgtttccctcccttcctgcagtgaaaaccaagtggcatctttgaatatacatggtcaaactttaactttggtcatcaaaattgtcatgaacattaagataagatgtggaaataacattgggaggtcttcctggaagaccaaaatatttgtacatcctgtagtatatgcgctatgataaaaactggtagtgttgtgtttggggaactgtgttgatgtccaaaacgtaacttatctttaattgttgaggttttgacagtttagcacataagacttttttttgggggtcaagttggcataaatgcaagtacaacacataaatactcatgctcatgtgatatagacgtacattgctttgaagtatcagatggacagcaaaatttgaaaggtagcaaatttatttgcggtcagaaggactcccaaatcattctaaagaagtaccatagagttcttatttgggacattggaataaatcattgcgatgctttgaatctaatgctgagctgattctttcagttgatcaatctatggtagtaacgagcttttgttatttaaatctgctctctgttagttcgtgtgctatcaattctgagctctctctcctgtacgaagccaacatattatggagaaagaaggataaccttatttcattttgttattgccatctgctgttgcatggcacctgtttacatgctatcaattcatagaagcgataaataaaggaaagtaaatcttgcattgctgatgaacttttcttctcttagtctaagaacaatatcattatattttaagtcattaatcgataggatggaactgctacatattaatgattttgtaatacagctacatggatcattgtatgggcagttgtcatcaagatgcctaacttcttcttgttatttaattaacctctagacactattgttcaaaacagaatgctgtttacatagtcatccttgcagatgcttatctttctcttattagtgaattgaattctctaattagggaattgaattctctaattaacttgtgggtactacctttttttggcagccgatgcacttctgttgcatgggtaccggagcgtgaaggaatctttgttgttagccattctgatggaaatctgtatgtgtacgataaagtgagcagatgttggttatcggatttggtattttaaaatctggtttctgtttggtggatgattgaactgatgtatattgatgtactatttatattcagtgcaaagatggaaacactgagtgtacattcccagctataaaggatccggctcagttaatgatttcacatgcaaagtccagcaaggtatgttaagcacttcaagaattattttagttaagtatgctttagtatagaggtatattcccccctttgttaacatggatgtctacagggtagtctagtattctgaaccttgaacatatttcttaaatcaatgaacatacttatttatcgcgccatgtagagcatggaaatagcattgcaaacagtgataactaccaagttctgcacctatattcatgcttaagtgcacttatagaaatgtttaatagtcctttaaaaatgatggtttttgctcatgctcgcttttgatagtttgattatgcagtaattaaatttttaatagaaaaggctatcatggcagttggttccaacaattatgcacttgttctggcctccagttatgtacaatgctaagtttcgtgactggtattttacaacaagaactttactggcaaatgccaaccacccgatagtatattccaaatagcgtacatcatataaagtgaatgttggcaagtaactccattatcctatattttctactatcttagaaatatgtttttttgttgcaaaacatgtggttagaggagttcgtatgaaggtgccataattaactttggattcatctcaaaatcatttcagagcaacccaattgctagatggcatgtttgccaaggttcaatcaacgccatctccttttcaccagatggagcatatttagcaactgttgggcgagatggtacttcctttgtcccaatagtagatggttctttattccttatagaacccactgattctgtattgcttattaaaataacactataaaaccttatttaggttatttgagagtgtttgacttttcgaaggagcaactaatatttggtgggaaaagttattatggtgcactattgtgttgcacatggaggtaattggaatctccacttttacatttgccctatctttgctagttagttctatgatttatctattcccactgtttggctgtcctgtcccaaaatatagcattttttagaggatgacacatgtattaaggataggggtagaaagacttgtttgccttctcaggatgggtgaggtataggcctggtcgcctggactacaatagagacaaggatagtaggggtagtatgggtagtttagtggcaaaagttaccttttacatgtcctaggttgctacatttgggacaaaatgaactcaaaaacttgctacattttgagaccgaagagctttatgaggcaatcctgaaacgtgtttctgttagttttagttttttaactctacacccagcttgggatgaacagcatgccaaacttaataattctgctgatttatgagccattccggaaaaaaatgtttctgtttgtaagtttaggttgaatagcatgccaaccttaactaattttgccggttgcctgcctttctgccaggctgcttgttacatgtgaggaacttttttggtttgcataacattacggtgtactatgcctattcccctgtatttggggtaacaaattaacaacacagtttttggcgccactagtttctagcacggcacacgttgaggcacatctctggcctggtctctaccatgtcatcaggtttctgctccgtggcattttatctgctaattgtttatcactagtttatgcgactttgaattatcagcaactatttgtgtttaccactggattatcttccacaaattagttcctcttaccttattttatcatggtctgtttttacagctcggatggcaaatatctgttgactggtggtgaagatgatcttgtgcaggtatggagcatggatgacagaaagatagtcgcgtggggcgaagggcataattcctgggtacaacttaacttgcctaaaaaattgtcaatgccacgatgtttcctgtcaatagttgtaattgaggacaaggtcaattttatgttgacaggtcagtggagtttcttttgattcgtattggtctcctccgaattctgatggaacaggagaaaataccgtgtatcgttttggttctgttggtcaggtatcacaaatttatatagctggagatatagtatgcagtctgtgcttttatgacatgtccttaatgtttaactcatgtagtatcaaagtttctttttgagaagtgtagtaatcaatgttaataagcaatcataagatgcttatttctccgtccactcttatgctgttgtttggctttaaactgatcaaactatgtatgtagcaggatgtgctaacttcttatcatactcgtgctattttctcgctgtacaatctatgacaatgttttctgtttatgttaatcaacttggttagttattaatatcgattcttgctcatatggttagttatagtgatgagattcatttgggcaagttatttggcaattctttttacatgttctatcgctggcataacttttcactgtttcatgctcctaggacacacaactgcttctgtgggacctggcattggatgagattgctgtcccactacgacatccttccagtggctcaccaacttttagtagcggcagcccttctgcacattgggacaatgcatgtctcccaacaggtgttcttcaaccttctccaagaatgcgagatgtgccaaagctctcaccccttgttgcccaccgagtacatgtggatccactctcaggtctggtgttcactaacgaatcaattctcactatttgtcgtgagggactgatcaaaatctgggtaagacctgatcagaacgaaaacaatcatcagtcaaactcttcggagttagttttaggtaaccctgtttcaaaggatagggtgatcacaacttcaaataaagcaaccggttccagcttcaagcaatcttcagctgttgtcttcacatgacaaaagtgttctggtgggcacattgctctggtaatctggttaattgatcatcggtggtcatgtttcttactaacaccgtgattttgggaagggggtgggaggaactcttgctggtgatggagccgctcattttgcgtggccagatatgccagtgttgccatttgtgtggctcaatggaataatggggtattctcctgtacagagatacatatagtccaagataaaatgtacaatttcaccgtatgtgtttcgtacttttcagcgagccgactagtgatgggaggataatggatgccacttacctggtggtgttttcttgtgttttattagtatctaaaaagtctgtaaattatttattcatattattgttacagagcccttctaattatcgcctggtgtgaactgtgaactgctctctctctctctctctttgatctgttaacaatgtagtatcttcaaataaagcaagcggttcaagcaatcatcatctgttccttggagcaaaatattttggcaataggtacctggctttcgctcgtcattttttatttttcttgcactgagacttatgtggcggaatatgaatgggaagttgctgttgttggaatcgctcatttgtatgctgatatgttcggaaggcgctctcctctgctgctactccggagaaagcggccgggcaagcagacatctcagttctctcctttcgttagttctgggaagatgattatgcggtcttgctctgggctcatctcttatttctccttccttggttgttcttggttggtttgtgcgcttcgtttcttgattggaaagtgggagagagaagaaagatcgcacctttgtgtcactttttgattgtgcaaagaaaaattctctttttggctggtcatgtgacatgttgggcttgtggcaattggaaaggcagaagaatgtcgtgtgcttgcgagttgtatctctccgagtacaatcaaatgaatgtttctgacggaggattatatttgggaatgacgtccctttttcacacatttctgtcagtcagtcctgttcagatgaaactgggtggtactgtagtagatgtgcacattcgggaatgataggatctgaatttgggaaactatttataaatttgaacactgttcgacaatttaaaaatcgtagttgcccactttaagagtcaaatttagacgcatttccagactatgtatcgttttgggcctgggttttcaggttgggtaagtaaaattacctgatctcccccgcccccccacccaccccccctcccccaaaaaaaaaaaaaaagaacagatgcatctgcatggaggatgtgttctaatagtgcatcagccacaggggaaattgtctttcctggatcagcatggaaacgacaggaagtgcaggttgcacatacctgctcctggtggaagcatgaacactactaatctgagttcttctaaattaagatggttttttagacaggttctgtaatgtttggtttacttgatttattgtcggtgttaattagcaaatagttgcaggttcatcagtggccactccagatacctattcagtccatatctcctcagaaacccacaggattgaggcccggttggcatctgatgaagctttagctaggcaattgcaagaggagaatgcgcatgatgtgatcgctacaagagaatttgctatggtgtaacaaacaagcttgcaaggtttcccaacctgtacaatataatctcaactgcatatggcagcagtcaaattatcctccgatatcaatagttggcgttctaataccatatcagtgttccccgcaaaataaaaataaaaataaaatatcagtgttattaatttttttgtacatttaaacccagacacattttgttaagaaagcagttgggcgaaccatgaattgataggactcacatgtaagaatttattgttcttctcgcttattgaatcttttccacaaatgacttgagcgattctcaacgtttacaagttctgtaaaatcatgtattttatacacaatactagtaactccgtacgtgccgcgcgtccacttctagtttacattagtcttatacaatcactgatacatgtataaatcctggtaaaaagatagataaaacaaattgtacaaaaggagacggcgacgcaccccatcgtctagtgattttaaggtccgggtgtttaagtctctgtttactgcgagctccatatataatgcaattaagatttgattaattatctgttgctggcattctgagcagcagcagcgcattggcatatactcctaaatttttagcagcagcaagccaattaattatccggccacgtaatgaaattctctcaagtggggacacgttacgcctatgcatgccactgaacgtgttgcaaatacatgaaaacggaacaaaattaaaaggggatttcacgtacaaacttggacaaaatgacactgttaaagattgtactaattaaataggtgaacacaccccaaactaccagcttatccgttcacacagcataaaagtagaccacaacatgaaatagctccttcaaccaatgtcgagaaacgacagaatcctctccaggaaccatagcatatttagaagaaagcaaaatggtagctgggcaggaagatgtactataagtaggatcgatgaagttgacagatgtgattcattccatattgttcctcgtcctgcaatacataaatcgtgaatttccttgcatacaatatctgaaatgtccaccaacacaaatgatttagatggatggtgttccaattaaacttgcgtccattagcaagataaggctagcatgcaaagatgctttgtaaactactccagttgtgctataattaattttagaaagaattggcaaaaacagccactacttaagaaataagcatacttcacttacaaatgctaaaagtttccaacaatatactccatccgtccctaaatatttgaccccgttgactttttagcacatatttaaccataaatcttattcaaaaaacttttgtgaaatatgtaaaactaatatgtacaaataaaagtatatttaacaataaatcaaatgataggaaaaaattaataattacttaaattttttgaataagacgaacactcaaacatgttttaaaaagtcaatggcgtcaaatatttaggtacggagggagtatatttaaatatttatgtttaaatgtttggaggaagaggctactgacaggaggctaacaattgcaggtacgcagcaatcaacatgcatataagtaggatatggatacataaaaactagcaatatatataccttgagaaagtgatgaacttggagaagtcagatgggaggaaggactgcggaaagcgcgactttgcacgggtcaggccagcgtcctcagtttgaaggtcctccttcccattgatatacagagaagatgactccacgatcttggtgttcatgtcaatggcgacgacccacatcttcttgatgacataccgtaattcaggggcaaggaagtgcactatatgtggcctgtcaatgtccacttgagggaacatgagtaaggtgcgtgggaggcagtcaaggctgttgatagaccagagctcattggaggtgatcttgtagtcctccctccactccatggttctcctgtgtttcttcttcttcttcttatgttctcccaacacgaggctgtagcaggtgacagtaaaaccagcatcacgcctgagagactcaaagccaagtccatcatcgcgggcgacgtcgatgaatttgagcacaccgctggcatcaaggacagacacaccacggtacaaccagaagcattccttgttgcgacgaggagtctcatgatccacagggaacggaaggaaagagacgacaatcgcggcagggtcataaaagaggatgcctcgcatgtagtcaatccagcacagctggttgtcgaaggggatcacagtgtcggtcttccaggagtagagctgatgcacatcatcggggttgccatggacgtggatcggcagacggatggtgcgccaaccgctgctcgctacctttgatatgtgcgaccgcagcaaacagagttgagctaggaccacctggggcctggataggtaaagattcagctctaccacctcgaactgatcttggttgcctaggtacaagaggcccgtggatcggagcatcaccatgcggcgatcattctcaggaggacattgtccagctcggtacaaggagggagcgtctgcaaggtggcagaggcgtcatagatgactaagtcctgcacgtcaatttgatctttgacggtggagatgagggaaaacaggacgaggtgacggtgggtcgccacgacggagaacggcaagacattccttgaatttggaaagcctggcaactgcacgtagatgcgagagatgcctgggggattggagaggcggaaggcgacgtggaagggattctcctgagaggtgaggcctgacgccctgatgacgtcgtcggggaactccttgtcgtcgtccacgcggaagatgaagcgctctagcatcacccagttggggaacgaccgggcggcgcacatggcgacctttaacacactagattggaaattatggcaccaaggggaatcgctcgctgtgagtacgaatcaggggatttgcaggtgagatgccttaccgaggagagagagccggcggccggcgcgtactgaagaagacgaatcggccgagaggacttggcgagaggcgtgcgggtgcggccgagcgattcaggaataaagagagagatttagggtcagggggagcgtatcctatgcacacatgctctcgcgtgtacaccaactaaaaattatcataaaaaattctaggaaaatttatacatatactttcaatagtattacatctacgtgcaaagtcgcatcttcaaattcattctacatagagaataacaaaaaagataaaattctgacaaaattgcaaccttaaaactgttagattttttgtttttttgttacagctaaaatataatgaatttgacgttaagattttaacactaggtataatacaattgaaagtatgtgtatagttttttttagattttttagtgatattttttagttggtgtgcacgtgtgtacacgtgagggcctgtgtgtataggatatgttgccagggttaggagttgataggtaccgcttttatacgaagccatatgcaattgggctcttccgtcacacacgtaagatggacaagttatgaataagtccaccttggtcccccaactatgactcgaattctatttacatctttttaactatactagcaaatatgcccgtgcgttgcaacgggtgaaaaaacgtaatgataatatacgtttttcatgcataaccatgtcgataacaatcagaaaattagaacaacgaaactttattttctagcgcgttttcttttgtgcttttttctgacatttttccctcacgtgtttttttaaaccgtttttattttctcgtgacattttatagttagattagattagattagagataaagaagatatataaatggactaaaaaacgacgaatataaatttgacttttttcctccgcgcttttttccgtctttttaattttttttctcgtacatttcttttacgaagggtttttttcaccactttcacatagtgtcaaacctttctagatataataggattcgattttttttaccgcatcacgtataattcctttttctttagaaacagacaattttttcgcccttttttatcgcgtcaacggagtcggaatcgttttgattttttcccttttattggatcggacagatttttttttgcccggtttatttcacccgatcgattttttttaccgcgtcacatataattccttttactttggatttttttcgccctttttttaccgcgtcgacggagtcggattcgttttgattttttttctccctttactttggaattttttcgccctgttttcaccacgtcgacggagtcggattcgttttgatttttcccctttttggctttttttggataggaccgatttgtttttttttcgccccgtttttttatcggacttttatcttttttttcgcctggtttttttattttttttaccgtgtcacatataattcctttttctttatcggaaagttttttttcgcctttttttaccgcatcgatggagtcagattcttttcagctttttccttttcttttatcggacaaatttttttttcgcccatttttttttctcctgtttttttcggatcggactatttttttcttttttcgcccggtcgatttttttaccacgatatatataattcctttttctttggaataggacagttttctttttatttttttaaactctttttaccgcgtcgatgtagtcggattcgtttcgatttttttcctttttttgctttcttttttgtcggacagatttgttttttttccacccggtttttttccgcccaggtttttttatcggacttttcttttttttttttgctccacgatacatataattcatttttctttggaataggaccgttttctttttatttttttaaactctttttaccgcgtcgatgtagtcggattcgtttcggtattttttccttttttttcctttttttttgtcggacatatttgttttttttccgcccggttttttttcgccaggtttttttatcggacttttctttttttttcgctcggtttttttctcccgttttttgacggacgatagaagcacctagagaagtgttaagcacctagagaagtgtttttttttcttttctccaatccaatacagatcggatctcttctagggaaatcagattttttttctccagggaatcggactcttttttttcgctttttttattcattaaacggtttgtctctgggactttttttccctttttaagggatcgggtgttttttttgccagggacgggtgtttttttcgcccgttttttttttcactttttttttggatcggactttttttttcgtccggttttttgatcggacaaacttggttttttctgcccggttttttttcacccggttttttttacggacgatagaagcacctcttattttttaagtagtagtagactagcaaaatacctgtgcgtgactgaagttagatattaatgatttaccaaaatatcatagtatgattataaacatcggctatatgtagagtgataaacaaaccatgtttgtttttcacaattaatctaatttatatttgcgtgatgtggatgacgcttctgacgcatgggcctaacgattatagcaagggaggaacaaatgatgaacaattaaagtgattgtttttgcatagaaagtgattgatgaaaatttgagcgatctatagaaaaatcaatatttttaaagtacataatcctaatgaaaaatgaatggaattgaccaaaggacacatctgaatataagtcatgcggaaattatattttcttgtaatccatataatgtaattgtgagaatatactcgattttctatgcattgtacttgtgagagctgaattttgttttaggttaaatatagtgtgcaacagaaatctgtaaaatcatattagtgggagcgctaaaaatagcagaaagaaaagcggggcagacccacactcctggacgaaaagggaaagaaaagctaactgaactcctgtactgcaaaacttttttttgtgtattttggttttctttttgtattttggaataaaaaaatatgaattataaaataaataatattggaagagagtaatattctccaatagaggctatagtccacataaaaaataattaatattatttattttagtccaaatttaaattctatatcatgaaaaatatacaattacattttttgttgactccatttagatataaataatttaacatgaagaaataaaaactatatcaaatctcatcaatttttaatggctcaaaataatgcttatattaagtttgttaatggagaaatagtttaaatcaactcagaatagataaaactcaattaggcccataaggatgggccgaatgtcttccacaacttggcctgttaagtgcacataacccatgtggcccaagtcggcttaaatacgctgagagccgtcggattcaatcgaacggttaggatcgctcgatatatatatatatatatatatatatatatatatatatatatatatatatatataacattccatgttgaaaccctaaccctaaactcattatcctccctctccaaccgcgagtggcgcggcggcggtggcgacgcgtccaaggcgaggcggcggctacctgccctaccacgagcagcgacgacgatggtggcggcgacggcagtggctacctcccaaccacgagctacggcagctacctccctaccgcgagcagcggcagcgacggcggcgtcctcccccgtcgtgagcggccaggatggtgccctcctccattgctagcggcggcggcggcgaccggcgatctcgcggcggaggcggggcggcggctacttgccctaccgcgagcaacggcggcgacggcagcgatagcgatggctacctccctaccgcgatccccatcttcctcagcggcggccggtgatctcgcgactgacgcggggcagcggctaccttcctcatcacgagcagcggtggcgatggcgacgccctcccccatcgtgtgcggccacggcggtgccctctcccaccgctagcgacggcgacgacggccttctccaccgcgagcggccgcggcggcgtcctccgatgggtagatccggtggcagcggtgtcctgcgggtcggcggagcggcctcgacgacggcgcgtctcgaggcgctggcgctcgcctctcctccccatcttccttcgccaccaccgcccatcctctcgtcggatgacgagcttgtcgccatcgtcaaaacgataaatcgaggttgctttgtgattaatttgcttgattccattgatttcaaactttctatcccgttgatcatcccagctgattttattgagttcgattctgagtctgttggtttaatttgtagatgattttgtatcaaactcttgttttttttttctttggccattgtactgacctaactgcgctaggtcggattgacggacccaaaaatactgtgatgattggaaaaatacaaatatttatattagttatagatatactattgcgcgttgtaacagatgaagacaacttttataattgataaaaactcccaccaatttaaacgataaatgtcaaaactagattttggctaatctaaagtgggtagcgaacaagcagaaaagtggatgggttatgatacaaggaaatttttacaggttcaggcattctcgataagaaataataccctactcatgtctggggaaatattccgccgattgtgttatcgatctgatgatcttatgtgtgattatgccccaagaggcatctaacccttctttagatagtctgaagagctagcattacaatgcaagactatcccttacggttcagagtcctgttaatgccaaaatttggtaagccccgaagtcatcatcggcccagagtcagtatcggcttcagagttatggaatcggccgatgggatttgtcaagtcgccagcagtcggattcttgatatatccagttaagaaaatttatctagaagagaccaagttcaaggaggatgcggcatgacagtttatctattaattaggaagagtctgttagtttccttctatctttagaaaagtgtgtttagtatccgataaaaactttatgttttctttttaactttaggaaagtttttcttgtccaagaaggactagtgtctacccatgggtactttaggaaagtttttcttgtccaagaaggactagtgtttacccatgggtataaatatgtacacccggagttattgtaaactatctctatagatcaataaaattcggcgcatctccaccctttttacttttctactttttcgacaagttcctgcttcaagttagggcattggctttgatctccgacgatgagtaaaacttgctatggttgtttacatcggcagagctagggctttgacactttgatcttgtcaatgtatgcacctatttatcatatatcttagtttatctagtttagcatcttaatttgatcatatcggatgagattcgttttagggtttatgctggtatcggctaaattatcttgctagattagattaaataaggtatccaccaccctaaaaaccagttaaaggcttgattgtctacataatatgtttcttttcatactttgcactgcatcagccttagtcgtgcttagaaccataatctctagcatgctttttgattttcaataagggtttcatcggggtttcagccgatgagttatctggacgttgcatcggcttataaggattatatacaagatggatttagccgattgtgacaaagatttcattgtttatctaatcgtttggatttcatgacatcggtcctccagccgatgtatgctttaaccttcggatcattgtttattctatcatattattattagttgattgatttctactggattatattgttatttatcatcatcagtcgattgtctttatatcattatctatattggatatataaccgatagctcaaaacactattgatatcggttggcatcagcatggactgaactactccatcggctccttgctgctcctcgttgacctcctccccggcctcctgaacttgttctctaagttcctcttcctcctccttaacctcttcctcctcaatctcctcttcttcctcctccacaacctcttcctcctcaatatcctcctcttcctcaacttcttcctcctcctcctcctcctcttcctcctcctcgtcgctgtgaagctgctcgtcaagtgataaacaagcaaacttttctgacatgactatgtcttgtgcatcaagtagtgatttagttgtgttccctctgaaggaaatggaaggaaataggggatgactgggtgcggctgcacaactccggtggcgatggtggtagctcggttctaagtacgacattgtgttttgtttcaaagttttctagatctgtttttgtttaggtgataactttgattgatgttgtttgtttcgtggttggagctgatggtgattctaaaatccaaagcaggagctaccaaaatgctcaggtaactttctcttcaacaatccaatgctggcaagcgttgtggttcttgcttagcaattccccataattaaactcatctcactacctttagtttttttccttttaaattctgtggagaaaggtttagtctgcatcaccccatcctccagtacgaccgctgccaccatgcccgaagcgctcttccgcacagtacgacgaacacggggtgctcagcgaaatgtcccgtccgtctcctcacctgcaatgcatcatgaaggtgtgtatctgccgactatcgttgtttcgtcgaactattatgaatgatctttaggtgataaaatattgattgaattgtctactgctatcgctcagaatccatactccagcaatcttacatatatacatatttgttgcgtcaatcctaagcatgcttttcatatatccctgaacaattcagcctcacaactgctcttcatgtatctcattcagaattttttttctcaaattagttggactgatagcaaaatattgcttttcaagattgtaaaataaccaactagcatggacgttcataaatttttcccttctgtttggtgttattttatcagacatatataatgaaggcgtatatagcaaagggaggagctgttgagggaaaggacaatagctcaattttttttttttttgcggggaagacaatagctcaattgactgggaagttgatgtcaaatgtcgggagcaatctgctaaaatgttaaagaggtgcatgagtgaactggaaatatctatcttgtttttgattagtagtttctttggtttcaaagtaactcttgacatgagaattttattagcagaggaatgggacacattcttggaaaaatatatttcaccattgaaagggtcaattaggcctagagggggggtgaataggctaatttaacaaactaaacaaatgcggaagcaggaattttcgaaactttcgaaaataggcagaacagttgaacaatgcagtaaaagtctagatctagagggctaccacaagtaaatcaaggaacatacaacaactagacctatagcggctcaagcaaataaatctagaggatgggaaggaggaatatcacccaaaatgaagctcacgaagtttttaccggagttcaaatccttgagggattctactctccgttgaggagctcaaaaagagccgggtcttagctaactctttcctcaagaggttgcacaaagcactcctctttccactaaggggtatctctttccttgcggaggcgagatccggccttcacaaacttcccacggccaaccacaagtagatcggtggctcgggagtgacacctagctgtctaggagtcctcaatctccaagagtaaaagatgatgcgaagaactcttggagatgatgcaagtgctcacaaatcttcacgaaaaccacaagaagcattcacacaaactcgaatccacactcacacacacgccaaatccgaatcaaacccgggtggagagaggaatcgagaaagcaaggctcaaatgagtagagagagaagcaagccaagggctcaaataattgcaatgtcaccagcaacacttacaagaggggggatgggggctatttatagccacagcctcatatctgcccgttggtgcataataattgcgattttcagaacttctgaaaatcattttcggaacttccaaaaatttccagatctgaaaactcgaagtcaacgcacctttttggaacttccgaaaaatattttcagatatttccgaaaaatatccagaacccaaaacaaccttttgcaaattttcggaactttcgaaaattattttcggaaacttccaaaaatatccagaagtgaaattttagttatgtgaatttttggaacttccgaaaatccttttcgaaatttccgaaaatttccagaacacacggccaaggagaaaatgcttccaaaaattgattgtgagcacacacatcactccttatatgtctatgtctatgcatcatcccccttaatagtacgacattcctaagacgtaaagaaagtaagatatacaatataccatttgctcatgccataaattcatcgtgatgtcacattcaaaggggtatgcatcgcattacaacacatcgaggacgtaacatccttcacatttgctttcatgaaaattgttagtcatctctaatcgtattgtaatcaatcatcaaaacaattaggggcctagatgcactttcaatctccccctttttagtaattggtgacaatacaattagatcacaagagagaatgaatataatagattgatttggtgcaaaggtttagtgaaagctccccctaaaagtgtgcattaaggcaagtggagagctccccctaaatctttgcatccacattgaagctcaaaaagatatgaatcaattcatagtacattcatcacatttcatatctcattcatgacaagcacaattataaagggaataagaacattgcaagatcataatataaagcatataagtcattacatcccaatcatccataataaagcattaaagtctcacaatagtaatagctattacacaaatgacttaaaatcacacatagtctcatacactgaaacaccaacaatgttcgaccacaagctaaaatgaaaaagagatagatattctccccctttggcatcgaagcaccaaaaagagaggatgaagcgaagatggctcacacgaacggggcctgaggtggatcctcgggaggtggaggaggagggtagccatggccaaacccaccaaagaagtcgtactccggaggaagatcaacaaagggatcctcgatgtcatcctcaggcccatcgggctcagcctcatagcctggtggggacggtggagcacccaactgaaaccgagagtagaggtgcgcctgtgtttgctttgctcgccgggatgccttcttgattttgtttcgcgccctgcgattctgtttggcctctgcagagcaaagaccgaacaaacttcgcaagatgcgaaacaaagccgaaggctagcgatgagccacaggagagggttgcgcacgctcaggaggaggctgagtggaggaagacgggatgtcccgagtaggcggccaagaggatgaggtgggtatgtcaggagccgcagagcaagccttgggcactcgcagagtgagataggaatgggactcctcacaaataaactgggtttgagtgacatgctcgatcatccgcatcaggtgaggggcaaaaggaagcgccctcctgtactgaatcgaggccatgcggatctcctccaacacaaagttgtaagcatgaaagggattgccagtaggattaaacccgaggagcacattacgagagtgatggttgatgttgctagcattaccatctttgggagtgagggtccttctcaggatacggttgaggtagacatggaaaggcttgaaaccctcagttgtgcccaacttgccgccatcaagatacaggggatgccgctcatgatgcataggaatggaatagtcatggaggttagcaaagtacctcatccagttttcatcaaaaccccaaagagtggcaagagcctcataggtaatggagtaccactccccctgagtcatccaatgtatgccccgccggctgtcaaagaaaacggtggcataaaattgggcaataacctccttgcaccaaggttgatggagggtcataaaattgtggacacacatctcctcacacatggcaatcatagagttgagggtggggtcatcatgtgcctacaagtcctcccaattgatccattgcataggaacaatgggatcggttatgggaaagataacggtttcatagaaatcttgctgaaaagagtccagaacctgttatcggtagcagagcaacgaagaggtcgaggatcctcattcctctgaggtgccacaacctcagacttttggtgcgagtcacggggaactcggcgaggatcgcacgaggttgccgggtggagccctcaccggcttgagtagaccgccgaggagggagggtggaaccccgaggtacttgcgtcacttggggaccggtccccgcgtacccttccccagaccattcactgtccgagccctccgaggaggatggggaaggagtgggggaacgatcctggaggcgcttgcccctgcgcgagatggacttgcgaggtggcatcctataaacaagaaagggaatggacacaagtaagaggaagccaaagatatgatgtacaagcaaatggatgcaagaattaggcgaaaccaaggttggagggctcaggcagggattttcagaacttttgaaaataattccgaaaattttcggaaacttccgaaaattcctggccgaaccctaaaactcagatcctgtacaaatccaccaaccaaaacttgtgaaactgaatctgcaagtcctagggcactagaggaacatctccaccgaagggaatcgcaagatttaactcgaggaatcactagatttgatttgaagaaatacctcaagaacgcgaagaacgagtgaagaacgcggtgaagatcaacgatgtaagtgcccacaaggtccccaaacgtgctcccacgaggatgaagtggaggagagcgtcggagagtcggcggagaggaggtggtcgccggggaggagtggatgggggagaggaacccgtggggaaaaggatagcaaagagagagaagaagagtccatgggttggaggagagttttatacccccgagaattttcggaagtttccgaaaattttcggatttacagaaccactgagcacgcttctggatattttcggaagttccgaattttttttcggaagtttccgaaaatatacagaaacacagggattgtttgtactaaggcagtaaattttcccctgcgagattatttacagcacagtgattgcgtgtgttcttttattttctggtttcctgctttacttgaaaaccctataaaccccattgaaattgataggttgtaatttttctgtgtgttgcaggttttattttttgacatagttcagctaaaatttcggattcttgcatgaggtaggtctaaggttactgccatcatggaattttgagtaaaacgctattttttttccctaggaaatcatttggaagacatgcataacaattgtcctcttttttttttttgtgacttcatgctttacttgaaagccctatgaatgccattgcctctttctactatcatatctctcgattatatatcaacctaatgaagtgccggttagttatttgatgttaacatgatgtgtggctccagctttcgtttccttcttaggagatggattatcaacctgtcgcatattacaccgttttgcttcaacatgtcaatttttaacttaagaagttaatttcccttttatattgtgtaggcagtgcatggctggccaaaaaaaaatcaactaatcatatgcaaaactatgagtatccatgcaactctgatgatctaaattttgttctgcacataccatgcaaaaataatcggaattgctagaaatatggcgccatatttctttccagtttacagtcgatttttcactgtgcaattagttcagagattcgtgcatgttcgagactctaatgccatcgtaactactattgctgatactaatctcaaatctctaattgttacggagtaaaaaccaagattccatgcacagatggcaggcaaaaggacaagaagggcctcatcattcggcatattggtggaataagccaaacggcatatttgcaaacgaaaattaatttgtaaataaaacttttacatatgtgttcttagcgatctaaaagcaaaggctgaaaataaactttaatgaaaaaaccccaaaatcagcttcaaatttaacgttgaaaattcaaacttaggctgattagcatatgaatatgccaaacgatgggaaccaaaaaggagaagccagggaagatagggagctcaccgtcaatgtttgtttttaattacactgcagttatatatataattagagtgtaattgtactatagttacacgtgtaattcctatgtaactatagtagttacacctcacttatataccacttacatatgtaattagtatgtaattttaggatttacatatgtaattttaggaattacattataaatacactaaaattacatatgtaatttagggacttacaatgtaaatacacgccgactatttttcggtgaaaaatatggcgccataaatatagctactcccaaaataataacccatagctcatgaacgaacagtacatgaccgttacaataaggtgctttaacacgtcataagcagaagttgctgggatgctagataatattgtcctcttttaaacatagcatgggaattatagtagaatcaagatgctttcctttgcttggtaaaaatattttggactgcatttcagaactcagaccatcatctatttcagtgtaattacattattctgcagaaagacacaaaactatcatggaatagatagttctatatttataaggcatgtagttcttaattcttttaatcaagccaagtgctattttgtgtggtccatggatctttgcgttacctgtaaaactgtggtttatatatttctttgggagctggattctcttggtaatataattgactggtagtaatacacatcctgtaaacaaattaatttttcctctttgtttcttttttttaccgtgccatcttcttccttagggtaacagaaagctcctaataacattgctagcaatccctactctataaagtaagcttttttttttttgcggggaacatagatgcattactcagctatagtcattacaaaccaagtgcgaaataaaattacaagaatcatctggccaaaaggccgttaaggattctcgacgacctctgctagctagagcacgactgacgctgttctgattacgattgattttcgtcagtacaacctctctgttcctgaacaagagacacttaatctctcttattataaactcaaattcagatctccctttttcccataagtatccttatgggtcactgcattggacaacataacactggacaacataaacaaattcaatagtatagtgatgtgtaattcgcgtgccttctctgtgtctataatatgccaatttttctattgcttacacccgtttcttattatgttacgggaagttggtgatttttgagaactggaggaagatcgtggattttgattgtaaaagcataaaaaacagccaccactaagatttaccagtcctaagtgcctgactttgcctgtaacaataatgttaggaagatattattttgaaacaatattgttgtttctggtatgttgctgctgccgccttgctcttgacgatttgctgtggatttacttctgctctgcgctgacatcctgctgatgtatgtgctgccatgtactactgctatggccagagaatagaagaatacagagggaacaaggaagaggaggaaagcattagagttctttggtgctcatgaactgctcgatgaaatgtcttgaggtactactaaaatccgagtacgtttctgtgaattatcgttttagtgggtctatatgcagaaacctccttccttggatttgttattatgtttccagtggaaagtaatttagatttaacaaatatttcagtgaatcattcaagtcaatcaactaaatcaataagaacatgcttagtttattcccattaagaggttgtatagaaagtaaaaaaaagcagaacagaagtttggtgcttgtatttacacgatttggtttttattgtgctttatgcaagtctctgaacttattttgcctgtggacatattacaggggctcatcacaagtatctatacgatctcttctattgattcacatgtgatgatttagtacctttctcaggattgcacacacatgagctctatgccaggttagtcaaggttgttaggtttgttaagactatccggaatgcatagtcatacttattataacttctctcactctgcatgaggaatgagcttctatataatcactgattggtgctgctcgcattgttataaacaacattttagtttgttgggatgggaattgagagaccctgtttccaaatgtttttttatggggtcaacaacaagcctgctataataacagcctggtgatacgccaatgttttgtttaggattattttagcaggatgcttactaggcaggcatgattcaggtagtgcacttttatgtagtgcagtatggatgtttgctaggcagacatgattcaggtagtctggggtcatttatagaagcaggttatctgaaacattacaagcaattgacatacatagtatctggtgggttagggcactatgcgacgctgtgatgagtgagctgtggccactgtgctgatcatagagcaacagagcagaaactacaggttaaggtgatgtcctctcttcctaaatcctcacataataaagatttgaattgcagtgtgtgattatggttttgtgattggttagtgcgacatttgatactgatttgctccatgcataaagaggttcgaaattcagattaacctgcaaaacaatttgattaggaattcccaaatttagttaaaacttatttgagtggaaagtttcagtttgttagattagctctttttcatgcctgtgagaaggaattatgtgcattccctaatatcggtggccgcttgcgtccacggtcatcagactatttcctcttccttaacgccatcaactgaatatgcagttgctcgacgtctacgccatgcttatcttctcataagcgcctcccatttcatccctatcggcctctgagattactgaaggctcctgctacatgaagcatgaagtgggtgctggtctccatctgcttctctccctggtaccattttattttattttttgcaagctggccttcattgttaccctggtggttgatccatatgatgaattgactgtgtgatatggcttcggtgttgcttccatgcattctgacctatctcatgttctgtttcatttagtgcctcggttcgattcaacacaaaaaattaagtgctcaattgttaatagtcttttaaagtaattacgcaatcccttttcttttccagacgtgcaggaatttatggttggcttaaaaattatagctgaatgggcacaccattaatgttcactgtgtacaaaaaactgtggtggttttttgaattttgtacatgatccaccaaacaaacaaggtaatctgcattggttatttggtatacttgtggagcttattatagatcaagatatatgtgaactaatagcattttaattaaaattagaatttgtccagagcaccatatttttatgaatatttttttttcttgacctaaggcataactttagtgatctgatcttatgaattgctatactgtctaggttagctacctttattaactagaaaacaatagtccattctagccatattaattaagccacatttgagtcaggtgtataacctgaatcaaggtgaatgaaaacatttaactggagtgctgcgcaataatatatgcagaattgacacaatttagatggttggagtttaggcattctgtgaagtccccaatttcattgaccaggcctatttgaaacataaggggggggggggacatcttatggtacatcaagttggtccattttgttcacacaggataacactgcacttaaaatattttttttcatattatggttcaagtgcagatattgtggattgccataacactcaccttctaagtgcatattataacggagatttttgagttgatgaatcgttgtgagtatggaattttgattctacgttcttctatgattaccaggctctggaaggatctaatatgtggtttaggaaaggatgggagtgcttgaacctggaagcatctcctgctcattatgctcttaggtgttttatttccgatgctgttactattgatacaacagggaaagtcacatattgtttaaaatatttattgtgcttaaaatactatactgtgtaatgtccgaaatttatattcatgcgttagatgtttcactttcacatgcacatgcacttctgttgaatgtgttgttaagttctcctatgaactgtttcgctgagtggtttacattacatttctttcacaggtggtgatcatagcatgatggcaatcgaattccaccgtgttggtagcatgcactatatattttccggttatacatcacagaagacagaaaagccaggtatgtttcttatgagcctgtatatatcactttactaaaagttttctggcctcaaattattgaggaacttagagctaccattgaacaaatgtgccctgtttcttgcagtgctttaatctgggtgcaacaacacatattctaactggttttgggctcaactttctgttattattaatttactagaaaaaatccccgtgcgttgcaacgggtaaaaacgttttttatactatacattatactcccttgtttttagaccgaatgctttcttgtttttggaccgaacgttcattctttccctcattttcagatttagtcctagagcagtccgctgcttctatctgcttggcctctctcttcggctcagcccacaagtggagctgtaggcccagctcgaacagtcctttgcttggcctatctcccttcggctcagcccacaagtgaagctgtaggcccagctcgaacagtcctgtgcctggcctacctctctttggctcagcccgcaagtggagctgtaggcccagctcgaacagtcctgtgcctggccttctcttcggctcagcctgtaacatctcgaacagtctcgtgcccgcatgacggagccgatcctcccaccaaatccggtaattgaccagctcgaacagtcctgtgcctgccctacctctctttggctcagcccgcaagtggagctgtaggcccagctcgaacagtcctgtgcttggcctacctctcttcggctcagcccgtaagtgtagctgtaggcccatctcgaacagtctcgtgcccgtaccgtaggggtgaaaacggtacggaaactttccggattccaggcctgtttttggaaacggaatcagccgatcgaaatttttttcggaatttctcgaaaacggaatcgaaaacggaaatattttctcggaaacggaatcgaatatgataatagcagtttccgtcggaactcggaatcggtcggaaaaattccggaaaatttgtcggaatttccgaagttaaaaaggcccatgaaatcaatagtctataattcgtccccaagtttccagcccaacccaaatcgcggcatctacccaaatagtggctaaccctatagaggagagagacagacacacggcatcgcgagaccgcgagcggtggcagagcatcacgctccacccaccgccagcgccccgcgccacccctggtccgccgtcctcggctcctcgcgacctcgcccccaccatcttcgctgtctcgtaccgccgccatctcgcggcgctgtccagccgtttcgcggcgccgtctcgcggcggcagcgccgtcccgccgtttcgccgccgctaccaccactgacgacgacgccacagccacaccgacgagccgacgacgcctcgcctctgcgactcgacagcagccagcagcccagcggcagcagccaacagcccagcggcagcagccagcagcccagcgacgagccgacgagcctaaaccattgatttgatttcttttgtgctgcagatttatgatggaatcatcaaatgcaagtagctattttgtgattgaactaagtactgtactaatggactgatgtgtgttgctgttttgtgatgactaatgattgatgaactatgtactgatgatggagtgatagctcatagcagattagcagtatagcactgaataatagtgtatactgtataccttataccatggtcttttgctgtattttttttagaatatttgttatgcaaattatatgaagttatagaagaatatattttgctgttgagacgatttcatataattgtgttttatgatgaattgttgactgttgagacttgagaattggacttggcaaaagttttaagctcagtttgaggggtttttgtattccgataaattttcgttaccgtatccgcgccggttcattttcgctccgttttcggtttcaataatattcgtttccgttttcgttttcggggtttccgattccgattccaaaaaaaaaaatgaaaacgaaaacgataaagattgtttccatccgtttccgtaccgttttcacccctacgtgcacgtacgatgacggagtcgatcctctgtcaaaagcggccgaatctttctcgatctccaaaattgttagagattttgattcactcgatctcctttttcgatttttttaatcaaagtcgaagcaatccgcaaaactcggaataaaaaatgacaaactaaagggatgaggaaacgcatggagaggcaaatcgatatagtggcggcgctagggttcggcccgacaaaaaaaaaccaccgaaaaaatagcgtgttggattttgttaaaactggaaaaacggtgaaagaaaaaaaagaaaaaaacaacgtaaagaaaataaaacggaaaaataaaataaaacggacaaaaaaaccaggaaaaacggtgaaaaaatagcgacaagaaaataaaacgaaaaaaaggaaacggataaaaattaatttgtccttttctatattttttcttgccgtgccgggctttttttttacaatcgttttacggacgaaaaaaccgggaaaaacggtgaaaaaaatagcgacaagaaaataaaacgaaaaaaggaaacggataaaaattaatttttgtccttttctatattttttcttgccgtgccgggcatttttttacaatcgttttttttctgcctttttttgtccgcttttttagcacggataggaatcggtcagttttttttttctgcgccttcttttttggggccggactttcttaattacaatcgaactttttttatcgcttttttttattaacggacgaaggaaacatcttatactttttaagtatttttaagtagtagtagtagatagtagatttgtacttgatagattctttgcataggctaagaatctaatctaaccattaatagaagtcatatagatagaacatcttatttcagtttcacacagggatgccacttttgaacagaaaaataaagatatatagttatcaatatgactatttccttttcctcagctagattccatcaaaatgtagctatttgcataagatatctgggatgcttcaggataatgaaggataggttgcagatattcccttatttgcttcagctatacttaaaattttcgcatctggctagaggtttgtcatttgatgttatcgcatttttctaagaggggttatcataccttttccctatatttcactaacaataacatatccatgtacatgcactgtctgttgggcctagaatgtgctaaaaaaattgggatatggcatttcttattgtacagttgcataaagtgaaaatagaaaaaaattgtgaaaaaattagcacaacacctcttcacaaggtaaatgttcccctactctgtttcaagcttaagatgtattttcgttacctatttaggtattcaccctcttgagatgagttctaaaatttgtttgtatattttttccttcgatgttacacatgatgccaatatagtatatatatgtaatcaataaaattatacatgatccaattttttatcttcctaggcatataaaatgattaaggctacatcttgaagatatggcagctttaatgtatatacttctccaaaacaagttttcagccttttgtacttagaatgaagtagcaccattaattttgatgttttgcaaagtaaattatgccttttggtaagcattttttatatggtcaagcaatctttgaaatgtaaagtgcaggtaatgctgcatacctaggacttgaaataaattcagattcaaagtattcacttttaggtccaagattagatttatccagattcaaattatccagtttcttttaatagtcacaggaaacggggtcggtggcagcgatcctcgacccgggaacgccgtccccgtcccgaaaacatggggtcattttcgtccccaccttgtaaaaaactctctcaagtagcgtatcacgttcctcgaccccgtttctcgatcccatcgacccaggaactttgttactatactgctgccataacaattaaaagaaaagagaaaattcaaatgtgttttcatcagttgacctagtgcttgaagaaaacttgttaaaaaagtaaggaaatcttcgggacagtcatctcatttagaaaattgtagtacatgagaaaactaatgttcaagaaacttgaaaaaagttctggagaaaaaagaacttacatacttttagaaaaatgttgtttgtgctgccataacaactaaaagaacagagaaaattcaaatgtattttcatcagttgaccagaagctggtaactttaattagcctaagatttgcaagccacatttcagtagattgggaacgtgaagggcgctctttatttttttttttcaaaaggggatgcctttacttaaaagctttaatacatgattgattaaatattgatgaattgttcgatatgatttattatagtgattcatgttattatgagtaatagttagttttgttctcatttttataggtttattgatttttctttttctttttacttaaatttcttcagttttcttttgaaaaaccgtgatagttgaagtaatttacttatggttgctataaacactaccgtagtacctagaccatagtggtcgacaccgtcaagtggacaagcgctggaaggaaggcctgatgagaagattgtaacgtcccgcctcccccagaccaggcccacttacatctgataatttttataggtcatagactgccctcacagggccaacatatgtcttttctgcacacttttgtcctcactcgtgaacatgtcttttctgcacacttttgtcctcactcgtgtgcacccgggaagaattttccggtcgatcacccatcccaaattgctccaggccaagcacgcttaaccctggagttctttggagattggcttccggaaaagaagttgcaacttgtttatatgagtattctattaatcctattaagccctaggccgggatgttacaaggatataattgctttgttgcagatatgaaagctacatagatgtgtaccattgggccaaaaaaatcccattaacaaaaaggtaagtgttgttctcttccaccttgctactaccaattgctgttgttgaatacaaacatttgctaccacaaaatattttttattcatgtgatctgatgttatggagcccacttgggttgatgctgaattgttgtacatgattttctagccttttctaataactagatatgcttgactataatttgttcttgttaattccatggtatcattcaacttgagttaatgtgtctgtgtctacatattattcaccgcaaaatgatttttagtcatcaaatcatgatttggtagtacatgtgatttgttatattgtacaaatctgcgtggttttgcagtcaattaacgtgttcaatacacgtggcttggaagctgaaactagattccatggcttacaacccagctttcttgccacaccatgtgaagcttgcctttacctctaaccatattgaattatcccagcatttatatcttagggtcaaaaatgcatttcaacatgaagggattatgatttttcacattatttttaatttccattcaatataccatggcataataatataacagttgaagtttttagatagttgtactgctcgaggacccgtgggagttgtttggttgggttcaaataagtacagtgtctaaattgatatgcaaaatcaatagaggggaaattcgtctaaacctttttgaaagtttttggtgtggaaactggattattttttcagggaagatataacatttttttagggaagatgttaggtgacaggttataaatatacgtcactcgaaggaatttcttgtgaatttatgctgttgtttcagattatcatagacgtgttgtgcgtattgtgttgattagttagctccttggctgcatttcagtgttcattccgagtgtttagttccagagcacattgcctgattcaaattaaacagaatgttgcacacctgttcatgaggtttccaaggaacaagtaaagatcttctaatcacgctaagagacttagagataatcatgcagaaatattaagttataattgtgtgatctcagagttaccatattcatgcatgcctttcagggggagtgtaggtattagcataggatatctgggatgcttcaagatggactttacaattgctccttatgaaaagaaaaatgaagtcaatcagtctagcaattaatttggagaaactgactcttttgcaagctatttgagaaggcatctatggaaaatataatgttttgctgaccggttgtcattttacttgtgtttggtcaaatggtcagggacactggctggcatgtagatggagggttcaaaaccgacaccatatgctttatcatcgatactcagggttttgtatctatatgattttggtttagcacacatttctgattattgcacgttattaaaccatgtaaacaatggattacaaaatttgtgtgcaggcccatcatctagaatatagtcattggtgagcagacacttacacttaggaaggaattaggataggtggatcacacacagacacagggacacgatgcatggatcttgcagcacaacacagacaggttgctacttgtgctcctcgtcgaacgcatagccatgtttgaggtactggtcgatgaggttctgctcgtaggcgttcatcttttcatcgatgaactttctgagtttgaggcagaacgttgggccagctcctcctcggtgtaggcgtactccgggtaggtgtaggggtagctcatcatttgtttgataacaacattaggcatcttgtacttgaccaccttcttcccagactcctccaaccagcactccatggaccccgggacattcctcgacacccagagaggcctccttcttgaggacctcactaccctcacacgggatcgaagaagacttcctccttgttcctggccgccatcgcccgcgcgcgatggaggcagttctcttcaagaagaagaaaacaggcaggcaacaatggcggcaagcggatcggaaggaacggccaacgacccaactcgtgtcagcccacaaccgttttcaagccttttcagcccatcccaccaatcttaaagcaaccggaaaagaattacaaatatactcccatgcaggcccttaatggcttaatccttgggggttttttttatcaataagccatataaacaatcaaatatatcgccttgatttcacacgactaaatgctgctattgcttcttcttgttggctgcgctgcttcaattccttcacagccgcatcatagaaagacaatcatagcaaattcatatgcagacttgtagcaagctcatgttagcaaatcatcagactcagttcaatttgtgctcgatcgtatcagagaatcagcatggcacacttgcttattctgtataatcatttatggtaatattaattatattcatgacttgacatgtgtgcatgtacaaaccatcccagcagttaagcttggtggtccaatagaaggatgcttaacagtaagcctaaattcatctcatttccccttggaagagatttcaaggtataataacgattactgagtggcacaattgccaactagtatattatgatgcttctcaactgaagattgcaagcatcatcggacacgacgtaagtactgttaccacaatacacgatataagtaagcactgttaccacaatacaatgtatagacaggaaaatagtaagcgcctcatctttagctgctatcgttcatgttgttaatagtttcaagggcttttggaggcaccatagaaaagggatatgaaattgaagcaatgaaactatgaaaagagttaagagtaaaactcagcaattgtacaaatgcactaggaatacaaagatgaatcaccatgcttgtttcagacaagtattttcactctaaaaaaaatcaacagcctattagtcaagttcttatgctccacaactaagaaatacagtatcttacagcacaaaaagcttaatcctctatagcttcaaattcacagctcatagtttttatacgcatatagtcagctaaagaacacaggaaaataatattcattcaacagttgacagctaaagagcacccagagaaaacatgtattgtgatacaggcatatagcttcataggcattcagaacagttaacaaaagatacaggcatatatagcttaaatgtgttataactaccatgtaaagagaaaaaaaaaataacagcaataatggagttgcgtcccataaacatgaaataaaactgtcaactgcagtcagatgtagcttttttctgctgacagaaattcaagcatgtgtagttttacagcgacaaaaaacacaggggatacatacaccctgggacatcatcaacctctaggggttcaggaaggaaactagaacagaagcaaaattaaccaaaagttaggccctagccagccaatcttcttgcattgaagttgcatcatgtccagcaatggcttgataaggacttccgctgcaaaatagagacgattttctgtatatcattccatgaaattaaatatactagacttttaggttccatagatgcggcaatgaacttacaaccagcaaaaatgcatctaaaaagtaggtgatagataaaaacagtaataacatagagacgattttgtgtatatcatttcatgaaactagactttagcgttccatagatgcggcaacgaacatataatcagcaaaaatgcaattaaaaagtaggtgattgataaaaacagtaatatacctcataaattgaggaacttggatagcttagaagttagaataaatgtcccaactgaagtgcctgcagttgacccctgttatacagctccaactgcagatacgggacaaccaatgggaaccggacatgacatgcatactctgagtccacagcattatagcccaaaatcaggctcctccatggatccatcctgtgagatgtcctatttctcagaaaatcaaagaagaacagagtttcaattaaggcgatctgatcaggggtaagcgatttctgtcctcgaataggagttagacccagtgcatgtaagaattccctctgacgtttgttgaggcatgtctgagatggtttgtcagctggtacaatacggccgtcagggttgaaatcataaggctttttgaggatacggttggtcttgactttactctcccaaacatcggcatatggaaggtttgttaggatagccctaagatcatctggtggcatcacaaatctgatatggtcatacattgacttgaaaaacagtgacacattagctagggataccaatgacccatgaaaatgaaatatctctctcttgtcaaactcatgaaggatcaagtttagcaggtgctgtatatcttcaggcacacttccgtcttcagatagaaagagattcctgataatctgatgagcacacaaatagttgtttcttagaaggtccatctctaactatacacgtgaaatgttcttgaacttaacttttcccgtgggactcacaaagatgtttgaaatgtttaaatccaaaaaacacaaatttctcaactcatttgtccttagtcctttcagcatagttctgattactttcttacatgactctgttgcaaccagataagtcacacttggattagtttccccaaatgaacgaaactgatacgaatcagaagtcaccattggtctaatattcagataagactccaatgggatgcaatcatcaaaatacacttcagaggtatctaacacatatctatcatatgacacgtaggataaggcagctgtgaaaaagaaaagaaagcaaacattacttcaatgttttgacaacctaaaaggacagggaaaatgcaaaggcaattaccattatgaatggggttgtccatgtcttcaggtgaaaaacctggaaccaagtcaaggggacctggattgtttgcagtggccatggaaaagctcaataatggcagaaaacctacaagcctgaaaagaaagcatggacatgaaaacaacagcactaaaatgcaacctagttgctacctatgaccgtccccatattttatgaaccaatagaagtgaaatgggaaaatcacagatagagaatatacactacagatattagctatctgtcactaaacaatccaacatgacttgcataggttatcttcttcctatcaacattagtcatgaatctattattaaaaaagcctaccgaaaggataaatcatgtattacctacaaaaacaactgctacttttaatagaagggataatttgtactatgtggtcatcagctacaaaaggctcacatatataagaaatcagctatcatgtagtatccagataaaccaacctgttgtaggccagtaagcagatgtcaaagcatagatacacaaattcaagatcaacacaaggaaaaaaaaactgaggcaacatcccaaggctcagccacttgatgactacatgatggggaagaaagcaaaacacataggaggctgggttaacttaaccaaacaactcagaacatagtgggagataagtccataaatgataaatctctgaaacgaaatgaagctttagatgtagaagaatgcaagttagaaacaaactaggggatcaatccaaatgcgttttgaaaacaatatgcttcagatgcagaagagctcagagacatgcagggagttatgttagttaaccaaataacagatacgaagtgatcagtactaacggatcagtccatgcatctctcaaacaaaatgcagcattgagatagagttgcaacagcgatttcctttctctattcaattcacaccagaatcccagcataaaaattatctgcagcttgccttccaaaatcagtctcagattgtaagaatcgtgcgtgtcaaatgaatttgtgcaattctctgttcccaaaattcagaaataatgccagttcaaacagatttacaattgtgcagaaattaataaggaacgcacaaagacagaacaggataaagcaacaggtgcaaccaacagcccataatttctcaaagcaacagccaacaggagccaagttcaggtattggtttgttgctaactcattaggatcaacactgaagaattcataacacgcacagagattttataaaccaaacaagacggcaggataccatcagcatgatccagaagaaaacataacgtgcagggaatcgggtttaattgaaccaaacatctcagaacgcactgggagaacagttcatacatctgtgaagcgaaatacttcagatgtgaaaagaaggtatatcagaaatacaaggaggatcagtcaacatgcatatatgagatgaaatgcttcaaatccaaaatatttcagccacatgcaggaagttcggcaattaatcaaccaaactacagacagcataccatgggatcagattcaaactaacatatcagcccattcatctctgaaatgaaatggagcattcaaataaagttacagacaccagaatcaaagcaaaatgcccaccgcaatgttgtcatgttcagggaggaagcaccatcgctacaacgggtgcttcgactctgttgaggacgctacgctctgggcagagagaatgaaaacacaggaacgacaggtggttacggtctggaaaagctgtttctctaatcccctttctatgatgtaatgatattatgttcgttgcatctgctccatccaatacaaattcatgaacaggaaaacatcccctatcgatcaagcactgaagtgttgcaaatctgcaaccgaatcccaccaatgaaccacatgccgagtaaagaacgccgcaatacacacatctgaacccgcggattctaaattcgtacgagaactcaaatcaccacaaaaaggctcatgcccatgctactgtacagattcatctttgctactctattgatccacgacactaggtgctccgttgccaaaaatcaacatataaaatgacaaaaaccaacatataaaatgagacagcacagtacacaccgagggattcaaaatagtgacataaaaaagcatgggaaaaaacctcgctcaaatggacgaagtggctccagaaaaagtgcggtggcgagtgagtggaatcagggcgacggagacggcgagtggaatccagcgatgacgacagaaatcgccctcctctccgcctggcacagacaaaacgagaaaatgaaaaaaaaaaaagaggaagatgtgggagggagggagggatgtttacctacacaggtaggtttggggatctcgatctacgaggaaggcttgtcgccggaccagggaaatggctgcgtaggcatcgggtcgacgaggtgaagataataaatctggaacgagaggttttgggaagtgacggcggaagcaggaccctaagctacggtttcccatcgtcgaatttatagacagggcgctagacgggccaggccgtgatgagtggtcacaggttgggccagcccggaaacttgctagggcagatataaatgtcgagtaagttcactttaggtccctcatcttgatgctgaggccctgtttagatgctggcaaaaattttacagcatgtcacattgaacgtttgaacacatgtatgaaatattaaatatagataaaaaataactaatacacagtttacgtgtaaattgcgagacgaattttttaagcctaattatttcatgatttgacaatgtggtgctacagtaaatatttgctaatgacggattaattagacttgataaattcgtctcatagtttaccggcggattttgtaatttgctttattattattagtatatgttttatactttaaatatgtgtccgtatatctgatacggcacgctaaaactttacacccttgatctaaacaccccatgagtttaaattacatcctaaatcgtaaaaccgagtatttcaaaacggatgctaatatagttctaaggcaggattgaatacggctttgactgatatggagctgacgtgacacaataatgaaaaaaaaacattggaagccacacgtaagtgaaattaaatagcatagcgagagaaaaatactgcataacgtgatactgtattgagccttaggtagggatgaaagcggagcggataaatactgcataacgtgatactgtattgagccttaggtagggatgaaagcggagcggataaatactgcataacgtgatactgtattgagccttaggtagggatgaaggccctttttgtttcaacttatgattattataatctagattaataagccagattactataagctggcatggaataagctgtgagttgtttatttgtctggattattgaagacatggattattgggtttgaatggctaaagtctataatgtcctcagctatctgttcggttgatggcataggtgggtaatttttctcaagtatttaggggtagtgggtctttagccacttaataatctgaaaaaagctcctctagagcagcttatcagattataataatctggcttatagattataataatctactataataatatacttgtttgtttcagcttactcctaataagctatattataataatcctaagctgaatcaaacagggccgaaagcggagcggatacgaacagataatgctcgtaccatattcatttcatgtttttttaccggataaaaaacaaatacggattatctcaaatacgaataagtatcgaatataatcggacatgaatacggaaacaagttttttttaatacgaaaactaactcaacttctaatagaaacaaatatgaacatatataattagcttattttatataaatgccgtataatttataaatattttttttaaaatttaaataatattaatcgtgtggactagtgttaagagataaactactattaaaatcaaaaaaaatatatattgaaggttatagagttataaagaaatagggtatgtctcatggcttctgcggatatccgaatagcactgctcatcgcatatccaaattattatccgtatcaatcgacatttgatatcgcgactacggtatttgcatagtatagggatcgttagtaccagatatatgcgagattgaggtaaaaagatagagacaaggatttttgtacaggttcggacctcttatcttatagttaatagccctactcctgttggccgaagtcagtgttactcttattcatcgtaatcacataagtacaatgtatggggataaactatgtagctgtcgtcgaactggcggcctgtaaaccaccactagtcagcggcggacaaacccctgaatgttaatgttaactttaatcgaatatcacgttaacatccaaatgaatatcttttactgtgattccaaacaaacaattaacttatatttctaagacatatattccaacgcaacatgtttaagtcgtaaattttgataccgagcaacttttataagataatggggtaggaacaatttgcacatgcctgcagcgaagttagggtctggcattcgttcctgccgcggcggaagaggacgttgcgcttgtggtccatggagtctcgcacggcgaccacgccgtagacgccgagcggccaccggaggccgccggtgatctgggtcaccttcaccgtgaagacctgcattgtttccataggctgcgcagaagggggcagcactggaatgtctgtgtttggcataggagggagatccgctgcccaatttttccccccacaaaacaaacaaaaaatcaatcaatttgctccacggttgaactaatcgcatcaagttttttttggaactaatcgcatcaagtcgccaagaaattcaattcaagcagagaattcaagaagaggcatactctcgtcctcgaaggtggcgccattggtgccgtaggaacgggcccagctctggcggtaggcgtccaagggattcggaaggggttcgtcgtagtactcgtcgtcgtcgtcgtcattctccatcgccatggcgcggcggcgggcactgtcgtggtgatcctccgacggcgtcttggcggcgtcgccgccgccgttagaagctctctcctcctccgtgggcttctccagatccgccctcttgtggccgagctcgccgctcgcaccctccgtttccatatccacctccattaccgccgccgccgcacgccgccggcgggtttagggtttgtctcgtcctcactcctcactctgcttccttgttttctctttctttttcttttttgggcctcctaaagttgacgggctttggcttaagcccacccagccgaagccgaatcaaagatttttggaacaagtttattttgcctccctctcttttgctccttgtcgaatcgcatccctcgaccacagaaccgggtataacgtctccctctcgtatatcaaaaccggtgaaaattgtctcatttattggattgggaagcggtttcgtccgacgtggcaaattgatacgctgaacccacttatgagcggcctctacctcatcccatcttctctcacacctctcccccctctctcatctctttcgtcctctctctcaccttccatcagcaatagaccgggcggcggcgacggtaccaagctttgcggcgcgagggagaggagcttgccagacagccgcacatggaaggaggagctcgtcggccggtcgtgcccgtggagaggacctggccggcaggggtgcacatgaggaggagatcgcaaccgtacgttcgcacacatgaaggagctcccagcgagtcgtgcgtggggagaagagtcgtcggctggccatgcgcagggaaggagcttgccatccagcaccgcgcggggagagaagctcccggccggccgtgcatatggagaggagtcgttgaccggttgcgcgcggcggagttgctcgcccgccggccacacgggggtggggaggggggggagctcgccgaccggccgtgtgctgaggaggaggtcccggccggccacgcgcgggagaggagctcgctggccagccgtgcacggggagatagttgttggccaaccatgcgtggggggagcagctcgattgccggtcacgcccggggagaggtgtcgtcggccggccacgcggcggggaaggagctcgccaactggcgccgcgcagggagatgatttcccagctagccgcgcacgcgaagaggagtcgtcggccggccaccgtgatccccctcggccgtggtaccgtttgcagcgcccaagcacgtggctgtccaccccagacctaccagagaaagagataaggaagaagagaaggttaagatggttgacaggtagggcctactgttttttatttctaccattatcacttacatgtgggaccgttttctattttcaactcctttaatgactaggtgccacgtcagcacacttagatcaaatcaacttgccacatcagcaaaagccggttcaaaaaccactaaaggagttaatttgtaccagtttttaaagttgggggacatgttatacccggttttgaggttgagggatgtgattcaaccaagagcaagagttgagggaggaaaaatagacttatttcaagatttttacaaaatttattaaggaataagttcattggaggtccctcaacaaaatttaattttttttacaaattttacaaattaggattttttgagtttacttaaccataaaacgagaaatgtatacctctaaactcatacaaaccgtacaatcaaggtcctatagcagtatatataggtggcttgactgacgtggcattctagtcgagaaaaaaaagtccacatgtaagtgtgatgaaaaaaaaaaagagatccacatatcttatttcttctcgttttttcccttttcttttctatcttctcttctcttttcctctccaatcttctcgacgctgaaccgcagccggcggctggcggcagatggcccggccactgcccactccactccgccggccacacgctcacccgccgccgtccgccacgtgctcgcccgcttgctccagccgcacgccgccgctccgctccgccgaccgcgcgctcgcccgccgcttgctcttgtttcagagtacagtctacatgtacttactgaatatccatgccagagtgttggctcatcatcgtttttcgtttcttgaaaacctgtgcagatggagaatcgatggcgatgacattccgatggaaacacatagtagcttaaagccttgtcttcagatggtgatccttgacccttcactttgaggtcaatctcaaataaggggttatccaatagaagaattgcacggctaggacctgtgagttccaatgctgtagttcatatgagtttgatcagtaaaatccaaaatgcaatgttaattaacacgtggataggaggaaatgggtaaatttgcttgcaatcgaatcactacacaattaggattagaacaccttgcagatgtgcgagtgcgagcaagatagagagtacttgagcattgaaatgttcattgcctgatgtttctgctttcaaatccgagtactcgagctcgtcggtcagcaggttcgcgtaagcgacccgccgatcgagtagacggccaagtggcaacccctctggttccaagcaacccaggaaaagagctgcaccgaggagcccgcaaactaggcaacccaagctgcaacaggcggccataacttactcggatactccttctgtcaaaaaaaaaaaaacttaacctctgtctagatttgttgtagattatgtctcatccacgtattaggttaagtttttttggacggggggattagtaggcaaccccaagctacgcaacccaacccaaccttggatgggaagcggcctctgtcccttgggattagggggtgtttggatccagggactgaactttagtccttgtcatatcggatgtttggacactaaccacaagcaatgggagtcctcaccgcacattgtacgcctacatgtatgcaaacaaaattagtggaggaaaacgatcatacgccccacccacctaacaaaaccattcctttagaaaaccggtgaaaattaggaaaaaataaaaaccaaaactttgtctaccaaaaaaaacatggctttaactttcatttttaatcccatatctccctccatttcaagatgtatggcgccgctgacttcttgcgtaacattcgaccattcgtcttattaaaaatatataaatattatttattttgttgttatcaaataaactataatcttaacttatacttttatatatttgtattcaatttttaaattaaacaaatgattaaacattatgaaaaaagtcaacgacatcatacatttaaaaaatgaggtagtatcatgactttgcggtttttctatagaacactgcacaagggaaatgcactttgtaaatcagctcatgaacactacacctatcctaatattcatttatgattgaatagtagagagaaaccgtgtgaaagttcggaaatacccctagactcacatgtcaagtctctcatctctctatttctctcgagttctatttctttgctcttctcgctatcgcaggaggccggcggggcgagtcggggtgtgatgagcttaaaggcggtgggctgtggttggcggtgattggggaaggaaatggggaggcttcgcctcgcctcgcttcccaaatctcacaaactaaaagctaacggcactaactcatggaccgaaaaggaagaaattaacgcgggtttgtgccgtgtagatgtttagtaccaaaaagactgagtggaggtcttctgcagtactgcactactcactgacatgtgggtcccatagaccgagcaatgctgcacttagtaagttcttgatcggttaatccccatgagggagggactaaaggagatttattcaacacctattatggtgtgaaattattccctcttaattccttccaatccttttcaattccctccaaaccgaaccagcctaaatgacggtattaagtatacattgaattttttttctaataaggaaaaagtatgcattgaattttctctatttttgaaacggaggaaataattgatataggagaaggtgaagaagcagatcctcggacacctcactccccttcccaaccggcaaaccctactttttctgcggcggccgcggtgatggattccggcccatcttgtgacggtgctagccacggccacaccagttctgc

SEQ ID NO: 5792 - DNA, 2546 bp, Oryza sativa
gataatgcgatggcatatgacaatgctgtttctgctcttgggaaaatatgtcagtttcatcgtgatggcattgatgcatctcaggtgtcttacaagccatatgaattaatatacttactctgaagtgtattcttactcatttgaaatcatggtgttgctacctgtcctgctgattaattaaactcttgtctacagagacaaagaataccaagtttcttcagttgcccttgataaattttgacatcaacgtcaataacataaagcatgtaacagcctaaagagcctcagccgcatacagtatgctacatgcaaaaacattgaatgaacgggttgaaagccttaagtgactgctcagtactattgaattaattttctactaaaacatacagttaaatgacatgagaactcttctttactagagtagtgtccattttggacttacattaggtctgccaagtcgtcgtagatttattatactatgtgtagtatttccttaaccatgcaatgcttctaagttctaaccgtgtatcattttttaaatattaacaggttgttcctgcttggttaagttgtttgccaataaaaaatgacttaatcgaggccaagatagttcatgaacaactctgtacgatgcttgagaagtaagtaatgatctcagtatttttgtacagttacgcagcttggcttatatatggtgtagaaacatcaatcttgttcattgcttccttattataatgtttatttttcatttcattgaagatctcatttcaatttttgcaggtcagatagggagcttttgggtcataacaaccagtatcttccaaagattgtctctatttttgcggaggtacctatttatttttttccttaatttttccttttttgttctgattaactatatagaaagaactgcaacacaactagttgcagagcagtattggaatgtttatgttgaaatggggttgagttgattgtgtttggctggtcagttggaattcatcaccaactgaggccattaggttaactaccttttgatcctgaactgggttgctacaagcttaacatagctttataggggctaaataattttcagtagaggagtacatagcaccagggtactgccaatttagatctcaaacgaatatgaataaacaagacattttatggcttatctggtctataatgtagccccccccccccccccacacacacacacacacaaaaaaaaaaggaacatatttcaccactgatttttcacaatgcaatgtctttatctttaatttagataatttaaaaagatagcatttgcttgtctcatgtactgctgtgtagtatcgttggtagaagcccctgaaataagatatttgggagacattccaaaatggtgatttgttttctctgagttttgagaaagaaagtagttatactttaatgagagtatgagacttaggcgattaaccaccatggcttttagaacattgtttggtttgtaacaccacatctatttccttatggatgcagatattatgtgcgggtaaggatctggcaacagaacaaacttttagtaagatggttaatttgctaagacagcttcagactacattgcctccttcagtactggcgtcaacatggtcttctttgcagccgcagcaacagcttgccctacagtctgtgttgtcatcatagctgaacagtaacctcagcaatgttgagcatgtggccttcacatattgccttcttttttgggttttcatgtggttttgtgcttgggttcctggagtttgtgcagcatacaaatgccctgagcttttgtatgaagggcatggtttgcatcagaagtgtatactgtcacagaacatcatggatgtgtatggggctgagcaatctctgcttcacagcaagtgaagttgtaaagcaatatgttcattttactaggaattagttgggttgaagaaaatgtaaattaacaattttgatcgttgatgttttgatatcatattatttcaaacctctctgcgcaccttatgtccttacctattgaatttaggttgcttgtctgagacttgtgtagaatgaccatcttgctgatttgagtttgctttactgacttttgagaacatgtatggcatttgcatacttctactgtcaagtgctcaagcggcatctgtccttgatcaccctggtgctaatcttggagcgggaggtatgtcctgataccgcacaagctgtagactgtcgctgtacttgtggtttgatgctgattgcatctattcctgcaggttgaagtcgaacagatttgacagctccatggcgattgtcgtcaggggaaggttgaggttagattctgtgggccactgggaaaacctcaaaaaggaaccagtatttactttctgaaaataatatctgctgtgtcccagttgagcttggggtgcttgatttctagggttgcattgttagaactttctgactattaattgctaagacgaaatgaaagcatcagttttctgagaaatcgcgattccccttctgcacgtagggcctgtttg

SEQ ID NO: 5793 - DNA, 15534 bp, Oryza sativa
cccatgtaagctgtagtagttctcctgttaattgatataggccataattgtcctggcccaagtattaaggaggtgataaaattccccgcaaaaaaaaaaaggaggtgataaaattgagaatgcttactaggaatttagttctgttatgtaccatctcatgattgtttttggaggatgagggaatacttagtagtttgtatgggttttaacgaaagctgcatactgaggaaagataataagcaggggcatggttgggaagctcattccatcgacatgcaggcattataaaatcagaaaatatctcaaatatataccttaaattttcaattgaggactgattatcatatcagattatcagctatgatcataagcattgcaagctagaaattgtagtatggtaagacggtaatgtattactgttctggcctactagttctgtgaacaatttccattcagtaggattctgtagagtttaactgggtatttccttccactaagcacataccttagataaagaattggattcttgaattaaaaatatcagcctgttccattgctctattgtggtatacttgtttttgctaatgtcccatttatttcgactttatgattccataactgttgttgtcatgttatttattatagattctaatattacgctaaaaatggttatcctttcagggataaggcctactttgtggatctcttcgtaagagcatctaacatgccagcaataaggatgtatgaaaaggtaagcttcatacaaatttcatgatcatctagcactctaactcactgatttatatgattacacatttatatatgaatactgaataacaaacgcttgatctttcaaactagtttcttctactgcccctaaacagaattgttttagtgaaaaaaaaaatcatgtatgaaggtttcagcatagagtttattcttgaaaatttgaatccaaaatgacattatttctagtgagcttatcaaattatgttcctggtttccatagcttggctatgtggtttatcgaagggtgctccgctattactcaggggaagaagatggccttggtaagcacttccacagtgccaaatcatcactttgtgtcatattcaaattcattgttctaatggcgttgctcacttctgtccttgtttttgcttagatatgaggaaagctttgtcacaagacgttgaaaagaagtccatcataccactgaagagaccaataacaccggatgaacttgaatatgattgaagttaacttctagttacttccagtgttttgtttgctgttaacttctatggtgatttgccaagtgtcttttgtctccagtagtatcatctagtgatcgtgctgttttcttttctgcatcctgataagattcaacataactctgaaggtgattctatcgttttggaatggaatgcagcacttagtaagtagtctatcttggaatgaggtgctatcttgtaaccataccgttattttcttgtatcgaggagttccacgtctgtatcattagcctccacacgattagaaaccagatgagaccttagtatagataaaatgtgaatgggccaagtctgatattctgcagatgtggagttttgaccttggtagcgggcgtaacgcgagatcacaacttcacatacgttagcactgcagagaggagtaagaaaattcatcaaacatttaatataaaattgccaaatttcttaagatttcttctcaaagttacatcaacccttggaatactgataaacatacgtgaagaacttgcactcgtgtttgtttgagctatgaacgtcgataggaaaaatcatcgatgtatgtaagtcgtcctctaattggccttaaatatgactgtagccggtagctcccatatccggctctcattttatcgtgctcaaaattccactaatatattgacaatagctagaaaaagaatatccattggacagcagcggggaccgtatttaatcttgttagggcaaaaaaagattttggaattcctacaccctccaggcctttatacagtccaatcaaccagtgtctttcttattagggaataacaaaattggtattgccctaaacaacgaatttgataggatacgtgcttcctgaagtccccctatttgtatatgagagcatcacgccctggtcctacgccgatgtaatggactgggataccaaccagctcttctatcctctccacgtacaaacgagcagtctctgggagatcgctgtagtttcgtacagaggaaatgtcgtcctcccacccaggtagaacctcatatttgacctataccaacagagagaacataagaattttcatcaattaccaagagtcacattgagtgatttagtgctctcatatgctgcctgtaaaattatggcatggaatatgagtaaatggaacaggatcaactgctcttcctcaccttaattttctccagaagatcaaggtctgcagggaatgattcaatttctttaccatcttcagtacaatatgcaattcccagctttacttccttgaggccagttaacacgtcgagtttggtcagatttaaagatgagaaaccgtttatttggcagcagtacttgagtgcaactatatcaagccagccacagcgcctcggtcgacctgtcgttgtcccaaactccattccagaagcgcggagcaaatcaccagtcttacccaacagctctgttgggaatgggccagaacctaccctggttgtgtaagcttttacctgcacatggaaatattaagttttgtagggagaggaaaagtatggattgttaagaagtttaaagatagctgtaccgaccactccaatgagatcaccgatacttctaggagcaataccaaggccagtgcaaataccaccagctgagggactcgaggaagtaacaaatgggtaagtaccaaagtcaatgtctaacatggtggcttgaccaccttcaaccaatattttcttattctgcaagattgattgattcatgaagtgcacggtatcagtaatataaggtcctagacgctcggcaaacttttcgtacttctcaacctcctctttaagggtcttggtactgtattcaaatccttcaaagcgcagagctgcatctctcagcaaggtattgagtttagcaccaaatgtatccatatgccgcagatcactgactctaagtccattccttataactttgtttgaatagcatggcccaattcccctctttgttgttcctataagggaatttccaagctctacctctctgagcccgtcaacagtttgatgaaagtcaaacaaaagatgggcacgatctgatactaaaattcttccttcacaggaaattccatttgattctaacccatcaatttctttgaagaacccaggaagatgaactactgctccattaccaactacacacattgtcttctcattgaggatacctgatggaacaagatgtaatgaaaacttctttccctctgaattatatatagtatgcccagcattagctccaccctaataacataaaacattctacaagttaaaacaatatatatatatatatatatatatatatatgatcaaatcctattggacaaaactaagtctagtcttattgccaccttaagaaaactgaacttcataaaggtgtgcaaaaacctataaaaattagtcaatacaacaagtgcagagagaacagtaggagaaatgagcactatgtaatcaaggttttccatgaagcaggataatcattttttttaacccataagaactgcttgtgtaaagtgaaaaggcaatatccttgccataaaggaaatgcaccattagttatcaatactgcattactgcctcgactagataaccggaagggttatcggtattttaagatgttttataattctattttgttagtacgaaggattcgacattaaaaaaatgaacatatagaaggaatatccattgtggttatgggtttagaaaaattgggaatagacaaaatgctttctgcagatatattaaactgatgcttagaatagttcagctatccttattcgttaatgatgatacagccataaaaattatcatcataaaaattaaagatatattcaagaatgagaaaacagcaaggctctcgagtctcatcaagaatacgttgagatcggaagggcttcacacaattcaagaaaactggggaccaatggtacaagtacaacccatgctgatatcagtacttatcatcaaaaccaagcaagaaccaaaatggaagggagccttggactactaagcttccttcgtaacacggaatttctcctgttctgctagagttgaatttcccatgtataaaacgactttctgtgatagtgttgcgatcaaaggagtacaaagtagcagtagcttacagtagtacggtaaaggcagtctgcgtggatggcgccggaagataaacacccttcaagtaacgatcataaagcaaactaacgcaaattactactcccctctgtcagaaaaaaaccaacctagtacggaacgtgagacatcctactatgttggtttttttggacagagggagtacatctcagctaaaggatcgcctctggaaactcaccagcgccaacgtgagaactcgtactatcctaccacaaggaaccaattaatcgaacaccttccggacaaactgacaaagcaaagaggagcagagagcgggtgtgtttggttgcaagccacactttgccacagtttgccacgcctaaggttaggcagatttgacaggtgtttggttgtagcaacagttgtggcaagattcccctctaacaaattgggtcccacgtgtcaatggctcaaaaaagtgtggcaagattcagattcccttagacttagtaagttgtggctaacaatttgatcacctcaccttagacaaggtgtgacaacttttattagcaagtaatggtaaagtgtggctgggaaccaaacagccccacccagcaaaagaagcgcgcgcgacggcgcgagacggaccgacctggcagcgtgcgacgatgtcgaagcgctgcgcgaggatgtcgacgagctttcccttcccctcgtcgccccactgcgtgcccagcaccccggccacctggctcagcgactccagccgcccctgcgcggccgccgactccggggccgtggccacggatgccgccaccctcagcgcccggcgcgagcgcggcgccaccgcgcatggcgccggtggcctcgcggcggcggcggggaggaaggagagggaggcggcggcggcggcggcggggtccaggcacggaggggagaatggcatggcggcgacggtggagggaaatcgaggagagaatggcggctggtggtgggccctccccgcctgctgctgggtttggaggcgacggtcgtggatgtgcccgttcgttatcttctctgttcgattctcccgtcgcgagatcggacggctcggatgtttcagaaatgattttcttcaattgtgtgttccaaatcttcaaaaattcgttttggtcgagttttgggggaaagtaagttgttgaatttcaggagatttggtgaaattcgtcatatcgcccgggctcgcatttcaaacaatgactttcagaacgcgtggtttgcttatttgcgttgtactttgggagcaacagtttgaacacagatttaaatttctcgtttaaatgtgaatcgcgctgcttgtaaattttcttaattttgatttgctttcattctagccgttaaatttctggagctaagatcgccatctactcatcatgttgcattttgcagcatcaccaaccggccaacagatatcaggccctaaactcctgattaagaattatgtagctagatgagcacttgagcagcaaccgcgtcaaaatttggaagagtaatagctactaatcatcagggaacacactttggacactaggtaaatagctcaaaattttctactgaggtatctgggcatattcttaaagcccatgtaaaacacctaaacatcaaaatggagctgcttatcatgcataagaatacgtaggtgtgcagatcatggcagcaactccacagaagcagcgaccgatgaacaatttgtcaaaacagatacagcatggagcaaatgaagttcgagcctcagcgacctttggccgaagcactggaatcagcattctttttccttttcttcagcaagttcaccttgtcctttttcctttcctggttaatctgtagttgcaaagggtaacagattagtttagctcaaagccacttaaatttacgctgaaacagggaaatgcttgtggcatctacaaggcatatgttataaaatttggcaatgtggctaaaatttcaatggatgacatggctgcaacaatgaacggatgtgaaacagcaagcaagcagaaagtgacaaatacatgcaaggcataagagcgcagacctcaattgcttgaagaaggcctctctgcttgcgagacataagggtcttggaaatgtcagcagcatccttctcggcttgtttatgagagtcctccatatgatcgtcagcttctttagtatcacttttgtccacaacatctggttggttatctgccgtcctatttgagaaggtctttccttcgtattccatcctcagctcatcgtggtactgcttctctagcatctccaactttagaagagaaaaaggcaaaatgagacaacagagaatgctttctgtacaagaagcaaataagatgacagcagaaaggactaatgttttgtactacatggtgttgaatttaccttcctcttcttgtcagcaatttcattagactctgatcgatcaataattgcctctaccagtgaattttccatatcttcgtcccctaaacttggcagaggcaacacctggctttgagcagcagcttgcagcctcttaatggtctctgcatactcaggaatgtaaccctctgcatcattgtccacaaagggagataaatgtggtggaggcaccctgagaccaaaaaaaaaaggaatattgatggcaaaaattaggacaaacataagtataaaaaattagatcaacttttatgcatctttatagttcatttttgcaaactgtgcaagtacagacagtaaaaaaaggctgtcaatttaactaaatgttaaattatacatgaactatatttcagtaaagttgtttccacctaagaaccatcaatatgtgcaaccaaaatgtgaaaacagcatgcgacaaattaaggtattgcagtacagtgatttttaattaagttggaagtgggacaaacattgggctctcaactacaggagtgcaaatattatataatcagcacttaacaactattaaagggatatctccatatgatgttaacagcaagcaattgtcattagtgaaggctgcccccaactaaggttggaaataaacacaaatatccacccacaaattttagcaaacatatgtagaagcaacacacaaggccacacaaataatcaataaaaattacatatataatacatgtgccatgaggtatacctcccgacaatataaccttctgtcggcaatatgatgcgagcattcacgcaatcatatatccactgtggttgaacatactccctagagaggaaaacgtggctttgggtcggtctatcaacaatctgcaaaataatgagtgatatcagtaatctgcaaaataccgtaactacaagataaaactacattagagataaattggaaacaaatggctgagctaattgttatatatgattatttgatatttaaacagtattttatatttaacaaaagggtaacaataattttatccatcaatttgggcaacctctggtgtaatcttacagaaagataaatatacctgatgagtgatgtcttcatctgtctcatcaaaaggagctccttctccttcccatgaaacggtaccaccaaatgctggaatgataaataagagagattccctaggcacctgaaagtggaaaacaagacagataataagataagtatattgaagatgatctaattgaacaaacatacccccagggatatccccagggtacataagtttccactggcctacctcacgacttaggtagaacttcaggtttttgaataaactcctgcattctttggcatcagcgtcgtctgcatcagcagcagtagattcttgtacaagatgcatcagcgctccaggttcattagttgggagctggtgttgaagttgtgccaatctgagttcagactcatctgtttttgagctctctttattgtcttcaccctctttgtcttcaattagtccagcaggttctgaatttccaggtactcttccagaagacatgtaccggcacaacgcatagagctctaataggagaaaaacagtgttgtcaaccaaaaagatcccgaaaaagaagaaattaaaaaataaagggaaattattagctatttgagaaggataaaacgtaggttcaccaacaaaactacaataagcaccaacacttaccagaagctaaagcttccaaacgaggatccagaacaggaggataatttacatttatcgaatggtaaagcttgaagtttataaatcccagaagtgtctgcaggtagtatagaacagtcaaaaaattgaaagaaccattgtaccaaacactgttgagatcggcattttttttatatatactaagtgatcaatcttgaaaagttattgctaggtatcgtaacattatatctgaacattttcagcatgatcataggtctgtcaggtgtacatggttatagccagactgcaacataatttatttacaatagtcatatcttccatgcaacagaatattaaatattaaacagagattccaaaacaaaacaagcatatatggcttcagacctacaattgaaacaatagcagcaatcatagaagattgtagcctgcaaattcttgcaagacagaacacacaagagccaagattgttgcactcaaagaaatgtgcttgcatttacccccatgatatttccttttattttaccgcgtgcaatcgcattttattgtggatcaaattttcgtaacagttccagtactatttggatagaagtggtgctatattgctgaataaagcaggaaatacatagtaattaggaaattaggacagatcatcgtcattgtcacctcatagaattccaaaaaggtaagcatcacattgaagtcaacgtcatcagttaaaacttgctgaagagcatgtggagttagccaggtgatcttttgaccttgaacttcagcctgcaaaaagtagttatattatataaatatatatactatagcatgcacagttacagtgattttaaaggcaaggactgcaagtagacataactacacaagcttacttgataatatatgcccttgacggatataaatgtctttcgcagggaatgagttcgagatatatatgcttgccattcatggctcaacctacaaagtacaaacatgtcccccaaattaataaaaggtattagcaacgccaaacaaagtcaggtacagcaattcattatagcagcaataaagatggggcaaatgtcatagacttgtagcatgatgaacaaatgaactaggaaactacaagagccccttggctgggagtgttgtgtgtgaatttgagggaggggattcatttacaacagagcatacctgcggcaattatgaatccgctgaacttgcacacgttcaccttcaacagcaggcaacgcagcaaaaagatgcaccattgttaggcaatcatccaagtcacgaagagcatcaacaaaagttggatatctgtaaagcaaaaatatggggatgatttatagaaacaaatacggtatggatgtcatcagcaaatcactttaaacctggtacctttcaagaataagcctgtcaagtttgtaagttggtggtcggttcaataatctgtctgcaagatctttatttttcttagcaaacgcctttttgaccttcttcctgtggaccttgatttctctgaagtcaaacaacaatgaaatgtcattaagagtggagacatcacaaaccaagaatagcatggtcttataactcacactttttaatgcaaagacaacatgcaccacactgtatcaactaaagttctaatgaaactctagattatatataaagcatgaattatgattcccttgtcaacgatcaagtaattgtgagcaactagtctatctgccattctgccaaccatcaaaatatcattgatgaagcaccgaggagaataattcacatggcctagctaatggctctctgaaaacctacattataattatttcctcaattgtattcagtaataaaatacaagtttctatcttgcttgccattttctccgctgcataaactgtgacagaaacaaattgcacaattgcagcaaacaaatcaaataacaagaacacaacacaaaccgatcactagcacaattaagatattttcatattgcctatctcagtggcctaataacaaataagaaaattgaaagcattgttatctcattaaaaattaaatatgtctgcagctaaattttgtgatagtgatacattatatgcccttaattgcacagagaaatgtgcaatcaaccaaaaaggcatgcaattcaaatgctcagtgagtgaatactgaatacttctgtagccgccaaaaaaaaacacagatggtagaccttttgcaagaaaacttaagtacctaaacttctcaatcaagggatcatgggccaggaaggcaatatccttcatgtggtagtaggtcttgtggttcccttccaccttcttctttggatcccggggaaagacgcccttgagaatgcatagcttcctgcaacggattgcaaaattttaagcagtcagaaaaaaaaaatcctacatcgcttgcagtataaaagctatacgtaacgcagagaatagtgaaggtaatcctaatggccaataggcgtatcgaacaaattaattagcttaatggagtgtacagcttaaagcttcagcgtaaaatgtgtaaaatttcccagacagctttgttagctccaacaaaaccaataaaaatagccacaactacactcgttaatagctccaaaatgacccaacatatcattagtcagtactcagtagtagcagctgggagattagaggatgacctgaaggttgcgaggctaatctgcaggtacttcaccgccttggtcctggtgatgtacttcgccgcgttcccctccttcttcttgccctagagcatccacgaaagcagcggtgagaggctccgcgtacaacaaggagaggggtattcggggggaggaggcgggaggaagacggggtgaattaccgcaggccggtagtgcttcggcatggcggcggcggcggcggcggcgtggctcctcggggaaggggagcgggggaaaggagaggccgaagaggggaggtgggtttttagggttttggtttatattgcggcggatggctttggggccttgggttgggctgaaaggctggaacccggcgcggcgctcactgagaagaggtgaagactggagacttgggaggtgggagccggcctgtcagcgtctgcttaacgcttagtacatattcttctcgtaaaaggggattgttcagtcgattttagagagagatgtactccctccgtctctataaaaaaacagacacgctaaaaaagttacgacagttttcccttaaaaatatatcggtttgtggtgcattgaattgacgttaagattagtgctaaaataatagtatgctaaggccgggagtccagcatagcaaacatcttttcttgaaaaaaaaagagacacttctcatatatttatacaaatttacatagtagttacatcccacttacacaccacttacatatataattttagaatttacatatgtaattttaggacttacatatgtaattttgagacttacattgtaaatacactaaaatttcatatgcaattttagggacttataatgtaaacacataccgactattttttcatgaaaaatatggcgccataaatatagctactctcaaaaaaaaaaacctataactatatgtaacatcctacctccgtcccaaaatgtaagcatatagaatctggacacatatgtgtccagattgctatattttggggcggatggagtattctagtatgaatatatgcatacctttgtctatattcattgtactggaatatggcagatctaattctaagtttatttttgtgggacaaagatagtaagagtttgtatcactattttgcaggtaacgtggagtagattttcggtcattcagaagtacattttctctaagcttgtagatttcggtcatctaactcttttataccatgaaggtgacgtgatataccaacaagatcagtgtactttaataccatatcgccgttttcttgaatttgcccttgaagtaatccttacatgagctttttaaaaccatatatgcatatttttgtctatctcgaaccgctagtaacaactagaaaccaaattacgataatatagtcactgctttaaccagttgctacttgtttgttgcaacgaatgaaccagtcacattatgcgggcaactctgtaacgagcaactaacaaccccataagaaacaaacacaaacacctccttgttcgagtaatagactgctttgttatctccgaaattacgtgagaaaaagaacctcggatttattctatgttatagtttttttactcggagttatcaagctccgaccagtaatatattatatacgatctagtatcaataattaacaataaaaaaccataaactgggcatattcggctgcaaggtacagcgttgccttgcagccaaaccgcggcatattctttgtttgttgtatggtgtaacagatggctagttatatagtagcactgtacttggcagccgaacaagtgttggtcgaccaacttctgttggtcaaaaccaacaagtgtttatagaccgaggagtcaccacagcaaagaatggcttacgtcaaaatacgtactctatccgggtgtttttaatacatgacgtcattgacttttagttttatatttgatcatctgtcgtattcaatatatttcaaataggataaaatacaaagtcatgaatataatacacaatacatctaataacaaaataatcacaaaaaaaaaacgataacacagtttttttagaaacatggtatgaacgcagcactcacgacattcacccactcactcgtatgagcaccttctaaacgttggacgacatatattgagattaaccaagtcaccacaaacgtttttaccatcgatgataaaaaaaagcaatatatatttcaataatacgaatctcatatgtacaccaaaaaaaatggtgtcataaaaaaactgaagaaggtacatctttttacatgctatctactcaagaaggtacatctttttgacatgctatttactccctctgttttcaggtcataagtcaaactgtttcaaatttaactaaatttatagacaaaatagtaatatttactataggtgtgtttagttcacgctaaaattggaagtttggttgaaattagaacgatgtgatggaaaagttggaagtttgtgtatgtagaaaagttttgatatgatggaaaagttggaagtttaaagaaaaagtttgaaactaaacccagcctatactaaattagtttcatcaaatcaataattaaatatattttcataataaatttgtcttgtgttgaaaattttactattactttttttctacaaacttaattaactttaaagtagtttaactttttctaaagttaaaatgtcttataacctgaaacggagggagtagtacatttgtattcaaggtaatacaatacgaaggtaatattaaaaggtttgaaaatgataaagaaaagaagggggaaaaaaggtttctcttgggttggacaaggccttatcaaacccggcctgaactatactaccgcacaacacacaaaacgtcgacgactaatgacgtcatcatccgggaccccacctgccagcgagctaactaaaaatccaaggaagcaaaacgaaaccgcgcgccgccaaccttttcgcggcttcactttgtttttcttttgtcttcgtttttttcccgcggcgcgattacgaaaagagctcttcccgccggcgccaccgcccgccgaccaaaactcctccataaacccctctctccccgccattccccacctctctctcccctcccctcccctcccttcgcgcctcctcatccgcctctctctctcctccccctccgatggcgacgcggccgcggtcctccccgtcgttcttcggcggcctccgggcacgcgagctcggcggcggcagggtgccactgccacgcgcctccgcggcgcggctcccctacctcgcggacctctcctcctaccccggcggccgcgggagcggggtcatcgccgtcgagcacgccggcgaccccgccatacctttcgccatctccttctgcaaggtgagcgagcctgggatcttttgtccccccttcgttttcatgcgttttttttcccgattccgacatcgaaagggttaagatttgatgggaactgattgttcgatgaaccctcgcatttttttttcatttcaggcggagcagatctctcaccttctggcggtagctgatgaggacgggtatgttggcatctacgacacccgccggcgcctcccatccagctcatcgtcattggggaaatcaggttcgattggatcccccctctttgatctagttttcgcactgttcgattcagttcgtggatgtctggggccacgcactgggtgtcatgttcgattcgttccggtctgaaaccgtgacattctcgcagctgaaacgaagatgtccgattgggttgcccacaacaatgccatctttgatgtgtgctggatcaaggtaacacctgttactctcaatcattgaaacatgttagagttagtggtataaaagccaatcctcactcacttgtatcatcttctttttggcgttgtttatttaggacggttcccaattactgactgcatcaggcgatcagactgtaagtatcgcaataagatcatttttcagaagtagaatagaattgtttgtttgttctgcattacaattcatattaatgtgatggtggactgccttttgatcattgggattgtttgttctgtatcaggtgaaaatatggtctgtggaaaacaagaaatgccttggtgttctgtcagggcacaccgggagtgtgaagtcgctgtcatgccattcttcaaacccaggttggtgttatgttgggaaacaaaaaatcaattcttcgtatatttgtgcctgtaaaatttgccaggaacttgtattcaagaacttattcactgcagagctcattgttactggatcaagggatggttcttttgctctttgggatctaagaatcgacccaaaaacccctaatggtcaccgtg

SEQ ID NO: 5794 - DNA, 9196 bp, Oryza sativa
acacaatagtgtcacagccagggacatcatggagggtgatggtcttgaggaataacttggtactgtggtggttcttgatgatgatggcccctggcacaccatgcttgtccatctcccagttgaacctcactgtgagcttggactccccttgtgataccgatggtaaatctgtcaacccctgctccagattcgcctctgatccaactatccccctgccctcattgtctgcacatagcatataagacaataggttagtcacttcatttgtgtcactggccgttttcaccttgtttccgttcaatctgtgctgagtactgagtactgatccttgattctttctacatagcaaacatgtacaaactcatgcaaagtaagcgaggaagaaatggagaaagatcagtactttggtcggcaacagtggcgctgacaagctggcaggtgatgctgtttccaaagacctcatggacgttgtcgaggagcgaggcagtgaagtcccttggatccagtaattttcggctcatcagcacagccaagcctttgatcttatttccatttttccctgtcagcttgtccttgagccctcccagcattctgtgatactgtagtcagtgacaaaagaagctatgttggtggtggtgtgtgtatgttgccgttgcaatggatggggaagaacttagcaatgcagctgagtttttatagaagggggagagggaggttcgcgatgtcagtgtgcccatgagtattggctactaatgcgactatgcaagtggatactatgtcaagtggaagaccgaaccccaaggcatcaactagcccattcacttggacaacacactgtaagttgctttcttttagtcgagaattgtagagatatttctcctgttttgaaactttgaagagtatcacattttagcttgaaaattttttagggtgtaaattcgaagtctaagagatcgagctggtcatccttgtctcacagccttgtcaaaatattaatacttattcccttgttgatagaaccaggcaagggttcgacatttttgagtcgtatgagctgggttcatattggcattgaaatgaaccatctgtatgtgaaccttaccaactcttggctcttgaggtgtgctgccaaaaatattcgaacagttttcatgggtgtgatacacattggcctcctgcctagtactagtatatttctacattatcctttttattatgaggtttcacccttagtgatcctatagaagttatggcattacattagtatcaactgtcatttacagtaaggtgttaattattccctattggcctcttggctttacttgctgacaggtccacttcagctgcacagtatactggataagcactgaacgaagactgtattaacttattagcagtttgaaacgtatttgatgcccgtgccaagcaactaaacaagaggccttcgaattgtcattgacgaagacctgagctacgggcctaaggtgtgtccatgttttactccagtttggatcatgtgaccggcatcttggatcttgccaattgcagtcccagaaattcaggtaggagcaaatgaaatgaggagcatatgcaaattgggactatctttaggacacgtttgcaggcaggattatttttgccgtttatatgggaaatcgagctgatttgaattagattcctgtatttggtttcatgtacttgagttgaatgcgcttaaatgcgtccgatttccataggcttcagtagagcgtgtttaatgttctttctacctccaattttagcaactctttgattctgtgcgcatgcagcatatttcttccaaggaagtacacctatcatgaaagattcgttgtaaaaatatgaactaaaatcgaaccttccaatcattaataggacttctccagatttgaccactaacatggcaacacataataagattaagtagaacggccatgtaacgctttgaagcaaatgtaacacgtgcctttttcattagcatgaaaaatactattcgaacatagaagtcgccgagagttctcaagccccacggtacatattggcgaaacccatatttcaggacatagacaagaaaagtttaacaaaagctcaatggacaatttcacgataaagatggacaccagccgaaaatgccatgatcataacatgagtaattcgtcatacttatatatgtaaagaaagcaattgctatggatttcatcaagttcatcacaccgagaaaaaaaaagatgatacattacatatgttcacaaattcacattattacatgtacagagggtaaaccacatatatattgttcaagcggccaaacaggtagtagtgatcttccaataacctgcatcattatgccatgcccttatcttcccattgaccttacatgattacatctagtggcctgtttgttgccgctcccaccttaggtcctcagagtactccatcatggctgcccttggatcaccgtctgtgacagataagtagtacgcagcggcaaatgccatgcccttatcttcccattgaccttacatctagtggcctgtttgttgcctctcccaccttaggtcctcagagtactccatcatggctgcccttggatcaccgtctgtgacagataagtagtacgcagcggttctgtcatcggtatgcaagcttcgcttgactgactccaaaatccttctgcttcgtcgttctgcagcagcagtgttcgtcgaggattctgcttttccactagggcgtccctggggataaaagactgcaacctctcttctagcgttataatccatctcaatgtagcatgtgctaccctgaagaatttcaggattgctgatcggtatcagaagcctctccctcaagtagatcccatggtcgctcatcatgttgttgaaacgttttatatcggtcacctgcttgcaattcatagagcaccaaagagtgaagaacgttgctcacacaagcaaagtgcatctttgtggaacaaaggagacaagtgtgcagaatggtatagataaacagaattcacaaatgtacaaagtaaagttatgtatggttttcaaagttcagctgcatcaactattaaagagagtattccagcaaaattcacaccacacaaatggctatatctataatcaactctacacggcaacagatagaatctagcagctgaaggtgcataggcattgtgcagcaatccctaaataatcttctttgaacaagagtgaatctcatgaatttgcaactatcattaacagtttagcacatagcaggaatcgtccaacttttgcacagtcaaaaattagtggtgagctccacaatactgagaatggccaaaggtgtcaaacgccaggtcctagattatttaaaccttaaaaaatgtattgaattgtcgtgcttgttcttatggctacacattatcagcgtctcagtgactagtaacctttgttcatttcattccagatgacctcccttctcagcaaccactcagaatattctaagctccagtgtctccatctttggataaaaagacatgttactgttgtttaaaactatcggttgtcaaaattaagtgctgcttggatcttccacggggtaattaggggcaaatctatatgagaatcatacccttttgtgtataacaagaaggataactaggcgcaaatatgcatagagctagcgatagagccataatcgagcatcagacgggccgatggttagtacctggatggagtacttgagcgcgatgccggggacggtgtccccgcggcggacggtgtgcgagagcgcgaaccgggcgagggacgcggcgcgccagaaggccctcgtctccggctcgccgacgacgcggcgcaccccccagggcgacgcgaaggcggcctccagcacggcgcggtcggaggcgaccccgcgccacagccggcagacgcacgccgccctcgcgaggtcgggcggcggcagcctctgcaggaccgcgcgcaggaggtcccccgggaagtcgttgctccccccctccatcgcagccggggtacgatcggggcaaaggcaaagacggatcggagctcacctcgggcgagaggaggatggctgtggctgggggcgatcgtgcgcggcgccagctccgccgctaccgcggccggtggaggatcggaggagaggagggagatcgcgaggtgaggcggctcgcgtgcggtggcgcggccgtggcggagtctgggatgatatgtggtgtggtgttgacgagtggtgtgcgtgcacggcgcagcagccgccgcgtttgcttaacgatccaatttttatctgaaaaacaaaaaacataaatacgacggtagtagtattttaacggaatagctaacgcgggcctagaaaaccatgactaaatttagtccctctcacatgtttctgtgagagggactaaagtttagccctactttagtccctccaaccaaacaccacctaatagctaatcttataataacagtagtctacttataaataatttgttcgagaagtttaatattttgaaaagcagacggttgacaaatcagcttttgagaatttgaaaaactatgttttcctagctttggacttttagcttatttttaagattctaccattacaacttctcaaaatctaaattaaaggctgaactatttgagaagtttctaattctggaagaaattgaaactagaaatttctacaaaaagatcccgaatcttataactatgattaccacaagtagatcgtaaatcttatacctatgtattgtaccgatactaagggtctgtttagtcggtgaaatgaaaatttttggatgtcacatcagacgtttgaccagatatcggaaggggttttcggacacgaatgaaaaaactaatttcatactccctccgtttcacaatgtaagttattctagcatttctcacattcatattaatgctaatgaatctagacatatcccacattcatattaatgctaatgaatctagacatatatatctatctagattcattaacatcaatacgaatgtgggaaatgctagaatgacttacattgtgaaacggaggaagtaactcgcatggaaaccgcgagacgaatcttttgaacctaattaagccgtcattaacatatgtggattactgtaacacttatggctaatcatggattaattagcctcaaaaaatttgtctcgcgatttacatgcaaagtgtgcaattattttttggggcaattgtgtttcagtccttgatttacaattcaattgtgattttacccttactttttagggtttgtgattttgcccctgcttttatgaaatgaagcacccgtctgcctctggttttgacataagtttggtgggcctgaaatttccgaattaaacgaataaagaaaatgttattattatttgtgaatgaccattctacccttggttcaatgagcaaaatcccgaattcctttactgtccgggttgcaagcgctgggttgcaagtggtggcggcggcgacgcgcggccagcgcgcggcagggaggagaagcggtgcgggccagcgcgcggcggagtcgggcgcgggcagggaggtgcggcggcggcagcgtcgcggctggcgcgcgcgcagggaggtgcggcgctcgcgcggctgcacgcgcagggacggcctttggaggcgccgcgacgaggatgacggcgaggaagaggacattgccgtcgacgagagggactcgctcgggctgccgttgccggtggtgagcaactgctcctcgtcggagtgtgagtacatggccgagtcagaggctgagctggcgaagacggaggagaagtgcgcgtcggcgtcgtcagcgtcggagtacgaaaagacgtcgcagtcgagcacggggagcgtcgccttccatggcgctgccgacgccggaggagacgggcataaggtgagtgttagtgctgcttctattattctgcgtttagttagttgggatttgggatggcataaatacaatggtgatcgatcacgatgcccatgcatgctgtgggccaaaatcatccatgcaactgttcgtttatcaagactaaatctctatcacgagcaaaagtgcaaatatttgtcactttttatctccttttttctaatcattaggcattagtgttcgttttgctctagaaattatcattgaatgccaaaacatttcaggggtatatttgtccattcaccataaatttaacaccggtaccattagttaacaaagtaggggcagacggctacttcatttaaaaaagtaggggcaaaatcacaaaccctaaaaagtagggataaaatcacaattgaatcgtaaagcaaggatagaaacacaattgccccttattttttttatctatttttaatgctccatacatatgtttaaaaattcgtgtgatgttttttaaaaagtttttaggaactaaacagggcctaatctggttcatgtctggtaccatagtaatagaactggtacctaccataccgtgctgaagttacgttaatgtaattccgttcaacggtacggcgttatgtggtatgaaaatgctcctcttcgaacgttcaatcaaatgaaaaacgtcggatgcctacgaccagctcagttcttacatgctaatttctcctttctttatgttgatgccagggaaatgctgcaaatcagcagtctggtggattggacgaacccttatcgtactgtaatatacatgcacatgcctagttgtttcttttcattctttcctcctctctttaaatattttttctcctaaattacttatccgatctatggaccgatcacaccgttgtattcgttgcaattaaatatttacaataagatattacatgattatattatgtcaaaagaaaaacatgtgtttcaaaccattaaaacaaaatgtttcatacgtgttagtgatatgtttcaatatgtgtcttgtttcacaaaattcctgaaactacctgctactactctctctccacctcatgcatgcatacatgcatatgttttagcaagcttcaaaatgatttttccctcaaattacctattcaatttatgatccgatcactacattgtatttgttgtaattaaatctttacaacaagatatcgcttgattatattttgataaaagaaaaacatgtgtttcaattcgttaatacttgttgtttcatatgtgacagcggcatgtttcaacgtgtatcttcaccatatttcataaaatatctaaatgttccaattgctgattttctttttcaccatatatatagcatcatgttttacttgttggttaactgcaatatttaaccgttcgatttttttttcaatttaaaaatgtttcacctaatatagtcatgatgtttcattctgtaatgatcaaatgttaccgtgaattgaaacattctttcgctattcgctgaaacattattttcatataagatgaaacagcatccgataaaacattttcgatctacttaatgaaacaattccgatatacttggcgcaacagcgtgcaacagtaaaataattcaataataagctaattttttttatcggattatattcatgtgtggacttgttttaaaattttaattgcaatgaatttaatggtgtaatcggatcatgttttggataaatattttaagagaaaaaatagtctaaaatttgtttaatccatgcatgatggatggctggcgcacctgtgcatggatcgaactgtcgcgcgagacgtccgatttttcgtttcgcgccgtacgtccgacgcgtagcattctccgagtactcgctaaaaaaatgatccaatttgggattcacactcgtgggtttgatgagccggaagggagcacgtcaaagtggggccagttaggacggcccattaggcccggaggagcgcctatctgaagtccaacacccgtccaggcaccggctctccgccgctcgaagcttctctcttctcaccggaatctcgagagcacagcgccgccccgacgacgagatccctcaccggcgccgccgccgccgcggccaggaggccgaggggccatgacgaccatccgccggttctgctgcgacgacctcctccgcttctcctccgtcaacctcgaccacctcaccgagaccgtgcgtccgccctaaaccctcgccgtctcctttttcttctcttgatttcgagcttacccgtcggtatgctcgtcgcagttcaacatgtccttctacatgacgtacatggctcgctggcccgactacttccacgccgccgtcagccccggggaccgcgtcatgggatacagtacgtgttcttgcccttgggggcggctgggtctgtgctagctgttgctagtgattctgcgtctttgtttgtcagattcgctgaaattgtagagtaaaccctgcatttcctctggaaaacatgagaatttagggatcttttgggcgttacagtgcccgattggaatgtggttcgcaggaaatttatgatttgtggaggttccagtggagtctaatgtaatcttggtagtactatttatttgccgattaggacttattatttgcctctttgggaagggtggaacactatgacctgaattgggagcaggcgagcatgttgttcatagtagtgttaagagtaacccttttagtgctgaatgcagtattctatagtggagtattgagatgattcacctgtctgaatagatgagcactgtgcaatattctagtggatatgtataatttttaaaatttatatattttccaagtaatacaaagttcacctgcaaaaggctatggggtcagttgaccccaaatctgcatttccaccattgtgtaatgttatgtctgcaatatttcttcctcctccacattctcctagtttagtttatgtctttgtggccattcatttatttggatgtctgttgcagtcatgggtaaggttgaaggacaaggtgaatcttggcatggacatgttacagcagtgtctgttgccacagaatttcggaggcagaagctagccaaaaaacttatgaaccttttggaggaaatcagtgacaagatgtaagtatctcaactatgactatccctatgattgaaccttcacgccgatttggtgattgtaaactatactgactattattgaattttgtgcttattgtgcataaacaactgttcatttgatatatcatgttcttca

SEQ ID NO: 5795 - DNA, 3299 bp, Oryza sativa
cttgcagccactgcaaaggaatgataacagggatgccaattgcatgagcctactgcccaagtgtggagatgattgtgtttggcaggcccccctgattgtcagttttggtgtttggtgcatccgccagattctgaacctgtgccttgtcgaaagtaggccagaactttggggcaagtatacatatgttcttaatcgtctccaggtatttttttttctattgctgtctattttgggcaaactgcaatatggagggtaacccagggatgcagatcatcaatggttgcttcctgcatgtagcatacatactatataggctattttggcattgttgtgaattatgcttcctacatatagcatacaaactagtactatataggctattttggtattgttgtggattacgataatctttattcgtatgatggctttaagatatttcggttttttattacctgtttttgcctaaatcaaattgacaaagatatatttcagtaaaaaagagagagagattgatttcccaataatagtagaagtggatggatatgggagaacggcaacagcttgataaccaaatttgacactctctctgatttttcaatggattgtgaaaatactccatatagcaatcctattttccataggaactttaaaaataagcactgtcagcacacataacaactgcaaactaaccatatacttgctatggtggctgggaatatttcgtgatgtatgaaagtatgaaacactgcaatagatggcattcatttatataaatttaaaatatagttgtttgcagagaactttgttttgtatgactactatcattttcttcgcctgtagatgaatcctgcaacttgtaagtgcattttgtcctactctgtgcttttaaccataagataaaccttaatcagaaatcccaactactgatttccttcagaagtgcataaaaacttgtgagtgggttcggttgcattgagaaattgacttctaatgcgacttgcatgcagcagaactgcccaaacttctgccacactgtttggacttcaagtttgctaattttctttttcatttacttgctagggaatacttgatcctgcattttccaagcctcagaaacccatgaaaggatgcgtatgccttcaaaaagttgccaagcccatctctggtactttcaccactgctggtatgatcttggagatgattaaagacgtggaacaagccatttctagccgcaagggccgaagcggcacagcagcaggagacgttgcttttcccaaagggaaggagaacctagcttctgtccttaagcgatacaagcgtaggctctcgaacaagacatctgcaggacaatagcgtggcagcgagctttcttttgtttcttgtttgtatagggttcttggggctgctccacaaagttctgtttttttgtgctcctcaaaccttgggttttttcgatgcacacgatctccagagtgcctgagagcttcttgatctttggtcatttttgcacatgttgtttatgaagtggccaagggtgaatggtataccttgtttattcatcttatcagcgagatctcaacagtagatgatatttgctggagcagcaacattgtaaagttctttttccagatgaacattctgaagtccgctggcttggctttctgaaatctccactagactcgttgttcctttcggctttcgctgttaggttgttactgagaattttctgttggtcagctaagcttgagttctggtccttctggactagacacagtggcacacgatgcagcggatacccatgtgcacggcttatgtccacttgtctgatgttaatttttcatcgtgcttgcttgttactgtagttgttactgccttactggtatcatccaggagtcatattttcgttgtttgcatctctataaccttttccagggaaatgcattgttgcagtctttctgaacatatacttgatgaattcttgagtttccatgtactacgatttattgactgtaattggatggatcctgatcagctaggaaaagctcaggatcagcagagagtacagtggacggttcactgtacagtacacacgatctatctcgctttcgacaggcaggattggtcagggtccataaaattcaggcttctgtgcagctgagctatagtgtcttggacaagggcccccacatttgcatcattgcacgtgccacaatcaatacccccaggctttgctaaagatgctttcaaggatgcaccaacttgggggcgaagatacacggtcatgtacgctggcgatttttgcacgtcgcacgcaccgaccggtagaagatgcaaggataggaccaaagatcatcggaattgtgaaccgttgttgcaacttttctgaattacccggtaaaggttgtaaaaaaaagctacttttgattatgtttccacaaatacaaattgtattttgtgtacaactattgcttatgctttcataattacagttttatattttatacgcgactatatttattaatcttcaccattataacctagatccatagtgatggaacattttttttctttaattaatatggttttttctcacataatataataaatagaccgtcgcaccaaataaatatactttttatgtgaattgagtgtagcttaaccggttaaacttctagttctacccttgacacatgtatttatatttacggttaattattcattcaatgatagataacatacccgtcagtagtgagccgtctatggcgactttgtgaatcttaaaatatatcggtacaatcttcgaaattgctcatagggatagggtgcgtatgtacactttcacaaggatgagctgcgcgtatatgggtgtttgcatctgtactgtgttttttttaaaaaaaaacttttaatcaagggttaattagatccatgccactgcaaatgtggcaaatcaaaaaaatgccacacatattcgcattatcggctggatgccacttcaaatttttaaaattgaaaccatgccactcccgtccctttttatgtctcctctcaaacgccgtccccgtttccgtctccctcttcgttctcccttcttctgcccggcgtcgagcacggcaaggtcggcggcggcggcacagcaaggacggtggcggcggtgcccgtccatctcgcctctctcccgctgtccatcttctcctccctcccgccgtccatctccatcaccgcgctcccggcgctcctggaggtgtccctcgacgacctcccccccgacgcgtatcctcaccgtcatccgccacgcg

SEQ ID NO: 5796 - DNA, 19087 bp, Oryza sativa
tgtgttttgcgaagcggttccctgtgaaccaattacatcttggttacgagcataccttgcagaatctgcgtagttagaaccagcagattcagatgatctaggaagtcgccgtggatctagtgaaatgctggagtgcgtgctgtgacttgcattcatacttttcaaagaggttgccaggtgatagccatgaatggtagcaggttgatagaactgattgtcagggtaagatgggacattataatttgaataaaactgagtattttgttcaaacaaggtgctagttggccttgggatgtcagcattagataaacgcatgctctcagaccagtttgatgatccaatgcgacccatctgaagcacaaaattaaagcctggactagagacttccttagcacgtgagtcccatgatttctgtatggtagctgatcctcgtattgcatctctcatcaaggggctcctagaagcttcgatggcttggttatcacttctaactgctttcgggtatggtcctagcagaaagttgaaccttcctgcattagcttcttgcgttagcttaccatgataatcaaagagatgtccccagaactcatcaagaatcgctgctaattgcctccttgctgcacgacccaaaccaggcagtcttgagaggttactgccacgataaccagcatcagagtctctccccttgctcaaagtaagagatgttgggtcatcagaaattggaggtgccttgtttccagaagacttgctgacttccgcattataagaagcctcagtatcatagtccatgctagctcctgcttcttcttggacatgctttgaagttgtactcttcattttgatgttctcagcagtgttatgttctactactgtggcagtacaaacctttggcactggttccgtctggtcaataactactgattttggttccttatgtttgatagacgatgagacctccggaataattggcacaaaagcagtaagctgctgagtgccatgaccagactccacagtgatgtcaggaaagtcattatgctccaaagctgatgtttgataactttctgatgaaatcctgggaatagcattaatagtagaagtcgtatgatcttctttctgttcaaccagagaaagctcctctctatgataaaaagtatctggatcttctatctgagagtgctcagatagctgctgagtttcacgttcattacttacttctatttgataagtagtatctggatcttctctctgagagtgctcagatagctcctgagtttcaggttcattacttgcttctctttgataagtagtatctggatcttctctctgagagtgctcagatagctcctgagtttcaggttcattacttgctgacttcagtggagtgacagccaggaacagcgtaaaagtaattgatgcacaagaaattagaactacaatggcatgcggaagtacaacagggcttccagtgttccctttcaagttgtttgtccaggtactatcaccaaacaggatttccgcagcaaaaatgatatttgtgaacagcaaaagaagaaatgctaggatggccaatatttcaacgtacaaagatattttatatctgctcattataactcttgatgaggaaacacggaaaacaggaataacagatgaaggaaggaacatagcttggataactgggcagataatgagtaactgatatatcccttcagaacctgcaacctttgcatagtacatagtaggaaccatggcaacggcctttagtagcagatgatgagcagaatgaggcaagtttacaccaaagaaattcttcaaaattgcgtggctgccaataatagatgtcaatgagatgacatgactcgaaaagataaggatcactaaaaaaacaattggtgccatcggattcatgaacatctgcagaaggcattcagaggaactcatgaaggaactatggtgcagaattcatactcaaaacaagcagaatgcaaactggaggcaaaaacctggttcattaaatctacagaatcttgaaaagtaaccagagtattattggattcaactgctgctgagcccatcaggacataattcacaaggaaaaccccagtgaaaataaacaatattgagaacaggtgatcgtggaacagagcaccaagggaaagagttgtagattgtctttggccctgcacaaatgatttctgaattaacaaaaacatggcatagcagatagaacaaaaggtaaaaaataaaaaaggaaaatggtgtgggtttacgaaaactgcatggcacggagagcacaaatgtcaaaggtacagtagaaccgacttacacgttttatgacaagtttaagcttcagaaacaaaaaactgtattggatcccctgactttctattagttgattgtagaaaaggcatataaatttaaaatgcaggtttagtgatcatcattgcttagagaaaattgcaagaaatttttcatgagcaaaagaacaaatcaagcatttggatcaatctatgcatatttttcttactcttttcttaatatggaaagaatgtactacaaagttgcaggattatgcttgcacatcttagcataggatgcatgattctggtttgccaacccacacaccagtttctattatcacaccacaaagttgcaggattatgcttgcatggcttagcatgaaccagaattagcttccttgcagatttcaaaactaataccaatcatgtattagaaaacacaacttaggaaaaccggttactttaaactacagcctggggtcaagtcaacctgtgcaaaccagaaatcagcaggctcagttatgtgattagcttcatggccagcaagattgacattgcccggttttgaacagtccattcaaaacctggattgaacagcccaaccttaaactataatgccaagtgtgggaaatttttttaaaaaatgagggacaaaataggttctaccatttttccaaaaattggcaagtaatgaactgtcctcagaattcatggactgatcagaatagttatacaagttaaagaagtatttactcatatatataacttatgggtggagtacaagttcaacaaaagccactatctcagcatttacttaagcatcagcataaggaaatggagcttgcctgtacaactgatgaatgaacataaaaattgtgcgctattacatttccgccaagaagcgccatcaaggaataagcactttcaccactcaacttggggaacattgcattcatatcaactggaatttttggttgactgactaataaaccaagcacaaaacaaagaagtgcaaagcctgctacgcatgcattcaatgtcccagccatccgtttgccctagaataaagtaaaggcataacgtcttagagttgctcttagtggtgcagaactgcagatattctgagatcaatcataagcttaccagataagacatagtgtaaggtagcaaattgaccacaacactagcaaaatataagcctgcgataggatcatcatattcaaagaccaggttgaatccgactgatatgcctgaaagctgaaataaccaagtattaaaagtttgaaagctggcaaaaacctgaattctctggtagtgaatgctcctataggtcaactatgcataacattggtaaattaactctagaacaaagaattaacaaaaaaaaaaaagagagaggaaagcttgtctaaagtgtatgaacataccatggttagttccgcggttagcaaggacaatcctgcctgaataccaaggatgacacatattgatggactgtactcctcgcggcaaatcttccgttcatgtaatattgttacaaaagttaacagctctcgaagaaaatgatagatgacgaatatgaaatatcaaccacccccctaaagaaaaaaaaaggaggaaaaattgaagaactcccccactattttttatgtggttgatgctatctgagtaacactaaatacttccacttaggaaaaaaaggtacagccattcattgagctaaactgaagaaatgtgagtaggtgacgacagatgtcagcaaagtggtacctccgcaagatttttcccagtgaccatgccgatacacatcgacagatactggcacagaatggccgacaagttgaaaagcaacaccagtattacgagatcatagccaaaccgagacccggcatctatcgtttccacccacttcccaaggtcaatataccccatcgagatcaggagcaccggtccaagggtacgggaaagatgatgccaaccatctccagtagccagagattctataccgtgcacaccttccattttttgtggcagcaaatcttataacaacaaaagatggatacgaatccacaccactggatcaaatgcccgacatgcttatcaaattcagtcccttgaacactgttaactcaagcagtctaatcaaaccctccgaagctggtgaacatctagaacaccatgaaacacctccaagaaggatcaaatgcttatccactcaggtctcttcaaagctcttgtggtgatcgaagaagtctaaccatccaaacctgggggacatccatccacaacaccatgaaatcctccccaagaagcatcacatgcctgaaatgactaccaaattcagatccctaaagccctcctgttgtgacccaagcagccctaatcaaaccctccaaagctggtgaacatccacaacaccatgaaatcctccccaagaagcatcacatgcctgaaaaatgctttaccaaatccaggtcccttaaaaccctcctgttatgacccaagaggccctaatcaaaccctccaaagctagtgaacatccacagcaccatgaaaaccccccagggagacacccctgatctaggttgcccctgctctaagctccatccatcacagccaggggcggacctagcgtggaccatagatgttccattcaacccaatcccaaatgctttggagaacaaaactggtatacctagactactccagcacgcaggagcacaccattcggactagattgatttctcgcaacatacaggagagggatatacaagagattcgtacgcaaaaaggaaaaaaaaaacagaggaatccaagctgggggggctttgccgcggcaagaggcggagatgaatccggtggaggtggtggcagtcgcgctcgtgctccggtggcggagagcgcgtggaggtgagagcggctgctaggtgaagtggatttttttagtggaactgtggaaagagaggatgtgcgagcgcgagaaaaaagggcaaagctcgtgctatgcccgtgccttttttgtagattgtaaaggcctgtttaggtggtgtttggaaaggagggacaccttagttccctaaactttttttctcaaaaaattcccatcaaattttagacacatatataagcattaaatataaattaaaaaaaattaattatacagtttgtatgaaaatcgcgatacgaatattttgagtttaattaatccatgattaatcataagtgctacagtaacatatatgtgctaatgaaagattaattagacttaataaattcatctcgcggtttccaaccaagttatgaaattagttttttaatcgtgtctgagaactcattttaacatccaatcaaaagtttaatgtgacacttaaaaattttcttttcaccaactaaacacagcataaaatgagcaagcataatattctccagaagaagaccgcggccgaatcagattacggcggagtcgagacgagggcatatacgcgatactacgcctggtcccgtgccgaagatgctgccgaattaaccaaacacacgccgttgtctcctttgtctctcgggttccatcaaaccgctctatctcggggagttcagctgcaaaagcgtgcccacccaccctttcctgttttcgtcgtcgtcgtgcgtaggagaggcacccttaaacccatgcaaaacctctaggagctaaagtagctttgcacgtgtatgttgagcaacttgaccacgttcacctggggttgtgagttcgtctagctctctgctgtgctgtgctcccaccaggatgagcttgcagacgagacgacacgagaaaatcagtcggcagcagcccatgctaggtcgcaggattatggtgcctcctcctcgtgagtttggcagcatcccacgcccacgacacacactcgtgtctttgtcatgagcaaagccaggggcatcccggacaaattgggtccccgtgcgaaatattaaaatggatcctagtggcctagtaactgaggagaggagacgaagcgacgtggcgttgggacttcgacgacacggacgactgtacgatggaaattggaaaatggatcattcaccttttgcattgttttgggggcttagttttactaaaattgaagcatttaatattattatatattgggtatacttaatattttagggcccttgaaatttgggggccctgttcggtcgcacagcccgcatgggcctaaggacgcccctgagcaaagccacccgtcaacaatgaagcacgataacatcactaggaggagatcgtggcaacggtcaatatcgatgttgatggctaggtgctaggacacggtgttataagcaacaacactagttgttacctatgggtactaaccagatgatgtgtcatatgacgtacctacacataaggtgggtgagaaacatgatcgcttcaccatgttaggtgccaatcaaagctccatatatagcagcctcatggtctccttttccatcaccaatgacaatttatgggaggaggaattcgtgccggtcggtatcaattctccttgtttgcctcttttctgcatgagagtcaaatccggtgcacatcgtcatgccttaagcatgagacggaggacggggagttgaggaggccatgggtccagtgacgttcatcgtccttgtcatcaatgtgcgcttagactttaggcctttaggtttaatgctggtggcatgtcccattaccaccatgtgcgctcagactttaggcctttagatttaatgctggtggcatgtcccattaccaccatgcctattcacatactccctccatactcataaaggaagtcgtttaggatatcgacacggtctccaaaacacaactttgacttcttatttatataaaaatattcattgaaaagtgatatatgtatacttttatgaaagtatttttcaagacaaatctattcatataatttttacattttcaaactaaacaacttgagagttattcatgatttatattcccaaggtttgacttaaacattgtcctaaacgacttcctttacgagtacggagggagtatcaaatactttatccgtttcacaatgtaagtcattctagcatttaccacattcatattgatgttaataatctatatagatatatatgtctagattcattaacatcaacatgaatgtgggaaatgttagaatgacttacattgtgaaacggagagagtatctaagtatctatggctaaggagggagaagaagaaggggagcacaggaggggaacgactggagggagtagacgggggaagatgagatggtctgtcattaagtatctcgttgtcaagataagagtttcccccatctgaaaatttcccattaatcaaggacaatttactgttggactaggatagaggtaaggtagaagagaagattgattttcaatattgaatatatagccgcgtgaaagtatcttttgtgacaaatttagtagagcttttttaccacccttgaaatagtaccttgaggtactagtaatgggaggtactggatcaaatccaatcgttcatttagcagggtgaggatggaccagatgaaaaaacgagagagagagagagagaactcttatccacagcataggtccgtgtctcttctcccatcaccttgtcgcaccggcgacttgcaacctgctcggctgctaatctctatctgcaccgcagctgccacaaatctctccccttccttgctctggccggctgcgctatgcgtcctagcttcctccccttcaacgccatgccgcgccgttcctcgccgctctcctcttgttggatgcagtggcaagcgctgcattggaccactgagatgcggaaaggcgccgcggcagtaatcaaccagccttcacactacgcaaccgcagtaatcgatccagctccacgcagccaccgtgtaggaaggaggccgacctgacgtcgtcgtcactcccgccgaggtcgggattgagaaggttgctttgcttgtttgggctggaccgctggagacgcagacgctcctatccactagaatgaacgaatgtgaatgctaaaatacaatttttcccttccgctcaagtattgcatgcggactgcgaggaggtaccgtgcgcacatgaaacttgtacctcctgatactaaatcttgtcaacccttggatctggctcaatgaatggatgggattttggtacctctcaccctcaagaatgataaaaaagctcaattgtgcattctaaaacgacgttgtttcgctatttgggaatatatggatcataaaagttgaaacaaactctgaaagcaaaatgattttattaactttcattattccatgtgaataattcctaatgaaattatccatgcctcaaggttactcacatttgcaacgacttatccctgagaccctgaactacgaagaatcacggtaatgcacactgatacaaacaatgaaacaaatcgacgacggcaaacgcgcaacactagcaatagcacacgtatatcgatctaaagaatgcacgcgagactcagatggagatgctgttggggatgcccatggcggtgagcccttggcccttctccttggtgacatccgacgtgttggggtacagcagcatgtacggcatcttcaccggcccgttccggttcttgagcgccgagttgccgttcatgtccttgatccggttctcgatatccaccagccggctgccgaacctcttgaacgcgtccagcgccttggcgtccgacgtccactccggcgtgtcgcgttggccgaggtagacctcgtcggaggagtgcttggacaggatctcgatgagcgagatgccgaggatggtctggaactggctggtgattgtgtggatgaacaccaggtcggcctcgtcaccgccgcgctccagcttcgcgtactcctcggtgcccggctccggcatcggccgccggctcaccgtcggccggttcgggaggaaccccgcgtacgggtactggccgaagttgaccgccgcgtgcagcgccgacgcgatccagatgatgatggtgcacgcccgggtgagctcctggacggtgtccatcttgggccaccagtcctggtccttgaggtcgccatggccgacctcgcgcacctccttccaccacgcctgcagctcctcgtcgccgcggagcacgccgtcgttggggtagtagatggccaggtactcgcccacccaccgctcgatcgcccaccagatcaccagcccgtccacggcgtacgggtagtccttgatcagcagccggacgttgtacgggctcgtcgggtccggcacggccacccctctgcacacacaaaagcaaaacccatcctggtcacatcgttgttcttgccgtgttctgatcagccagagctttgcaagatgtcattcattttggttttacctcttgacgagatcgacggggagagcctgctcggtgaacttccagttcttgtacacgacggaggacatctcgagcgcgtacttgcctgggaagacggtcttctcgaagatgccatcggcgttgatgagtgtctgccgtgccagagcgttgatgttcatcgtgtcgcggtagtgcgggctcagcagcttgtgcacggggtgcaccacgctgagctgccggttcgtcgcgatcacgaacggctcgatcacggcgtgagtgttcagcctgcagcagcaacatgcaaaaacatcatgagcctccttttcatactccaacacagaaaacgaaacagaggaggctggctctgtaccagtggctgatcagctggtgccaagcagagtcgttgacggaggcgtaagccttggcgagctgccagatttggctctcgacgccggtgttggctggagtgtacaccttgctgacggcgccgtgctgctggccatcggggtgcggcaggctcagctcgatcgccaggggcttcagggtgccatcgtccttcaggagcagaatggtcctgctcgcatatatgaagttaccgtccaacttgttgatcttgtccaggaacggcatgaagtgatcgtggtggtctaggatgaaaagcctgttgcccttcagtgcctgcatagcatggttacttattggtcaatctcctgagtgtatgcagttctagtatagtcatatacgagttatttgcatttcaaagatatagcatgcatgtttagagctgaaatgtttcgctttgtatgtcagtgattcagcatacattttgcaccgtgaggccctccatgttgtgcttaatgtgagcttcggtgatcttgctggtatggtcaccgtacacatttggatccagagtactttttgccgggaaattctatgatcagttggagaacaaaaaaaagattactcactccattatgcgagcacagatgcacatacttgcatatcctacaacgatgaagttactaaccgtcagacgcttgatcatcactgggttaactcctgcgagcatttctcgtgcaaactcctcatcagtcctccaagcaaatttgtcctctgaaacatcataaacaataagttgtgataataccaaatatgaacagaatcaaattacccaataaggtataaccatacagagttatgctcatgcagaaagctggttacctttgataacatgtggtaggggtaacttcaagacttgatcgccagcaactggcaaaagactcttaataagttcaaagggaactctcttcttgatctctgctagtgcagaggcattggccactttcaatccaccttcatagagttccatgatgtcttgaaaagaatcaaactcctttggtgtcgtatcgacataggtccttattattgggagaacaccctcaacaatagccttaagagagtacccaaggaagtctgacatcttgaggtgcccgaaccgttcgtcgcgtgggacataaatgttcaagtccagcagaggaagcctgctttctgtatttgggtctgagaaaatattgagcaagaaaagaatttgagggaaccagttgcaaggtgccataaattcaaattgaagaaaatgcatgatatctataactcaccagtctttgttggggcccggccagttctgcctcgacggggataggggagttcttggctgccaccgaggactggtcgtactagtttactgcctttgtctggttggccaaggtcgttatagtaatcataacggtagatacggtcatgctccttgtatggtccaattttaccgtcccctcgtagaatgttgagttcttcttgccggtaagggatcaaaggtgcaggcattttgctaggcagatatgtctgcaaaacagcaagaaaataaggcaacagataaacttagtaaatagaatgagcagtttcagtcactcatcaagaagataagctgacaggtgaaaaccctaatagcaggagtattaattaatcaattggaaagtgaatttatattactataattaatcaattagaaagtgaatttatattactactcatgctttaaaactgaaagaaaatacaggcagtatcaatgacctccatttgattgtcagcgaggcagctattacttgtttttttttttcataaacaaaagaaaagcattcaatttttttatttctatcaactagttgtagatcaagcgattgcatatgccatgcatgatacataaacaaaagcttaattaaacagcacacaggtgagtggtgaccaagctaaactattcttttgtttgcttgtaagaccaggtcgctaatagggacgaacgagcggttggtggctttgtgtctgtgggcattcagtttggtgttgtctaggacaagtagcacaagacgcattcaatcattttgaagaatcaaacaaaaagtggctagtaaaaggactgtcattttcaaaatggaactcagcaggtgtaattttctagctatgtgatgtcttgcatgatttgacagtaggaatgtaggatcattttaataataaagactagcatgtaccattcatgagttacgagtagttgtcgatgccataacttgaaaaagaacaacttcatttttatacagccaattgtagagtacaggatgttatttccactatatgtttattgtgggaagccctgaatcccggacatcactatggacagttggacggttgactagactgcagcaccaagctcaaaaactgctagtaactcaacttatcagctgttctatccaactttctttccctgttgtagatcatagtggaagtcaagtcagcttctatactcctaacctgctgacagactggacaaggatgctatctattaatctataggtgtagtaaattaagaaaagatacgatcaaattctagatcacagttatttccaggagacaaggtggatatgcatatgctatttggatctaggtacagctatcacggtacctaatccaacaaacacttcaaaaacgaaagttgaccatgatccaatatataatccataaatatatgttatgacaaaaaaatggcataggtttgtttagcttttcaaggatttctaaaggcattgcgatatctaaatccatgagttggtgatagccgcctatctccagtcactgtagaggcatttacatattttcatgcacatgtaagatgtcatatgtccaagattcatactgttcctgatgtttctattagtatctgcactctgcagccatcatattgtctgcagaaagtggtcatcaattattgtaccatcgtctgcagtaatcaattttctaagtgacgtgtccaagattacttggcatggaccatccgatcagaaaccctcgttcagtgcaattatgaaaactttgccttgaatttttctaagtatcatccattatcatcatgcattcatggtcggctgaaagacccccacctgaacgaaaattccttactgcaaccaaactactgaaccgtacatagttcatcaattgcaaactttggcacaaacaactatgttctcgtattgattagaccactagaatttgcatgttgatttcaatattcctaatagcaagggagctcaaggcttatatagttaatgtcagcggtttagctcaaggctcttaagcaagttctcatctttctttagcttaagatgtagcggtactgctcattagcaagaattaactatggtctttgagcaacactgcagaagagcagtggcattggcaatgtccatctggaaatgaaaatggagtagtactactaggcttctactgtaactaagatgaccgttgaccaagaggaggactaggagtggactcacatcgttggcgaagaagacgcgctcgtactggtagttgtcggcggggtagatccacgagttggcgacgaagacgacggtgcccttgccggggacgccgtcgagggtgagcgtcttgaggaagaactcggaccggttggagttggtgacgacgacggcgccggggatcccctgcgactcgtcccactcgaacgccacccggaacaccgactcccccgccgccgtcgacttcatcgtcaccaccagctcctccaggtgcgccggcttccccagcttccccctccctccattgcctgtccatccacaaaaattagacaaaaaattggaaagagatagaaagaaaattttgaaaaaacagatccatcgatgaagtgggggacaaatcgacaggacgatcaatggaattgggtgtccttttcttgatttgatttaatcacatttaatcacatttgattgtagattgttgaggggttaagggacgtgtgttgacgttgaccgtcaatgctgcctcctcccatcactccactaattaatgttcccttcctttcttctctacggaagtagcattgaatgcgtgacaacaaccaaaccgcacacttcaaatttgtactactactatacgctttttttccgaggaaaagcttgcaaacaacgcttgaagactgcaaataccggtttgtaattaagctattagcgagagcaattaaacggaaaccccagccagagaaaacgcggctgtttctcctgttcaggaaacgaatcaaccaaccaaccaatcacgccgaggcaaaagctttggagcggaaacacgcacacaccaaaaaaaaaaaaacacgaaacgaaacgcacgcacgatgagcgttttgctttggccggcgagcggcggcggcggcggcggtgcttacttgggtcgcgggcggtggcgctgacgaggcggaaggcgacgccctccttgtggccgaggatgttgtggacgccgtcgaggagggaggcgtggaagtcgccgaggccgagcacgtccttcttcaccagcaccgccgtcccacggatcctcccttccttccacgcctccttgttcctccccgtcaacctgtcaaagaacccctgcacctgcatcctcgcagatcacaagtcacaatcccctcctcctcctcctcctcctcctctctctctctctctctctctctctctctctcactactctgctaaagccggaaagccaagcggaacgcggagcaagagcgagacgggctgatggagagagagacgaagccgcggtgggattttatagcgacgcggccacggccaccagccgcggcggctttgtggtgcccgcgcatcgccgtcgcgagtcaccaaagcggaggagttcgtaacagggaaactattggatagtaccatcctaccgacatcccttgttgttggtatgcacacttaaataattattaaacttttcctcgcaaaaaaaatattaaactttttatgaaaagatagattaatataaatcgcttcacagacattcaaatttaaatttaacttcaacatattataaaaaaattaactataaatatgcattaattattgtttaatttaccttttttaaatggtataacttaaaatttgatatatcatatgttaatatatcttctcaaaattttaattttaccattgttttttaattatttaagtgtgtaaacaattataaatatctcctattaaaatccactctagttcataatagtttttgtaaacgttgtgtttttgggatcgattcgcgagaggctggccgctggcgcgcgcgggcgggcgggctgtggcacatgggcggtgtaccggtcggcggtcgctgccatccgccgcgcttgatgccaacaattgccgggttgactgtccaaatggtggaaccaaaccatggaatgatcgaatgatcaaaacgagggaaatactcggggtgtttcgccgcacaccagcataaacacccgtgtgccgtgtgtgcgtgtgatggataaggataaatgcatcgcaaagttcaaaagagaatttgaacccggaaaggaattgaattcgggtactattcagaatgttgaattttgctgggttcgtacaacgtcagtgtcccgtcagctggttaattcattcttacaaatatccgatgcatcaaacctggcattacctcattaggcgcgctgtggacacggtgctttggcttcttgcgaattttgaatattttacgaacttgtataaaatgcctgctccttccaaggcattcaactccatggaaaagtaaaactcaatatcttgtatgcaatttatgcatgtttcagtctattgtttggttgtttaccatatctacttgagtaaactaacgaagaatcggcacaaactcattagcatgcgtcaccttacccttttctattagaaaaaaaaatgattacacatgcgtttaattcaaaggatgcgacagcaccacctcgagaacgagccacagctactccctcgtaaaaaaaaagacaaactttggatttccgtatccaacgtttgactgttcgtcttatttaaaaaaattataaaaaattaaaaagataagtcacatataaagtattaatcatgttttatcatcaacaataatggaaatactaattataaaaaaatttcatataatacgaacagttaaatattagacacggaaattaaggatttgtctttttttgacggagggagtaaccgtcatcattgttaacacgccattgtgtttttggaggcgagcaagagagatcggatcgatggagactggaagttccgggcctaattaagctacgtgcatgacaagctaagctcatggccgtggactcgatcgatcggaccgaccgatcgcgactaggccggggaggattacgtacaggcgttactcgaatccatgggcgcgcgtcttgactcttgactagcgagggtatacatacaagtgaccgcgccctctctcacgcgcacaaaattaacggtgcacgtcaggtgtggctacgtgccgagggtgagggaccccaccacaaagggttcgacgaattcatgaatatatactgccctttttatggggaaattttctcgaatgccttagaaatttcggccaatgtatgcgcttatattttgctcactttctgataaacgtttggaatttgattttgatttacgttacgtactcattttgccggttgagctttagttgttcgtttaaaaaaaatccattttacccttaagtacggaagaattatagaaattcatggagtacattgttggtacttggtagtgtataagtttattgtatagtatgactttatattcatgagtttgttgtgcggaatattatttatgataaaaatgcatgtcttatattataaaaccactttaaaaattagttgtgcctttaaaaagtaatagaaaggttaaatatttatttttctatttttcatattaaaaagagtaatgtggtataattttttatgatacatacaataggtttgtctaatactaagactttgtttggcgcctcttgttgtggctgcaagcgattgaagaaatgtaagttttatttctatagtagctggttgtacaactatagtcataacttctgaataagttctaaggttgtgttcgaatataaaggtctggaacctactctccaacatgaaaaataaggtggcttattagcatataattaagtattagctataaaaacctgaaaattaatataatttagcttttaaaacatctttcttatagaatttgttgtaaagaacatattcataagattaacgtgctcacgaaaaataagcaagtagaagtttaccactcatcatatgtttttgtaagtgtttctgttagcacaagctcaagtgctcgcttgcttcagcctttagagacgaatgacaataccagcgactagtctactcctcgaaaaaaaaactgcaaattgcttacgatatttcgtatataagatgtattttttaaaaaagcacgtgccatccctttgctgctcatctgaatttggacttaatctcacctgttgagaaacttgagatcatgtggccctgtggcctttgtttacttcgttgacgtactgcagtttattcatccaaaccatagcccgtacctcattggatggtctgtttgtactttaagacgaatacatatacgcagcttaagttgagattaggacaccggacacacctaaacaagacatgtgatttggaaagaaaattgagtacgaaaggagctactccctccgtcccataatataatataagggattttgagtttttacttgcactgtttgaccactcattttattaaaaaaatttaaaattattatttaatttttttacttactttattatccaaaatactttaagcacaacttttcgttttttatatttaatttttttaataaaacgaggtaaaaacttaaaatccttttattatgggatattatgggatggagggagtagcttattagctgccactttgtctaatcatgcaatcatgcttatgtctatcatcagattgtatatatggtatgtactcattcctagctaccgcacgcacgctacgcacgctaacacgtgaaacactagttaatccactgtccacactaaattatgtccctggaaaagatatatagacagctcggccgggcaggatagaaaatttcactatgatgcgcatggattaagtaccatttaatagtacgtagctttagaagatgagcatcaagtagtaataaaaagcggtagccttttgtccctttcttatttggtgcgaaaagatcaggttcttcgaagactagaagtatcataaatcttttttaagacgagacgcattttcacatacaacattacacatgtacaccttattcacacatttataagcaattcttttcgcacactcaaaagacggaaaattgaggtaactctttagtctcactaaattaaatttatattggaagcttatttgcttatgtaatatttatgatcggcatcaggatttaaaccttagtgatggagtcattccctcattatgatccggtactaaatatggcatgttttactattttcagattaaagtattttataatggtctttgctggtaaaaaaataaatctaaaccaatcatcctctcttacttactgaattatattttttttgagaattgtacaattgaggctcttgtaaccctgttaaatcctgaaaaataaatcctaaaaaaatcgcttccattaggagttggacctaggacctcaggtgctactgagactcttgtaaccactaggttacaggccctttcacttttatttactgaattatgtcttataccaccacttaactaccggttgtagattttttttattaatgacagaagttaaaaataaatagttgtggtcaataaaatagggagcatataatgtacacacaattttttttgtacacaccgtgcacacgaactaacaaattttactaaaaattttagaaaaaaat

SEQ ID NO: 5797 - DNA, 24395 bp, Oryza sativa
catgcagaacatccaaagtgaagtagtaatagggagcaacagtttctgtgaaatcacgaacaccaaaattaatgactagacacaaatggaaagtttgtggcaactgcaagagtgcatcagatgcatctattatgccaataattaagagaatgaagtctgtgatgcaaagtgaggacttctctagttctggaatctggatattaattcctacagttttatcttccattggatgcagtcttaccttcccagccaaatgccagaagcactgaggccataccgtgaagacgagctgaggtacctcagaggggaggacaggcaagggccgtatcaagagcatgaccgcatctaccggtacgatgtttacaatgacctcggtgaaccagacagggacaacccacgccctgtcctaggtggctcgcagaagcacccctacccgcgtcgtggccgtactggccgaattccgaccaaaaaaggtacagtgttcctcttggttctgtgcatctagagagcacttcttgacagacaagttcataaactagtaagatctaatttgcgtgaatatccatggctgcagacccaaactcggagagcagattatcactgctggaacaaatttacgtgccaagcgatgagcgcttcgcgcacctcaagatgtcagactttgctgggtactcgatcaaggcaattgttcagggcatcttgcctgccattcgcacatatgttgatctcacacctggtgaatttgactcgttcgaggacatcttgaagctctacaggggaggcctgaagcttcccagcatcccagcactagaggagctgcgcaagagcttccctgtccaacttatcaaggacctgcttccggttggaggcagctacctgctcaagttccccaaacctgatatcatcaaaggtaccatgatttagccattgtgtcaattgccatagtcgatgagcagtggacaattagcgaactgttgtactatgcattgttgcagagaacgaggttgcttggaggacagatgaggaatttgcacgagagattcttgctggtctgaatcccatggtcatcaggcgtctcacggtgaactatccaacattacatagtctttgatgttttgtgctcctagcaagcatgaacaaaacaagctgatgctaatgtataattctctgttcataggaattcccaccaaaaagtactcttgatcctagcaagtacggtgaccagactagcacaatcaccccagctcacattgagaagaacctcgaaggcctcagcgtgcaacaggttaggcagtgatccatttcatttacagtgcaatcgatagtcatttgacaaactgccaaagttgatttgttgtcaattatggctctgcacaggcactggatagcaacaggctctacattctggatcatcatgatcatttcatgccattcctcattgacattaacagccttgatggtatcttcacctatgccacaaggaccctgttgttcttacgtgatgatgataccctgaagccactagcaattgaactgagcttgccacacatcgagggcaacctaacatctgcaaagagcaaggtccatacacctgcatcaagtggcattgagtcttgggtgtggcagctggccaaggcttatgttgctgttaatgactccggttggcaccagcttatcagccactggtacgtactggcagtggcaaactgtagttctttcctgaaagcagtaagctaacctcatcattgatgtaaactcttgtaggctcaacacacatgctgtgatggagcccttcgtgatcgctacaaaccgccagctcagtgtgacacaccctgtgtacaagctcctccagccacactatcgcgacacgatgacaatcaatgcattggcacgccagacactcatcaacggcggtggcattttcgaacaaactgtctttcctggcaaacatgctctggcaatgtcttcagcagtttacaagaactggaacttcacggaacagggccttccggatgatctaataaagaggtaattaaacaccgagagccacatcacaacaagaaccaacaataacataactttgaataacatcctaattttgtaatgcagaggcattgccatcaaggacccatcaagcccatccaaggtgaagctactgatcaaggactacccttatgcaacagatggcctggcgatctggcaagcaatcgagcagtgggtcactgagtactgtgccatctactacccaaacgatggtgtcctccagggagatgtggagctgcaagcatggtggaaggaggtgcgggaagtcgggcatggtgatctcaaggacgcggactggtggcccaagatgcagagcttgcctgagctcaccaaggcctgcaccacaatcatctggattgcatcagcactccacgcagccgtcaatttcgggcagtacccatacgcgggctatcttccaaaccgtccgaccataagccggcggccgatgcccgagccgggttccaaggagtacacagagctggacgagaacccagagaagttcttcatccgcaccatcaccagccaattccaaaccattctcggtgtctcgctcattgagattctatcaaagcactcagcggatgagatctatcttgggcagcgtgacacgccagagtggacatcagaccccaaggcactggaagcattcaagaggttcagcaggcagctggtggagattgagagcaaagtgttgaacatgaacaaggaccccctgctcaagaaccgggtcggtccagccaatttcccctacacactgatgttccccaacacgtcagacaataagggggcggctgaggggatcactgccaggggcatccccaatagcatctcaatatgagactgctgcacgcgtcacgcgctgctgagttggtgtaggtttgtggctgttatcttaggccctagggcacaagcaatgaagctgcatagtactatttgctacaaattatgcaagaataaagttttagtgctaataataaagttactgttgtagtgtttgtcccatttttaagcagcttcacatagcaagctcaaatgaagaggcaatgctgcaatatggatgattaattatgcagctttactcctatgatgttagggaggcagcttctgtggtcaaatttgcagcaataaaattcttcaaatttcctcaaatgtaatgattatatctcattcagtcacagatcgattcttacttgtaaatctagcataaccagtagcggaatcagaaattaaccacaaggcaggaaaacaagggctacgaagtgatttgattgccaatttgccatacagctatatatcgcgcgcgcctaattagttccatggcaacccgcatcgacattttgctcttttgctcacataggttgtagcattcagcaaaacaccaccttcgacacatgtcagaagctcttactagacaacaacacggtcactatccatcgcattgcgcacaaatccatctagtctacgtgcaagcagagagagcatctaactacgtggacattgcaaaatttaaaggggatgagaggggaggggaagggaaggagtggggagatactgaacctggggaagcagagaagagggagccgccgtcgtctcggtccacggcggcgagggcacaccggtggtcgacacgctcaagccccccacgaaaccgccatatcgccgccgccggccggcgccgccgcggggtcatcggagccggaggaaccgatttgtctcccgatcgaactgggctttgtattctcgctcgtttgctccgccgaatccaggagataaatgggccgaaactaggtagtaacagtttagacctgggcttacggcccataagcctggacgtccgggcctggttctctctaacatgtgaacctaccacttacatgcaatgtgattaggcaatgttccatgatataccactccgtgcaaaataaacctaattctagctacgaatctgaacataaatatgtaaataagtaaaacagaacagtacataagtggaacggttaacaagcgtgcacaactttccatatcacttcagcacatagctaataattgcacaaatctagcttgaacggaacactaaccaagcaattagtgtgtgagcatctccatttgcaaattaaacatgcatattcgtactggctggcagcacagagcctcccttatttgatcacacccagtaatcaacactgtcgtctacacaagtcacaacacatatggatgcacccagtttcggacgaatttagccggtagaaattgatcagttgatgcagacggcgcggcaggcctggccacagtagttgaggcacttcgagtagtaggcctggaggcagctcttgcagccggccttgttggatgggtcgccgcaggggacgctgcagtccgagttgcggccgtagcccttgcacgacttcttgcacgcgtggtcgcacttccggcaccggatcggcttcgtcgccgtcgccggcgccgccgccgcggccaccgcctccagcggctccacggcgaaggacaggaggagcagcgccaccacgacgcaggcgaccaccctaggagaagaggcgccgcctgccattgttcagaacttataagatagagaagatttgcaagtgaccgaggagtttatattaagctgcttgatcgatcggctgcctatttataggcagtacgcgagtacaggcgaccaccgggtaccgagatgtgctgtgcatgatcagcatgcgtgcatgtgggggtagcgtgcgtatgctccgatcgtggtaaaatgttgactaattaaggagtttacaatggcaagtcgatgctcaatatattgcaagtcagagcatctagacctggtttaatcagattcgtacatgatgattgtttgaccatcctagctaacatacgactacagataagcatatatcggtttaagtaaacacaaacataagaagctgtattggtttggtcagatgcgggatgatgagttgatgacgaagacacgcctccgaacccccggccgcctgcaatcaggcaaactaacggcccatctatagcaatgttttaaatagcgggctaagccatttagcgattagcttctcaaacagctatagcgacagctataacggactaaatggagctatagcggctaaattgtacatgagagcaaatagctaacccttctcaaacaattatagcgggagatagcggcagctatagcgggatatttaaaaccctgatctatggagagcgtcagagcgagtggatgaataaccaatgccaggctgtccctccgtctttgtcagttgtcacggcttcatcggagcagatggccgctcgccgccgacgaacgcgaggacgcgacgtcgcgtgcagcctctcgtgcacgtacggttggacttgcgatgggtttcctctttcggatacgtcgataacgtcgcctcgcccaaactgggcctggagcggcatcgtcaggacaatgatgagctattctcaacctaagttctactggatgaaaacggtacggcatttctcgacggctcatctgacctatggctcgcggaaagaatatggtatgtttgagaaaatgatatactggtaccattcgatttcgaattcaaatatgtaaggatatataggttaaaatacgagaagagttgcatgttggaagcttgaaacgatggttatttaactttttgctaattatagatggagattcacaaatactccctctgtctcgtaaagagacaactcctagcttcccaatgcatgattaaagaagaggataaaggaccaaaatacccatcattaatagcaaattagtattggtagataggtagataaggggtattgaaggaatacaatttttcgatttacgaaccgataatggatgagaaggtagaagttaatttattttgggacaaagtttgaattccagaagttgatgtattttgggacagagggagtatacttcaataaatgtgtactccgtatctttggttgggtatttcttttggttcggtgggtttttcaatgtttcattaaactacactctttttttattgctagactgtaataattggctatagctcttctgagtaaaggccaggatgtttgattccattatctaaaaatgtaaatctattataaattcacctacggatataatataagattggttaatcaatattttacgaactcacatgtaatattgtataattttttccttaatgtatctcttttaacactttaattgtctccctatatattatacaaatagatatctgttcccgaatttaattctaaaaatataatataggataggatatcggatgaatgatatgttattcataccggttccgaacttgaaaggaaaatatgggttagggcacttagcctagtgggtttcgaacttgcgaaagggcatgtagcctagtagttgcagtgacatgagtagcaccacaaggtcttgagtttaaatctccataggagtgaattttagattgggttgtttgcggggctaagttaccaatttaaatagcatcatatatctggttggatgtagaggtcaggtaaaaaaaaaccattctctaaaaagaagtgttaggacatggcgttgtcgagatccgaccaggggcgaatccaggaacaaaaaattggggggaaggggctcaattacgcagtttctttaacatccagccatctaagaacctttagtttattattcgtggtgaaaaaaattgaagggggtgctctgggggtatccatcgatcttgtggttgtaggggggactcaagtccccctgcacccacgttggatccgcccctggatccgaccgttcccgatccaatttcaccttagaaagtgtcgctggatctgccttgctcgtgttcggatctgttcgtgcaaggctaaattgtggcgtggggtgtctcctctgcatcccttgcctggatgacttcggcgagcaaaggcacaggggggggggggggtcatgagttgctgaatttggatccattggatccagccaatggttaagacaaggtggcaaacgaaccaatcaaagatggatgaaacatgaatgagggttgtaggagttcggactgcctatcgagattggcttattccattttttgtgtggtatggctcgttaggcagcagaagatcgaaactagtcttttactccctccgttttatattataagactttctagtattttttacttcatatatgtgtctagattcattaacatctatataaatatggacaatgctaaaaagtcttataatatgaaacggagaaagtagcgttttagctttgttgtttctcagttataagaagataattaaaaaaatatttgcttctgagttcattgattttgtttctaaccaaatagaaacagtgtcaacaaagctacctacgtgcaaggctgctatgcatagacccaaaggatcaatggcttctacaaatatactcctaataaagagtcacaaatcgatcaaacacaacttctaaaaatactccctccatcacaaaatatttgacgccgttgacttttttttaaaatatttgactgcttgtcttattcaaaaaatttaagtaattattaattctttttctatcatttgatttattgttaaatatatttttatatatacatatagttttacacatttcacaaaagtttttaaataagacgaatggtcaaacatgtttaaaaaagtcaacgacgtcaaatatttaaggaaggagggagtataaatataactaccgaggaccaagatagcgataattaaataacataataacactcaaatgcaacaaaagcaagcgcgcgcccgtctctccagttgtggcatccagctgctaattaaacgcagttggaacggcagtagtcgccgcagcggggcaggcacctgtagaagtaggcctgcatgcagccctggcacgagccgcaggcgtagctgcacggctcgctgccggcgccctcgcaagaggagttgcacatctggtcgcactggctgcaggccatcggcgccgcctgcggcccggcggcctgcgcctccgcccgctccacggcggaggactgcagcaggaccagcaccacgtacgatgcaaacggcgacggcgccagaggccataggagaggaggaggcaactgtgagtttgagttagggcctgttcactttgatataaaaaaaacattaataaattttggcattgttgaaattttggcaactatgccaaaatttcggcgagttgctaaaattttggcaggatttcttatatagttaccaaaatttggcagcaaactaaatttagcttttttttataactttaccaaaatttgataagattgaaaatggtatcaaattgaacatgcccttaattaactagctctgatgaattgattggccgagagttactgtatctctctatttctatttataggcatatgggatatggcaaatgcaacattgtttctagttatcagtatggatatatttatactcaacgcatgtgcacgtcatgcatcagataaggcatggtaagtgttgacttcaaacgtgaccttgcgccattttattttctttataaagtcagagcttctgatttagttaaatcgatatgcatgtgttgattggccgactacccaactcttttggagctagatcctagaggtttgacttaggactgactattgagcaatattactagctagtcgctaatccgtatattacacggtctaaaaaatactttagtagcttatctaaaatagaaactctacatatataagaaagacacccaaccaaaacttgaatcaggtcgccccatcccaatatagcggcaaactcgtgacgacaataagggcttgtttagttctctaaatttttttcccagaaacgtcacatcaaatttttagacccatgcatggaacattaaatatagataaaatgaaaaactaattgcatggtttgcatgaaaatcgtgagacgaatcttttgagcctaagagcaggtacaatagcaggctataagccagctgcaaatatattttaagaagataaataaggagagagaagaggagtgggctacagatttgtagccagctgtagcacgaactccaaaacgcagtgtatgtatgccaggtaggaccaggtattaatagtgtagtatgtagctattatatgaatgagatattagattggctatagataaattggagctagcagttggctatactattaaacttgctctaattagtccatgattagccataagtgctacagtaacccacatgtgctaacgatagattaattatgcttaataaattcgtctcgcggtttccagacgagttatgaaattagttttttcatttgtgcccgaaaaccccttccgatatccggtcaaacgttcgatgtgacacacaaaatatttctttccgcgaactcaacaagacctaaggcgccggctctaggtacactgacctacgcactagggtgaggagggtgtactcctagctcaagctctatgagcagggacaaatgaatgttgactgctattaaacggaattctccattccgaacggtatgatacgagatggatattagctaggcttgctaccacgtgaataccggtcttgttacttatagcatccccagtagatgatctatatttgattctccaaatgcccgtataaagtatcatccaaaaaatatttctcatccatatcccatcattctatattttagtaatatcttccaactaaccttacatttgtattttaagaatatcttccaactaaccttacatttgtattttaagagatatattttttgaactacttatttatcgtgataatatttcaattagattttaacggaaatctttttaactgatatatttaaaatgtggtgtataaataaagtgtcaagtgtcaattatattttctatactgaaaagagctcttctgttccaaactttcgttttatctgttcttctatgctctcaaagagctcttcttttccaaacagggagaggcaggcaaagggacgggggagatggtgaggggcggcggcggcgggctgctcaggggtggcgctgggcgacggcggcaagggaggcgcggcggtggctcacgggcgcagggcggcggcggcggctcgtgggcgtagggccacagcggcaagcgaggggcggcggcggttggcgggcgcagggcggtgaccacgcgcggggagacggcaacagacgaaaggcgcgcacgccggaggaggaaggcgcatggagacggcgccccaaatctggtaaggctcgctccacaaatcgctgaaaaaaagcaaaaaacagggatggggaactcacctacgccggttggggacaatggcgatagaggggaaggctcgccagaggggaggtggttgccgatgtctggatgggggcgggatctcgatccggaggtgttgggggtgaaatggcgtgaggagagagaaacactatttttacctcttctctcttactatggcgcatccgctaattttagcgtgtgggttagcgcatccgctggagggcgttttttcgcctctacacgccaaaaccgggatggaggatcggttacaatatctgctgggatgctctcacaggtaccaagggtggtacctcgctatcatgcttagtaccataagtaccaaacctagtacatgtagatcttttatttttaaagagtacatgtacatgtagatcatgggtcttgaatcttgatcatggtggcaacggtaacaatactataatttcatatggaacatcacagtgataaaaaagtggcatatctccttaaaagaatcacccacaacatataatgcaaaatcaccctatttctctattggtccagatctgaaatcaaataaaatggaaaaggggttgagcggattttacctgctcattgccttagcagccgccggccatgcgtctcctagccgccgcgcgcgcgtcaccggctgtgggccgcccgcccgtgcgcgcgccggccgtccgcccactcgccggccaaccgcgcgccgccggaagccaaacttgttcgcctgctgctccaaggtgaggtgtgggttacgggatggagaggtgaggtggtttagggtagttagtggcatttttacataaatatgataaaaaaaataagtgagaatccactcactaccattgagctaatcacacttctacaatttaccactgactttgtcaagttcaattatatactatcatgttttctttaacctctactgcgtgccatcgccgtccatgagccattagtttgcatctgtttgctgtattgaattttttgttaatgactaaaataccctttgactaatatatccatccaagaaaatcagttgactgaaaacctgaaaaccctagcacaccgtccacccccaaatcgatctttcccagtctcccagcgagacggcgccgactccccatcgatgtgccggtcgccggactccccttgacgcgtcggcggcccgccgactcccggtcgacgcgcaattggcccaccgactgcccgtcgacgcgccgccggtcggccgacttctcgtctacacgccgccggtcgccagtctccccaatgatgacctggcgccgccatcgctaccgtccgcccaagtaacgatgccagcagcgtggctgcaaccggtgaccgactacaccttcgccaccggcgtcctggcgcttctatccccttcgccgcaaccacctgtcccagtgtcaccgcgaccagccgccgacctcacctccaccgtcgatgacatatttccctggacaaaaaaaataccatgtacaatgagttaggggcaaataggtctttttagagaggtaacagatgttaactggactgtgatggcacacagtagatgttaaagaaaactcgatggtatataattgaacttgataaagtcagtggtacattatagaagtgcgataaactcagtggcactgagtggattctcttaaaattaaagggtagtgggtcctttgtggtggagtggagttgtggagcagcaacaacccagctctaccccctagtatattttttaggaataactctgctaactacactcccaaaaacagaggatctgaattgtttggcacaactccgattctaattaagttgaagttgggagctataactgtgtcaaatagaaccaaacttggccttgaacaccttcttcgtactttaaatacgaatctaacaacataaatatcacaaaatcatatgcatttgtcaaaggttcatatcctaacgaaacaaaataagttttatattttttatggagggagtgacaaagtttaactaaaaccaaaggttccttggtactagtatgatactccctctgtttcaaaatgtttgacaccgttgactttttagtacgtgtttgaccattcgtcttattcaaaaaatttaagtaattatttattctttttatatcatttgatttattgttaaatatacttttatgtacatatatagttttacatattccacaaatttttttaataagacgaatggtcaaacatgtgctaaaaagttaatggtgtcaaacattttgaaacggagggagtaatacagtagtccacctatcaaacagattaatccgtaaaattctcgagatataaatttatcgttgaaaaatcatagggttagatttgtcttaaaacagttttaaatatttgttgataggttttaggagtactccctccggttatataataattaacgttttggacaaggttaaagtcaaacttttataactttgaccattaataaagtttaaagaaactagaataacatatatagatatatagatttgtgtttcaaaacactataataaaaataaacatgcatttatttattatgtatattataatagaaaattaaggtaatattttgtaaacagtgccattatccgaaacgttaattaaaataaaaccagacagagtacctctcttcgtgaccataccactgtcttagaagaccttggtaacaacgaaaggaagcattgaccacaatatatgaaatacagagccggtcggcatatagccatatactgtacatccacgccagctagcttattcgaaatagcagtactaactattgctagtatacaatactaacagtacgtgtacatgcacggtgcatcctcatgacacacatcaaggccttaggatcctccgggctaataattagccctctaaaatcttgctatttagaagtattaaatataaattactgataaaacttattttataaccaccaagctaatttgcaagacgaatataaaattagtccagagattatgaaatgagttttatcagtaatttatatttaatactcttaaatagtaaaatttgggagggctaattattattacggagtatccaaacaaggcccaagacgacggccggctgggcttttcagccgctggtgcaggtgacatggcaggacgggccacagtagttgacgcatttggagtagtacgcctccaggcagctctcgcatccgtccttgttggaggggtcgccgcagggggcgctgcacgacgacgagtcgcgcccgtagcccttgcacgattccttgcacgcctggtcgcactggctgcagggcacctgcgccgccgcccgctccacggcggaggacagcagcagcagggcggcgcagatcacgacggcgaaggccgcggcacggcggcggccggaagcagcagccattatttggtctgttggtgttgtcgttggatttgatgtggatcaagcaagtcacaggagagaagaacaggggatgcagatatgcgtatgtgttggatttgtggcagattaccagcgctatttataggcagtaaacgcgatacttcaacttgcaggtttttgtcactggattgcagatgcaaagcaaacatggcgtgccacggatatgatgatatttgaacgtggacttcttaaaccgtgctccacttcccaatgtatatttgttgatgattttgtgttatatgaattctatttgataacagtggagcgattattgtttaattacggtggtgcagggttaattaggaggtgagaagtacagatgctataatactcccggattatcttcctgctatgattctataagcacttttatcttagagaaaatttcaaaaagaaaacccgtgttttggggattctgtaacacaaaacgcccagttttgcaatttgtttatttgtcttatatatttatctgtaagcacttttatcttagagaatgtatgagatactttttagtacatatataacattagttgctttttaacaagcgttgatcatttatgtgtatatttaacctattattatattataattaacatgtattatgttaatctttttcagcacaaaattgagaaaaaaaatgaagtagacgagaagaatatgtccttttagccaactaatgtgaattgatgtagaaaacaatcttatgtaataataaaatatgagtattttacatgaatatgaggtttcttaaaacatttggctcaaaacatggggcttcgtgaaacaaatcacagtaaccagggttttatgtaacggatactccaataactgtggttttgtgaaattcactctttatcttatatgtaattattatgttttcagtggtagacgatgtacccgtcgatagcgaggcgcctgtggtgacttcgtcaatctccaagatttgccggctcagttatcgaagatgctcataagggtagggtttacgtacgtgcattcatagggtgagtatgcgtgcattgtgagtgtttatgttgtaaagtgtaattttaaaaaaatattgtaagcaaggcacaaagattgagtaatcccctacgtttgtaaacattcctcatttggtcgctattatttttttaaaacgatcagttacagacaacacgatcattcattgaatagagcagaaagaaattacaaaactattgccttaggagacattcgccaggaaagaaaaaatttaaccaccacgcaccgacagcgtctacacacatccaaagagaaggctagcaccaaatcaaccacttttaagcgtaacttatgtccctcttattgaactatgttcgtggctattattggttttcttccgtggttttttcaaagggccgcggtttttcaatgtgtagaactatgtcttgatcacttctttgtctgtccgtttatcgcatatatctatatggtcagagcacccgctttaattctttgatcttaagctgttctacatatattagtggtatttgaccgtcctaaattacgtcttagatgagccatgcatgaccaagaagttagattctgacttttggatatagatatgcatgacagtgaagacacgccacccaatgtgtattctatagaaaccagagtttttaagcagcacgaaaaaaaaaaactattacttcagtcctagactagctttttttcatgcagtagtaacttcgacagcagggaagagctttgttgatagtcacatttcgtgcagtgggagtggccgaggtgtgagcgccagagagtgtgacccatgtcatcagcggtgaggcactgcccttgcgctcaaagctcatcatgcgctccgagctctcgaaagcttgccgaggtcgctactacataaatgatatgatttttctggacataagtcatttttagattgcatacgaaacgtaaatagtcgcgtctgcaaaaaaatcatgttccattttcacgcgcggctctttaagacgactgcacgaaaaaaattaattttaacaagcaggccacttaataggtccgcacgcgaaaatagatgctaagtggcccgtacacgaaaatagccacccaccttttaatcgcgcgtgtcgtcgccgccccacaccgactctcagatcccatcaccctctcagatcaccccacacccactctctcctcccatctccctcttcgcccccacacccactcctccctctccctatccgcctcctcctcccactcctcttatctcccggcgacggcggcagcggcggtctcggctagggcggcggagacggagacatcgggttagagtggcggaagcggcggcggaggcgagtgcggtggcggcatcagccatggtggtgggaacggagcggatgattttcgcagacacctcgtactagacgggtgaaacatccgcacgcaaaaaccaatttcgaccgcatgaaaaaatcgttattgtactagtgctttgatggccaggctagctaggattgttgttgtgatcgagcacctccttagagatgaagacacgaccgttgcggcagctgatagcgccatatcacatagttggttggttgcttagatggcagcatgtacccatagacgcatacatgtgcatgggcctacacacatcacagagagacgttggcatgtcatcgctatcatatttttcatcttcttcccccaatttattcttctcctcctctctttcccttcccctctcagctagccaaccacaacagcgatgtcgatgccaatgccgcccccacaatgaagtgtggggacattctgataaaaaaagtgtggggacacagggaggagcgaccgggcaaaggcagccttggctgttgcctcccctatcgcctccctcaccgttgaatcctccgcaccatcattgtcaccgcatcagggccattgcgctgcaactccatcgtcgttgctatcaccctccaccgtcgatccacaacatcgccagatcctccttactctctctcccccactatccacccttccaccaatcctgggtcgccggcagccaaatccacatgaaatgcctgggcggacttcaccggctccggcctcccccaaccctaagcccacccctcgcctctcggagacttggagaagccattcccgcttgctactcctaccccgcgcctcgaaggagctcgccggtgagaagcggagggtcatggacgagaggggaggcggagctcgccggtgaggatctgagccgcttctagcaccgtacccgtcttccttcatgggtagctcatgcttaacctccatcgacctcggtatcttccccaagcattcaacactgccaacgtctcttccaaggctaagttcgtcctcgatagcaaggccatagtgcccctcctagagtccgagtcgacgctagcgcccatggttggtggtccctccccctagccggcagcgcatctatacttggagcagcggtggttgtggtggaggggaaagaaggaggaagagccgtcgttgtcgttgaccccatcccatggacgcttgaatcagcctctcgaatcttgctggcggggaggagaagaaaagaaaatgagaaggaaagaaaaggatatgtgatagaaaatgtgatggcgatagcatggttttaattttgttcgtgttcgaatgatatggatacgaatagacgaatagtaatgatatttctctagaatgacatatttgtaataatatagatccaattgacccactttaaaaaggcaaaggtaaatattagccaatattggattgatcggatgtgataaacggtcagcactaagcacggtaaaacttcccccatataaatagcgctcgaagtgtgattaattaaattttacaaggataatcggagaatcgagctcaccaaagaatgtagccagtttcgcttacgcagcagtgagaaaatcgaagacgtcgataagagtttcaattaacgaaacaaagcattaagccattgatacatcgcttaccgcccccaacacatcttgcagccgacccggccgtagggctgtcaaaaaactcgaaaactggagctgctcgagcttggctcgttctagactcgattcaagctcggctcgagctccaaacgagccgagcccgagcctctccctaagctcgcgagctttatcgagccgagctcgagcttccaacgagcctaataatatatgattttttgttgttatttaataaattaggagatcaaatatattatttgtatgtcttatattgacatcatatatttattttattctttttttcctcttctattaatatgatgaactagaaattaattatttttaaaagattatctttgaaatatatattgttttacttaaaaatcaagctctgtagttaagctcgagccgagccagcgcgttgctgcgtgcatcaccacacgctagcttatttgaactactagagtactagtagtgacaaactactccatccgttctaaaaaaaaaactcaatatctcctcctaggactatgaatctagactaccctttatccagattcatcatcctatcatcctaggaggggtcgggatgtgacccctccttaattgagtttttttgggacgaaggagtactctgaaataggacaaaacaaaaataacttgcaatatgcatgaaacggagaaagtaacagaactacatatgatcgagacagtacatacatttacgtgacacatcaaaaggcttcacgacggcggccggcgccgtgagctcagagacgaattgaagcgtgaacggtttttttcagccgctggtgcaggtcacacggcaggactggccacagtagttgaggcacttcaggtagtaggcgtccaggcagctctcgcagccggccttgttggatgggtcgccgcaggggaggctgcacgacgagtcgcggccgtagcccttgcacgacttcttgcacgcgtggtcgcacttgctgcagggcacctgcgccgccgcccgctccacggcggaggacagcagcaggacggcgcagatcacgacgacgagcgcgacggcacgacggccggatcggaattcggaagcagccatcgatggatctgtctgttagatttgacgctgatcaagcgagttaagagtaggagaaaaactggagaaaatgctgagatggaatttgtgttggatttgtgacagcgctaggcaacggtatttataggcggtgaacgcaatagtagaatgcagattttggtcactagattacatatgcacgcaaactaacatggcgtggatatgatatttgaacgttgacttctgaaaccgtgatccgcttcccaaggtatttttgttgattttgtgttatctgagttatattcgatgacggtggaacgatgattgtttacgttactggcagctatatgtgaaaaattaattttaatcgcacgtaaaaatagtttttttttagtacagctgatggatagagtacaacgctaggccgctggccagctagtcggagccgcagggtacgagaatatgctataatagtcctagattattttcatgttacgaaagcagttttatcttttcatatgtaactcttgtaataagctgagacgcaaagaacaagtatcacttgtgtttagagtaagattaaaattaagattaaataagggacatgcaaaaaagtcatcagcgcgcgtgattaactaaattttaattattacaacttattaataaatagatttatttgatattttaaagtaacgttgtaccgttcaaccattttaaaggcgtgctaacacaaattgagatagaatctcatcttaattagaaaaagaacgaggcctaattcctctacgctcgtaaacacgccttattttgtctgcattgccggtttacttccatgatcttttgaaaagggtttttcagttcgaaaaagtatgtctctcttctagatggcctttgtttgtctgcttattttatcacatatagacggtcagagcatccgctattatttctttaagctggtctatatataagcgggattttaccgtcttaaattacgtctatatataagtttcattctgacttttggatatagatatgcatgacagtgaagacatgtcacccacagtatagctagtctatagaaaccagctgagcttttaagtagaaagcagaaaaaaaaatagtttggtcctagcctagctcttttcatggagtagtaatttccacggcagggaaaagatatatgcaaactttcttgtacaaacattttacaaatcctgacgtatcatgatgtgattaaatcttgtttttttaaaaattttagttaactaaatcaaacggttcatacaagtttgtaagaattgtttaggtacgtcttacgtacgctgggtctgtatcctcgtccggctgggttgccaaggttagggtgacccaaggcccgtatacttatgggctaactagtgacttcaacgcgtcgaaagcccggattacggcttacatagcctggcacgtatagtggatgggcctttaagaactgaacggccgaattgcctgggtttgtttccttgagcttattaaaggtcgcgttcttccgaaggggttagggtaagttttataatggaggtgagtaccagatctaatttaaatcatgtcatattctcattaattaagaggtaacaagtacaacatgccacctctagtacacaaaccccaatattagtttactctcacatcatcttatatttttcttagagattatgtggaggttgcccctttcatgagaggtggctcattctctctctcctaacttctctcctccaactcatcacctaattttatgtggcaaatttaggggcaacatgtagaggcttatagtacttgcccttaggagcgcctaacctaatggaacgataattaaaatatgataaatgaagtacttcatccgtttcatatgtaactaaattcattagcatatatatgaatatgagcaatactagaaagtcttacattgtgaaacggaagaagtattagctaaagaaattccgaaggggttaggagcgcctaacctaatggaacgatagttaaaatatgataaatgaagtattagctaaagaaattttaaaaataatttaatatggctttttatagcaactttttatacatttttttaaaagaatatatcggttaataattcgggaaatttgcatgtgagaaatgagagacgaaggttgggaactttgagttaagaatacagcctaaggcatactccctccgtctcgaaaaaaaacggtgtccagttttaaactcaggattgggcagtgtcgtggaagacggttgatacggccgctatgacgcccgttaaaacggtgacggtaagcagtccgtcacattttggcaaaacggtcctcattagtcgtccaaaaacgcgtaattcctgttattaccgattaatccagcgtttttccgactaatcggccgtattggcagtatataatcgggcatgatcaaattcactgggcccagcccacgcacaatagcctatcctgttagttgtcttctctcgtactcctgtacagcatgcatgtactactatattaatctctttgaagaccaaatatttttcaaatgcactaatactagtataagatttcaataacgtgtaatgcaaattatcatggtattattatatataatttgttatagcagcaatggcaggcattataaactgaacctaccactagttaatgcataaatatgcattatgatattttttgcattattaactttagtacgtgtatgttaagttaatgtcatgttatggttgttctatttaaatatatatactaggaaactagaatgtgttcatatggatttaattacctctaaaaggacaaactattattaactatgtacttatatttgcaaaacgttaaatttccgtcatattccgactaatcatccgtattccgattaatcgtttggcggtactctccccgtccgacatccgtattccgtcttccacaacactgggatttggtttttttttttgacagtgggagtacgtgtctagagccagcatttgattctacattgatgtgcttgtcattccaacctgtgatagttatgatcttataaaatcaattctagctatgattttgatatggtatttttcatgtttataagataaaggtttataaataaaaaatgatttttattgaaggtgtaaaatatacataccgtcccataaaaaattaacttctgaggatgaatctggataaatatttgtttaattttttttttgttgtggtaagagcaggagtacttgtgtgctacaatgtctggataagtgttgattgtactgcctgccaatacgatagtagcagctgacacgtctgcatcatcctgtggatgaatccaactaccctcggaaaaaacgccaccaacggaatccacgaatggaaagtttggtactcgatcaactgtgattgtgacaagggtcgcaaaaatcggagctaagagcaagtttaacagtatagctaactactagctccaattcatttatagccattctaatagctcatccatacaatagttacatactacactattaatacctgctcctacctgttacacacactacgtcttaaagttcgtgctacagctgactacaaatttatagtccactgctcttctctcttcttatttatctccttaaaatatgtttgcagttggtttatagcctgctattgtacctgctataatccgactcctccatgcgcatatttagcatatgttgatatatggagtactcgcttcgtaaaaaaaaatggatgtgatacgttctaatacatcgaatttgaacatacgtatatctaaatttgtagtgctaggatgtggtacattactatgctgattttttatgggacggaggaagtatgtactatgcgcaccagattattcttccataaaaaccgtccactctaaaaaaaaataaaactgactttgacttctcaagaaaaccaatcattttaaaaaccaacaatccatttgatccaaatcctccactaaagtgaataaagaaaatgttgaacgcgtggacctataactagtagcagagaaaaactttagctatggttaaatgttattgaccgtcattatactctacaagaacttaaatgttatataccgtcattagccatggtttgatttgaattttgaaatcatactaaccccgtcgggtaacggccgggaaagcttccgaaaagagaaattttatgttactttaaaaagtacctcgaggtatataaattttacactaaagtttttagtttttggtacatcgaagtactaagtatccggagatactaaatttttacactagaaagtatggtatctcccgatatacttttttaaggatggtaaagttacccttccgaacatcatttggagcctcattggttgtccatatttcctaataagcttaaacataaaataaagagttaatttataggtacaactttttatatatttgttcgtatcgacttagaagtcaatactagaaaaaaagtatattgaaaatatcttaaaaccatctgcaatttcaattttgaaaattttgaaaatttaaatataggcttttacgtttattaggccaaccgggctacgcatctcggcaacgctaattaaccacatgatcaagtatgcagcaagagatcagaactgaagtttaatagtatagtccactactagctccaatttatttatagctaatctaatagtcaatttatacaatagttgcttactataatattaatatatggtcccacctgttagagcgggtacaataatcgacgataagaacgccagctcggattttgcgattacgtggaggagagaggggtcaagcgcgagcgcgagcgggcgactaatttgtcgcccagctgcacgctccgcccaaggttctggggccccttgtaccgatcatccgtgtctaagttcgtcgcaatcgccaccgtgcccatcgtcgtcgtccactgccgttgtaaccgttgtgtgcgtccgcctcctccgccaaggttggcgtcatcaccggcgtccgcctcattcgctgcgaccgtcggcggcggcggcgtccgctgtgaccatcgccccgtcctccgcagccatcgtcgtggctgtcgcctatccatcatcatccgccatggccgccactatggtccactgcattcgtcgctgtcgcatgcgttcgccgtcatccaccacagcagttgccgactcgccgtcgcgtgcgtccgcctcgtctgccacagctgccatggccgccatcatcgcctgcgtcccactggtagagaaaccatctttggtcggtcgacccaaatccacaatagtcccggttccattaaaaaccgggactaaaaatgatttttagtcccggttaataagaggaagatctttagtcccggttggtaactccaaccgggactaaagttcatttttagtcccggttgattccatgtcaggccggggtaaggccctaggattcctaagttcgggtaagtacccccaccggggattaaaaagggggaatc

SEQ ID NO: 5798 - DNA, 32818 bp, Oryza sativa
cctgtttggcacagctccagcctagctccacccctcctggagctggagctcaaccaaacagtttcagctccaccaaaactgggagtggagttgggtggagctctctcacaaaatgtactagagttgtggagctgggtttaggcagctccacaactccactccagactcaactcctggagttatattaaggagttggagctgtaccaaacaggcccgtaattcccttgtttacccctttagctctttctggcttaggccctgttcgaacgagagtttcaggctcaagccagttaaaaaagaagaaataccttctcaaaagaagaagaattacaggcttaaacagtttgtattatcggatatcttgtatacattcgaccctccgagatctgttgtaagatttgtatcgtggcaccttctctcgctccagcgagcttgtgcatctgcggctacaactggcaacaaacctgacgtgttttggggtggggagggagagttcctcggggtttacacggaagcggacccgtgttcaacgtataaactcttattaattcaacctcaagatcttgtgttcaattcttagcacgctcataattttttcttagagagattcttcttaaaaaaatgtttggagggatttctcttccttcaaatcacgtttttcttaacccaaaagttgttaatgctaagtgcagatatttcagcgaactattgcaatcgttaaaagcttagagagattcttcttaaaaaaaatgtttgaaggtacttctcttctttcaaatcacctttttttaacctcgaaagttgttaatgctaaggccttgtttagttttcaactttttcttcaaacttttaacttttccgtcacattgaattttcatgcacacaaactttcaacttttctgtcacatcgttccaatttctttaaacttccaattttagcgtggaatgcagatatttcagcgaactattgcaatcgttaaaaaccctaaagatttggtaagggtagcttttagtccaagaaacttcgtttatactcaatgcacagagatacctcatcgtttcgcctacgataaattatactcgtcgtttcacctacgattgattataaatcataacacttattaagatctttaaagaaatatagataaaacttttatatgtgtgttattaggggcttaaaaaccgatgaattacgttgaaaaagctggaagagcaaggctaccgatcggtggatggaatcatggaatcttgtgatcgatgtccaacaaggcaacaccaccactaatcatcattccaattaacacagtccaagcctccaagggcgacaggatatagtggataactgaatacacagtccagcagcacacgcctgtaatttaatcacagcggcaattgagtaattgacagtcaaggacgactagatggtgtaccaatgtgcaatttataatcagcgaggaagcacgccagcagcacgcctgtaatgatttccaattactaatgtgcaaagtgcaatggcaaattgctaacgggcgtaaagaggagaccaccatcaattccaccacacgcggacaggttcctccatcgtcacgacgcggccaccagccgaagcgtctcctccgagttcttggagttctgctccgccaggagggactgcaggtcgctgccgttggccaggctgttgaactccaccgacctggacgggtccgtcgggtacttcctctggcagaaggtcatcagcctcttcacggactgcaggtacttcctggtcgtctcgtcgttcatgatgtgcgccacgctgttggcgtagatcttctcgcgcgccgagcgctcgtggatgcccaccatcgtgacgccgatcggccacggcgagttgccgatggcgagcttgatgtagttgtccaccgccgccaagtagtcccgtctcatgcagcacctcaccacctccagcaatgatccacggacatcttcgggcagggtctgtcatgggataattggattcatcaaaatgtggaaggaattagcaaggtgattcagaattgttcacacccattatatttgggtacatcaagaaggaaaaagtttggattaatgaggcaactgtaggtgaagaatagtagcagcaaataattttcttggatcatactgcagagcaggtcctatgatggcaagcactggcaattttgaacaattcagcaagcattggcaacgttaaacaatccatttcaagaaaaactacccataattccagtgggaacacactagcatacagaaaataagttgccacaagtaacacaaaataaccttagtggtgatcacagagagcacattctctgacattatcatccggagggaaggtagtaggttaatccagggaaatcatgaaggaattatcgaacttcctaaaagcataatctgcaacctgataattgatttgttgtttcaagattcagaatggcaccctcctatttcaaaggcaaagagaaaaattaagacaaatatattcctctgttacagagatttataactctcttctttttttttttttgcggggaacagagatttataactctgaagtctgaacacatcatgagacactttgataataagaaagcgcaaaggttggaacttgagaagaatacatgtaatatctgctgtcttgttcgccggaatgtatgatgattaccagcttctgtctgtcaacatcttcatgctacaaggaactaagaagagaacacattaaacaatatttgcaacacactcaaatcactcagtagcattaccacttagttcatgcctacaaaattatagccgatattggaaacgaattttgcaatatctacaatgtgccaccagtacaaaggcagtttggtgtttcatcgaaactgttgcatgtcttatgaagtgcattttcaaaatggaagctcacataacctatttggcttcttcactatatcatgtgttctgtaaggcttgcatttccccttccacagtgaagcatcccaagctcctaacatgtccttatgcagcaaacattggttgtaaaattgtaatgcttcatactgttcttttagcacatcttacagactcactccactaactttgggttttgaaagcatcggaggcattcaataaattcgattacagcaccaaagaacatcagattcttaagtgtgtgcgtgaattaatactgtcacataccttcttcttgcacagcttgaacagcggctcgagatagcgcgcgcactgcttgcaggtggccaccgcagccttccctttcgccgtccgcctctccgcctcgggcatctcgtccatctcctggctccactcgctcatcagcctcttgaagaaggtcatgatcttgtcctcgtcgcagagctcctcgaacggcacctcctccctcgtctcgcccccgctctctgcagttgcagcgccagccttgggcttcgccgccgccgacgccgacgccgcaacggccttcgcccgcagcgcctggatgtcgcggaggaagtcgttggtctggccctccccgatctccgccgcttcgacgtcggcgagcgccgcggggtcctcgagcacggcgtggaggcggcggaggcgcgcggcgtcgtcctcgccgaagagcgtggccggctggcgcagcacgcgcaggcgccggatgacctcctccctggggaggagcggcgcgccctccttctcctccccgtcgccgcggtgctcggtccgcgacgactcgtcgccgtcgggagcccccggcgtggtcgtggagcgcgacgcggcgcggtggtgggaggaggaggaccggagctgcttctggaggaggagccggcgctcggcctcccggatccgctccatctcgcggcgctcgatctcggcgcggcggaggagcttgcggccgccgaagtcggcgtcgagcagctggcgcttccgctgtagctcgcgcttcaggacgtccattggctcgccggagtgggggtgggtcgcggtggcgcactcgcagagtgggttagctttgctttggattttggagaggcgaatcggaggttccgcatggcggatcggaggatggatggatagtttttgagcattcgtttttgggagatcgatgggttctggaagcatcgagcacgaaaggtttctcgcgcgaaccttctcgaatctcgattttcggagttcggattgagtgaagagtaaaccggtaggtgattggcccagtttaactttaggcctgctaagtgcaaacttaagcgcaaagcaaagcccatacaaacagtgttttctccgtatttgccgtgtggaaaatactctctccatctatttttgatagtcatatttcatcttagcacacagaccaaggataaatgattctacttatcatccatttaaatatgctactagtcattcatcgtaaacaggcgattcattaatatttatatttctcgatgcccatgtagccaatcttgtgtgtaagaatgaagagtcgcgcattaaatccaagaaagccattgatatgataagttgttggattgaaatatgctaatcaaaaataaatttttcagatttagaaatatgaatatcaaaagtagatggagggagtactttggtatactaatttaatcccctttgatctgctgactggtttactactttcagatcagactgctggggaaaaaaatgcaaatgctgaataggactaggagtatttcactagaattactactaccgtaacaatcccaattccgtagacattcacccatttcttaccgttaactaaacgattacgtaaaagttttaaaaaatgataaaataaattaatggtaatatattattttacgcacatgcaaatacgaattgaacttctaactgtaaaaaaatatattagttagagttcactttgttatttttattacaacttgtaaaagctagatttaaatttttatgttgtgaagtgatatatttcatatataaatttatcttaccattttttaaaaaaagtttataatcattagagtttgcataaaagaaacagagtggaggttcacccggaatccatctccgattcccagtctggtcaatccgccagaaaatatcctcctgccctcgtttcaggggctgcagcagcagaggaggccggaagcagagaacgaaccgcacggcgagaaggcgcgcaggctgccgtctgcccgtctgccgaaaccgatcgcgaaagcgagccagccaaggtgccgcagtgccgcccccttcccttctttcgcccgcaagcacgcacgaggaaaggaaccagcggtgcacgcacactgaccaccgcacaacacagcgccgcgtccagcgaggaacacgagccgaaccgccacggcgacacaccaaaaaaaattccaattccctctcgtgatccacgcctccccccagctcgtctcccgctctatttaaacgcaccccccacccccaaacccgctctcccctccttctccccgcgttacaatcagcacacgctctctgctagtctgatcgctctcgccatcgcacctctgtctcgtcgaacaatggcctccaccgccgccgcttcctcccctttcgactgcgtcctctttggtaaccacgtttgtctctcgattctaggctcctctcatagcgtgatcactttcaattctccgtctaaactctgcctttcccgggctgttttttttttctttctttcttttctatgaagacctcgacgacacgctgtacccgggaagcgcgggcatcgggctggcgacgaagcgcaacatcgacgagttcctcatggcacggtgcggcgtcacggcggagcgggccgccgcgctccgcgtcgagctcttccgctcctacggcagctcgctcgccggcctcatcgtacgtccaattcccaatccccccacgcacgcacgcacggcacactcgaacaatccaaattcgcctctgttttcgtcctctgtttccgtttctaactttggctttcggatttgggtttccgcgcggcaaaggctctcggctatgacgtgcacccggatgagtaccacaggtcagcacaacacatcacatcacttacctttgcagctttgcttaaccaattcgacaagccaattagtaattattaagcggctaattttctgtctaatccgaatgctgacgctgcttggttgatcgattatcgtcgcagctacgtgcacgggaggctgccctacgaccggatcgccgccgacccgcagctcgccggccttctgcggagcatcccgcagcgcaaaattgtaagctcacgcatcctctttttttcctgtgaaattcctgtggttttccggacttaattggaggcagctaattcgtgttcgtgtttcagctgttcaccaactctgatcgcgcgcacatgaggaaggcgctgcagcggctgagcgtcgacgagggctgcttcgacgccgtcgtgtgcttcgagaccatgaaccctcacctcttcggtgaggcgccgtgcgcctccggcgatgaccgccccggcgtgatcctcaaaccgtcccccgatgccatcgtcgcggctctgcgcatcgccggcaccaatccacaccggacggtaagccaccacaccctgctcgacatttttcagtaggattttttggagcttgttgcaatgtaaatgtagttaaccatatgggcaattttatcattcttaaaaatatactgggaagtaactcattttctggtgaaaagtttagtatctccagtcgatataggtaactcgaagtaccaaattttttttatctaaccatgtacatttaacagcaggtctatcctctaatgataccgttaatttacaaacccaaaatgtattaatcactcttccatttttcttatcacaacaaggaaatagaatgtctatggaccaaagagtgtattatgcatcttggaaagtgacatcgagtgtaaacccaaaaggcttagaaagtaacgagtagtaatagggtctttgtcagcgtatccttttccatcgaaacaaacatatcgcacacatatggtatatgtgattttacgtgcttcgtttgtgctcttgtcaatgatcacgaagctagtaaataactcgttcttgctctgtcagctcttcctcgacgacagcgagaggaacatcgccgcaggaaaagctcttagcctccgcaccgtcctggtaattaaccaccacaacttaattgtgtgtttcagttttcttcgtaccgcactgttggtttaagctactataaccaagtgacagtattttccttgttttgaaatctgaatctttttctccactaccataaaatccttactagctccaaacgggacatagatgtgttcaaaacacagtaaaattaatttcaccaaaaatttacatgattggtagatatcgattcaattcctatagtaattatcgggaaaaatacacaaaaatcaatgaggcatataagttgctgtctctgcctgtccatttgtcgatgggttggtcgatcaggtggccggtgcacacagcgtccctgcagctgatgcatcgctgatggtgttggccttgtcggattagaaaagcatatatcccaatttcttcattgccgtgatgccaagagtttggtttatgcactcaaactgtgtgtgcattattggttaatcctgcttttgcacatggacgcttagtcacataatttagtgctctcgcatttgtggctggcaccaaattggccatgtcgtcgacacggctctggtcggtgtgattgatatatctggcatatatgatcccccatgattggttgaacaaattgcctcttgatactacttgagcagggaaaatttataattttaaatatagagactttttaaatatatggtttcgatgtgttctttgctggattcggtttcaacaaccaatttctaaaaagaaaaatagcacttatatatagtcctttcctactagtacaacaaaagctagtgaaaaataatggcaaaaaaacaggagacacacacaaaaaatctcctctgccagtgtacagccgttaacccatcgcatcgatgaacagtatccatgacgtgccaacgtttgataacaggggccatagcccattgagacccaactaatttgcatactttgcggctaagtttcctgcatgaacacgaatttacgttagctaattaatcttctcaattaatattcaggttggcaagagggtgaggagcaaggaggccgactacgctcttgagagcatcggcagcctccggcgagccatcccggagatttggggcggcgtcgccgtcgccgtcgccggcgaacagctcgaccacggcgccgcggagaagacgaagggaatgaggtccgatctggactccatcatccagccaacgtcagtcctggcgtaatcggttcctaatccattcgcacataaacaaatcgccactaataaaagcaagtactgtccattaattatcatgtaaattattctgattcctgatgctgagtgcgtgtgcagtgtatttgtatatgggcctggctgacaaggaaatatgcatgtgtatatcagttctgatgatcagcttttgtttgctgtaaaatgtaaatggcactatgagcaaggaatttgtctttgattgctgttttttttttgtttgtgtgtgtgtgtgtggccactgtacaaattgaagcatgctattttttccccttaaaaaatcgtagagctgcaatgagtagtcaccgtgcacaatagcagatgcagctgtcccatacaaatgaaatgttcttgcatccatcaaggagtagataccttctaagattatagaagtaattatgcattagacaattaactggaccactgttatgaaaagaaccattgatatggaacgattcggttcaagtggaacttggttcgttcaattttaaactggctagttaaatataggaatcgaggaactttccccacgtttaaaacgaaatctgtctattcgtcattagtcattgccatatgtaatacctgtagtatgttcagtcctactgtcctactccctccgtcctataataggcgatgtttttgactttttatttgtaacgtttgaccattcgttttatttgaaaaattagtataaatataaaaaaaagataagttatatctaaagtacttttgataataaagcaaatgacaaacaaaataaataataatttcaaatttttttaaataagacaaatgatcaaatattgacaaataaaaactcaaaaaaagacaagtaatatgggacggaggtagtagcagctaaatattcgcctttacgactccgagtcactcccttgctgcttcttgtgcagccaattgccaaatggaaagatggggagacccgtttttatatgtgcctggccttatcacctactagcagctcgcgcgcggcaacttgattggaccgacgcgtcgcccggggatcgcatcgcatcaaccggcagttcggcggatgcaagcgtcgtgcgtgggcgctgacgcggacggacggacggtgcgtacgtacgtttctagaatttttatcctcgatcgatcgctagacgctagctgttgggtttgggcagtttagataggatcgctcgctgctaacctcgtcacaccgtgctgtcgtcgccatccacagcggcctcgcgcgcatcctcctcctcctgctccgcggggaggtgcggatcggagcccatgtcgccgtcgccggcgtgcgcgcgacgtacgtggggacgaggcgtacgcgcgtgttcttatcgatatagtcctccgtcctaaatatttaataccgtcaattttttcaaacatgttatgaactttcgtcctatttaacaataaaaaataattagtaattatttaaaataagataaacgatcaaatatgttttaaaaaattaacagcgttaaatatttagtgacggaaagagtatatatacctgagtaaaataatggagggatattcatcagtcacccaccgatcggtctctgcgataaggttgtaacacaaacatccggaaacggcggcgtttcggataagagcacacgcgtacgccgtccgcgtgtcgtgtggatcgggcacactcccggttgttgggcgtgtagtgcgttggacgaaagagactcaccggacacatgcatgcatgctacagtaggttgctcagcatcgattgatcatttggccaggatagcatgtgtacgtgaggatatttccctagctagctactagccagttgccacgtgttgaggtcgagaattgtaaagcgcggtcacgatggaacgtacgatccccgtgtgtcgaggttgtacaggagtactccctccgtaaaaaaaaaaaaaagacaaaccctactttccgtgtccaatatttaaccgtccgtcttatttgaaaaaataatgaaaaaaaattaaaaagataagtcacgcataaagtattaatcatattttatcatctaacaacaataaaaatactaattataaaaaaatttcatataagacggatagtcaaacgttggcacggaaactcagggtttactttttttttttggacggagagagtacatttttcggctatagggggtgtatagatctcgtccagacatcacattatctaaacacatgcataaaatattaaatatagatttaaaaataactaattgcacatattacgattaatttgcaaaataaatcttttaagcttaattgctacatgatttgactacgtggtgctatagtaaacatttgccaatgacgaattaattagacttaataaattcgtctcgcggtttactgatggattctataattagtttttttattaatacctgaacaccataaattataccctatccaataccggacgttaacaccacgaaactttacaccctatttgacgtcaagaactgatagcaaaaggtacggctggcgacgacgtcgaaggttgttgggctggcgtataacttggccttttgtaatcataaacgggccgtgacgagttccaggtaacatcggcctggcccattatctgataattgggccggggccggtgatcggttttgcagacaaaatgaattttgatcgaatttttccgctacaaatcaggatttgctcgcaaaacaaatactggccattaacccgcagcatcggtagccgctctgagagagaggaaagccgcgccgtacgtcagcggaggccgagaaaaatgggcgcgctctgcctgctcccgtccacgccgccgtgctgctcttgcggcgcggccggcggcggcgggtcgccctcgcggacgcccaggctcgcgaggaccgcagcgcctttcgcctcctcctcctcctcctcctctggcgccgcttcttccggtggaggtttgcagctcgcgtgcaggcggcggcggcaagggggacgggggcgcgagcggaggggcggagttcttcggggaggacggcgtggtggaggacatggacgggtacctcaactacctgtcgctcgagtacgactccgtctgggacaccaagccttcttggtacggtttcttggttcctcgtttcttgcagtgtaaattgaagcagcttgagttgagcaaaatagtagtaggacaaagtagagactaaaattctgttctctgcatatatgagaggaaaaacaatctgaaattttgttgatatgttgtgaattgtaaattataaccaaaatgccaaatgataaatgcagtgatactattgtccatcgtcaatgactgaatggtccagtgaattttgattatgtctttgcttcaaataaacaatggattaattgatgtctaccaattcttcaatttcctatcaacctccaaagttagtagatcttcacaagttgtatcagataagaaggaaaaagaacatcttttattgttttctgttgaacattctaacaactttaactcttctgactctacagaactatatcctttcatatgcttttgtccgagtatgatcactacaactatatataatgcccattttcaggtgtcagccttggacaatcttactttcaggggctgttgcaattgccggtagttggttgcccatccattccgctgtgatcaccggaggggtttcttttgtaatatgtgcatggtggtacatatttctttattcctatcccaaggtttgaaaaccatttcccttattctttttgccactttgtggtgtttatatgattggctagaggtcagagccttgtaggttacactggctccacttatgattgttccacaagcccatgatcatgaattttcagacttgcgtcaaaaaaatatttttttgcgtaaaaaaaatgaattttcagacggttgatgaaagtagattgaaataacactctcgtttggtcttgacataattcttatgcaactaatgtagttacaggcttatagcataactgcataggttcttttcaaactgctaaattatacacttagctttcttaccctgattgtgcgtccccccacttaccagaatctatcagatacatctttcatcacatcatattgtgcacaagaatgtttgtaactgtgtcttggtggacttttactcctaacaaaatcacatagtaatatctcaaaattaatggacactataattttagttttttagcatatgtttgcattaaggggatgtactttaattcacgagctagctgtatacatgagaactaaaaacatagagcactagagggtagatttagctaatgatagcctcaactgagattgcatggtatcaagatagcaagtactacatgcaaaaggccggcgtgagtgcagagaaatcttgtggccacttgagatttaacatcaccctggtcgactagtgcttcatacactgtactatagttttttttgtagatgttgccgtagttcctgaagtgacgagcattatttctgatttccgactggaccttgtcggtgtaaccatcacatattgtctactttcgatctgtagtctttgatctgaatgtgttctcaactctcaagtctcaacatgatctgcagtagttcctgttagataattgcttgtttgtgcagagaacgaagtagaactaaccatctgaattgtcaggcatacaccgaaatgatagctgagaggaggcggaaggttgccagtggtgctgaagatacctacgggatggagaagagccagtgaggaattaattactgccaccactgcaggcgtgtcttgtttgtagcattgagtatgattgtgcagagaacaaaacaaaatcatcggtttgtaggacttgttcttcagaatatatgttccatggaatcaatctgttcagatcaatggccatctttgtttaatttgcaatggcctccattgttcaccatgtgcaagttggccatgtaggttaatttgcaattttttgcccgattcacatcaaaacagaaatattctttacagtactgaaaataaacaaaccaaaaaaatggttgcagggtatgactttaatacttatactcttagtggttcaaagccaaggttaaaacataaaataaataaaaacacttaaaatagcacttatcttttttcatcataaaagttttaaaggacacttaggacctaatttaaaattgagtaaatttcacgaaacttgggtattggggcatccataaaaaaatccagttattgtggtttgtttcaaggaaccaaatgttttggagcaaaacatttaaaaaaaaacccatatttatgtaaaacactcatatttaataaaattcttaaagtacgtgttcccctagtctagttttttttttaatttttcattgtacaaaaaaattcaatataatcctcactgataatgacataataactggttaaatatacacataaatggtcatagaataatgatcaacgatcgttgaaaagcaactaacgtgtatatgtatagtttttttttttctgaatttttcattgaacaagaaattcaatatttcctaactgataatgacataataattggttaaatatacacataaatgatcatagaacaatgatcaacgatggttgaaaagcaactaatgtgtatatgtactaaaaatatctcatacaattttttacaataattatagataagtatatagtcgggtagatgatataaacttgtagctgaggttttatgaaacactttgccctaaaacctgggtttcatgaaacaatttgcgttacggatgtcccaaaatctagggttgtgcaaaaatttgctctaaaaaattagattttatcagccaatcaatacccaacaaaatcaattttgcgccttgctgcctcacaggggattgtggccaggccaccacgacagcctagtctacggaaacgctttcttggttcgttcaaaccatgggagcatgagcccggcagtgcggacgaagcggccgccgccgcagccgctgccgcggcggccgccgccgccgaagccgagcgcggagtcgaagccggcgaaggcccgtgcaccggcaacctcgctactggagagcctcaagtcgttcaagtcccgcctggccgccggcccgccgctcgcgcccacgccgaagtccttcaagtcgtacgcggagacctgcgcgtccatcctccggctctgctccgccgccgcggccgcctccggcaccgctgccgcctcctcaaacctgccgctcgtcctctcaatccacgcgcacgcgctcgtctccggcctgaccgcggacggctcggtggcgtcgcacctcctcaccgcctacgccgccttcgcgcgcgcggcggaccgcgacggggccttccgggactgcgtctccgtcgtcggggcggcgtccccgttcgcctacgatttcatggtgcgggagcacgtcaaggccggggacatcgtctccgctcgccggctgttcgacggaatgcccgagaggagcgtcgtgtcgtacaccaccatggtggatgcgctcatgaagcgcgggtccgtgagggatgcggttgagctgtatcgccagtgcccgctctgctcggttcccttcttcaccgcgatgatcgcggggtttgtcctcaatgagctccccaaggatgcgctcggcgtgttccatgaaatgctcagctgcggcgtgagtccaaatgagatcactttggtctccgtcatcaaggcatgcattggtgcaggtgagttcgatctggccatgtctatcgtggggttggcaatgaaatcaaacttgcttgacaaaaatcttggggtacgcaactccttgatcacactatacttaaggaagggagatgcagatgctgcacgcaggatgtttgatgaaatggaggtgagagatgtggtttcatggactgctttgcttgatgtgtatgctgaattgggtgacctcgagggagctcgacgggttcttgatgaaatgcctgagaggaacgaggtctcctggggtactttggttgctaggcatgaacagaaaggcaatgcaaaagaagcagtgagtttgtatagtcagatgctggctgatggttgtaggccaaacatttcatgtttctccagcgttcttggtgcttgtgctagccttcaggacttaagaagcggaagaaagatccataaccagactttaaagatggcctgtagcaataatgtatttgtatccagcgctctgattgacatgtactgcaaatgcaaacagttgccagatgcacaaatgattttttactccctaccacaaaagaacatagtatgttggaactctctcatttcaggttatagcaacaactcaaaaatggtggaagctgaggaactcttcaaaaagatgcctgcaaggaatgttgcttcatggaattcaatcatctctggttatgcacaaaatagacagtttattgatgcattaaaatctttccatgcaatgttagcttcagggcagagtccaggggaaattaccttctcaagtgttctcctggcttgtgctagcctgtgttctttagagatgggcaagatggttcatgctaagatcattaagcttggaattaaggaaagcatctttgttgggactgcactgagtgatatgtatgctaagtcaggggatttagatagctctaagagggtattttatgaaatgcccaaaagaaatgatgttgcttggactgccatgattcaaggacttgctgaaaatggttttgcagaggagtctattctgttatttgaggatatgatctcagcaggaataacaccaaatgagcagacatttttagccattttatttgcttgctcccacagtggcttggtggagcatgccatgcattatttcgaaatgatgcaggcatgtggtatatcacctaaagcaaaacattatacatgtatggttgatgtccttgctcgagctggtcatttggcagaagcagaagatcttctcctgaaaatcgaaagcaaatcagaagcaaattcatgggctgctcttctgagtgcctgcaacatttacaggaataaggaaatgggtgagagggctgcaaagaggctccaggagttggacaaggataatacagcaggttatgtgttactctcaaatatgtatgcatcttgcgggaaatggaaagatgctgctgagatgaggatactaatgaaagggatcaatcttaaaaaggatggtgggtgtagttgggttcagataagaggtcaatatcaagccttcttttcttgggagacaaagcatcccttgttaccggatgtttatgagatgttggatttgctgacatgggaattgattgcttgatttttttaaaaatgtcatataggagtaaaaccttcgaggctttgacctcattttgcttctttagttcataaagataacgatagcaggatggagttgtttctggagaatggctgaaaggaaattgcttttgacattccaaaaatgatagttgccttcatatgctaagctccagaaatattcatggttatttgcttccaaccatctagctggaattttagcaaattgtgatagccgtgctggattattacaaaagaaggtagggcattattgttggtttattgactttgagcaccgtggtttgtttttaatctgctcttcaaaacagcactacctcggcatggtagcaacctggaatagaatgtctgtatctttttgctgaagttcgtgtgatttgacaacaaccaacttcagatgaacaacttcagaaaattcaactgtgtatttactgcattgtgactatcctgacttgtttactgaaccttgtattgcctcctttgatatggaattcaaatgaagattactgcaaaagatgtcccgggtgcgagaaccctaagcatgaattgtgctatgagctagctttagtgataacctttgagtatgaactctctggggtcaccgttgaagtgggtaaagaatgtctaagctttcgttattccagtttgatcgaaaatcaggtaaatactttgctatcttcgtcccttttgatattttataatctgctcgtgaattgacaatggacatgcacggatgcaccagcattcatgccttatttcgaagtcttttcagcattactggtcattttaatgatcttttgacatttatttgttttctcagtacagccaactggatcttagaagctgttcggtcgagaaatctcagaagtgtaccgtgtacgccgtctctgctacatgtatatggcttgattggggaactgattcttctttaccggttgaggtaaactcgttcacatgaaagctttataattataaagtgatttactctgtattctttatttttacttatggattataaaaggattttgattgcacgccatagtactaataatgtttttcctctacgcgctggcttcgcagtttttagatttcaaaaaagtaatgtgcagtttaaccaaactagcatggtggcccgcgcagattgcgcggctagcatcattatattttctctcatataatagcatatatgttttctcattatattattcaaatatattaaaatgacaacataattttaaattttgtaataactttacaaaactactaatgtgtaatattcatattatattttatatacgtgctatttattaattatttttactatcaaattttagttatttgtaaattatatatatttctatatggactctagactcgtcttttaatatatttttttattctgaattttctgtaaattgtatttctatatagactctatgctcttcttccaatattatttatttttatttatgaatttttattatttctaattgtatttctatgtggactctaaactcatctttcaatattctttaatttttaatttcgaatttcatttacttctaaattgtattcctatattgaccttcacctcttcttcccatgtttttcttaatttcgaattttagttatttgtaaattgtatttttatacggactctaaactatacttttaattttattatgtttattccaaattttagttagttttaaattcctatatggactctatactctacttctaatattccttattttttaattctgaatttctattttttccttaattctatttctatatgggctctatactctacttctaatattccttatttttaattccaaatttatattatttgctaattgtattctatatggactctatactctacttctaatatttcttatttttaatttcgaatttcagttatttcctaattgtatttctatatggactctatactttacttctaatattccttatttttaattccgaatttcagttatttcctaattgtatttctatatgaactctatactctacttctaatattccttatttttaattccgaatttcagtatactctacttctaatattccttattttttaattccaaatttcaactatttcctaattgtatttctatatggactctatactctacttctaatatttattatttttaattccgaattttagtgatttcctaattttatttctatctctagtctcctcttctaatattccttatttttttaattccgaatttcaactatttctaaattgtatttctatatggactctagtcttctcttctaatattccttattttttaattccgaatttcagctatttctaaattgtatttctatatggactttgccttttctttttctccgattaatgtgaggatttctaggccatgagagcgaacgtggaggctcctttctttatttctttaataatataatagatagatgttttgtaacgaagggaaatcagctatttttacaaaagaaagaaaaccgtatatctccacccataaacattaacggcagcattagatgcacactagtcgccactccctctcagtctcaggaagtcagaacgaacctagcctgtcggtctgtcggactactgacgagcatagtgactgatacagaggctgtatttgaatccaaacttctaactttttctatcacatcaatctgtcgtacacacagtcagatcgtactaatttcaacccaaacttctaaacttggaaggaactaaacacagtcagaactcattatctgtttacatactactagactagtatcttcttttcagtttattcactatattattgtcacgaattttgctctaggcttctaaaaatatgatatataaaagaaattcagttgttataaattatttgttagttttatttcttaaaatacttaatttatccctataacaggtagataatactttctctgttttttaatagatgtcgccgttgatttttgaacccacgtttaaccattcgtcttattaaaaaaatttatgtgaatatataagatataaatcatgcttaaagtactttgagtaacaaaaataactcacaacaaaattaattataattacacaatttttttgaataagacgaatgatcaaatgtgtaataaaagaacaatgatgatatctattaaaatacagaggtagtacacgataataatctttgaaaagctaatacatactccatctatcccataatataacaatctagaatcggatggaacatttcatattagaacgaatctagatagatgcatgcccagatttattgtattataaattgtctcatctaattttagattgttatattattggacggtggagtattagtgcatgtggaccgtataaataacatcactttctttctgtgtgaaccctctcaggatgcatctttggggaaggtgcagatccttaggtttctgtgctgtgcatttcattatcaaagccaaggtaactggacgacgtgcgcattgcactccaagccaatcacatcaacctgcagccgattgaaccgcggggttcaaattggctggccggtgccggtggcaattgatcgctctgcctcgtgccatcgtcggcacgcggcttgactctcttgtccctcctcgtgtcggcctacccgatcagcaccggacgcccagagcccagacacctcagcggctgggcagttcacatccgcgtgtactactacgcatattcttctttccccacccgcaatcaccgatcaaaccgcgtcgccctcagcagcggggtcaggtcaggtgcgccttctagctccttccttctcccactcgtctcactccatgctccactacttgacgcttatagcgcaccaatccccaactttaccaatctttttctccggacgatgttggtttctcccgcagttgtggtctaattaagagaagtgcagccttcaggtggctggtgcggcggggatggagccactggaggtggcgatcacgatcatcttcgacgcgctgttgctggtgttcatggtgaagctcttcttcgccatgttccagatgaagctcgtcgtcatcctcttctacctcgtcatcctcctcttcgccatggccttctccggccgggcacccagtagcttctagtatgccgcgacaaatttggaggtgcaaatctcttctttcccccttaattcgcgagctgattggtggatctacgtggattttcatcctctggtggaatcggtcgtctcggtttttgtgtaagaaaggagaatcatgaggccaaggtgcaaactgtgtagtcttgatcaaagaaaagccatggccatggccccctctcatgtgaatttagtcgagagtttcttctataatttccctgcttatatatttctacttacatttttgctaatgactcttgtcaaaagtgtagattttctagtggtttccttgatcatcaatggagagtagtctttcttgcaactttccccctttttctcttgaagaaaaataccacctgagttataccactttcttcataggagtatataaaaaggcagccttatgctattcatctcgccgtgtggcttcaataattatagagaaggtcccgaaaatgctgaaatggtagtctttctttcctggttcacgcgacactgaaatgtgcaatatagaaaacaaaaaagaagatccagtatactcctaccaatcaatcaatcatcaatgactattttgtcgtctgcgattgtacttaaaaaatactttttttctcatatcagtctacgctattgttcaagcttttctttctcatttcatcgaaactggctggcaaatctcaagttgacttatgtaaccttggcaatgaaacgaactgtgattacgccattacggcatcggctgatgccccctctgtcctctcaccacaccaatcgccatggcgtaacatgcgacgagcacaccacagtcaccgtggtcacatgctcacagcctcgcaggtgccacttgagagcaagtcttgaaatacagaaaaataatgatttaactacaaaatttcgtgcagctagaagtagaaatggggacaagttttgcagattttctgacagcaactctgcaagattgatcttcccggaaataccggctgaacaataaaaggtgccttttttaaaagaaaaaaaggcctattttacagcccaactgaagcctagcccgtgggtgttacgcgggagaatttttatttatatatttactttaaaaaattttaaaaataattggaaaaaaaaacgaaatactccatctgtcctaaaaagatttaaatccaacaaaactagacacacgtgtctaaatttattgtttttttttaacagatggagtatactctaacgcatgactgtgtattgtaaaagtcgccctttcaaaaaagaaatccttaaatattttttttaatttacagtttcacttcccgtccgttttagttactagtaatgctgatggatcttgttgagctctgtaattttgatgtaaagttttattttatccaacttcatttgacatatttgtaaagtggcaaactatatagaaaaaatgcatttaagtcccttcctgacctcttggagagcggttttcgcaaaataaataaaaaaataaaaaacgtctttacagagagagttaggggtatatttttaatttttgaagacaaaaagaattgtgtacataaaacaatccagtttactcgtgaggcccatattagtaggcccagaacggggttgggaggacgcggcccattacagagcagagaaatcgcccccagtttttaatcgatatcaagttcatcactcttcttgttttcaagttcatgctgaaattactccaccgagcagacagcagagaaatcgatcccagatgacaagcaagattatcgcacaataacgtcttgtttggtaacacaatgaaatcatgatgtaaaaaaaaaggaaaccaataaattagaggaaaacggagacccacagattatcacatttcttgcattctgattattaatcacctcattactcttctttaaccacctcgcttctgctcttcttgcccttggcggcggcgtaggcggcgccgtggaagtcgaggaagagcgcgagcagcgacgcgttgaagacggcgttgaacgcccacccggccatcccctcgcacccgccggcggcgaagtgccgccacagcatcaccgccgacgccgcgaagctgaagaggaactgcgcgatctgcagctccgtgacggcgcgcttccaccgcggcggccaccggaggccgaggctgcagcagaggtagtagccgtacatggcgacgtgcacggcggcgttggtggcgagcgcgatgggcatcagcgactgcctcgtggcgagccagaggtagcacatggcgatgacggcggcgtggtggtagacgtggagcagcgtcagcgggcggcggccgaggaggatgagcagcgtgtcgccgagctcgtacaccttggagaggtagaacacgtgcgcccagaagaagaccgggcccgacgccgccgtggcgccgccgggagggaagcagaaggcccaccacgcggagggcgccgtggcggccacggagagcacgcacccggcggccatggcggcggagagcgccaggaggaccgcgctgtggagcgcggagaccgcacggagcgcgcgcgggtgcggcgacgggagcgggaccacgcggcggtggaggaggaacaccgtggcgaggtaggcgcagatgacggcggcggcgaaggacggggtcgaggcgggcgtgcggccgggctcccaccggaaggaggcgacggcggggtggtcgaccagcgcccaccgggcgcgccgcagcagcgcggtcgccgccatctcgcagggcactgtgcacccacctccccgacctcgccggcctgtggagcgcactgtgtggtggtttgagtgacacgtcgagcctacattagcgggaagcttgggtatgggtggggcgctttgtgcgacagtgggagtgggcttgggtagtcgatgctgccaggctggggcaacatcagcccttctaagggcctgtttggcacagctacagctccagctccacctctcctggagctggagctcagccaaacaatttcagctccaccaaaattggaagtggagttgggtggagctctctcacaaaatgtactagagttgtagagctgtgtctaggcagctccacaacttcactccagactcaactcctggagttatatttaggagttggagctgtaccaaatatgccctaatgtttcgatgcctaaacgtgagtatgtacgtctaaatcagataacaaaaagggagtgaccaagtaagagcatctccaatagctttctaatatgctaataccaatcccaaaggataaattttaggaatttggtctaaaaccatgtcgccaacgtatgcctaaaccagctcccaatttttcagtactcccaattccggctcagcctttagccagatcttgggctcctcgcggagttcccaatctgagcaatcgttgcaatttaaaatgcaagggcgaacctaaactaaaaacttgaaactacatgcttgtttggcacaactctagctcaaactgcacctcttctagagttggagctcagccaaacagttttaacttcatctaaaatgggaacggagctgggcgaagtgctttcacaaaataaactaaagtaaagagatagaggtgggtttaggctactctacaactacactttaaacccaactcctaagataaatttaggagatggagctctaccaaacatgccatacatatttaaatccataaacttgcagaatgtattattgccagtcgtaaatttgatatggcccatcacatgggcactaaccccccccccccccaccacaaataaataaataaaaacttgagatgaaagtctatctagcaccctgaactttaacatcggacattcaaccccataaactttgcgataccattcatattagccctaagatggttttagattgtggttttgtatattttgaaagcttaaacgaataactttgaataactaatataacatatttgcatatcgtcggttgtaagtcatcaatttatacttatacattgatatcatactattaatatattggtagttgtttgtaagtgagagctaacaaggggtgaaaagaaagattcaggtggagattttaatatatatgtccaatgtgtatgtcacgtgatcaaacgcatccaatatatatataaattagataaaaacaactatgcaaaccaccttaggggttatataaatggtactgtaaagtttagggaaggttgaatatccggtttcaaagttcggggcaggggagggggggggtatttggactttttccctcctcttttttatccttctcatcctcttcttcccttgaacgactcatggacggtgataaacgaggtgagagcttgtgggcagcgaccgacgacaagctttaacggtagtgacttcatgtgaaaacgctcgaggccttgtggtggctagggatgagctcgacggcgccaagaaggtttcaggcagcggtgaggctgatgaggtgctggggtggatgcttagagggaggggatggttagagctcaaggtttgcagggagcttgttagcgcatggccaaatatgagtggaggctcatggcaaagtatttctacaacagtacaaccaaacctcatctttatctgaataagagttctccagggcctccaggcacccagacagagccccatttgctactctgaggcaaagaatgaggttctgcctgccacccataacaatatcagagaacatacaagagggtactcttattcagataaactaccatatcataattcagaaatcaactgtggtacactcatgggctcattgcctagaactgaacactgatacactagaagaattaaaatccatacagggctcaatatgcgtaaatatcaggaaacaatcagcctaattcaactgaataatgttgatgcacattcttgatgttccggccaacaataagctttgagcttcagtttcagaacagtggcaataccagcaaagtttctaggcattatcttataacgctacacaatacacattaccttttcccctatgatcatattcatatatcatctcaatttctcaagatcctgtgaactagtatccatctttctttgctgtaagaatacaccatcctctattcatagagatttgacatggcattagcaccacaaagaagtgatgtaaaacagaggtagataggtccccccaagttatcatccagtatcatcaataacacgaaccaaaatttcattccattagagcacaaatctaagcgcatgttcccaacagaatccatcaagcattacaaacatacaaaggatttgacataagaacatcacctcgagcacaggaaaacccccgggaaaaagctcagaagcagcagtcgcagtcgaaggggcagagcggggtgccgccggcgtcggacttgccgaacccgagctcgtcggcggagtatatcgccagcccgtccgccgtgcgccgccgcggccgcttctcctcgacttcgtcgtcgtcgtccgtgtccctgcccttgctacccttcttagccttattgctcttcttggccccctcggacctctccttgggcttcttggctcgcacagattcctcctccccctgctgctgctgctgcttgcgcttcttgccggatgacttggtggcctggaagatcttgtcgatctcgttggtcgccttcttcttcttcggcttctccgccgccaccgccgccgccgctttctcctccctctcctcctccgtgggtttcgaaggcttaggtttttggtcggaggacgaggccttggatttgatagaaggattaggcccggaaggcctcttcttcttctgtgatttggtggccatcggagtctcggagaatatgaagtcggaattcgcagccgccgccgacgaggaggagaaagattgcggtggctttggggaagggaaggaatggcggcgagaagggtttgcgagtggagactggacaggaagcttgtggagttgtggagttgtgggccttggattgggctcgttccaggcgtcgtctgacgctgaatttaaccagcccatctgacaggaggaaatttacctgaaacccagttactgcttttcatcatatttgttgttctaaaactcgtaaaaccccgctacaccgagtgaatttactccacaaacctttttgttcgaattccgatgattcccttgtttctttcaaatgattcctttgtatctttcaaataaagatatttgaaatagtaaaatgagaacaggagcgatataagttgaaaagaaatcggcttgagatggaaagagagaatatgtcaacttgtcaagcagatgtatcattatacagactcaataaacgaattcttccaccatttcacatttcataatttatgagttatgacgcttctgaacaaacagttcagaacaaaccataattcacaatttcacatatgtacaattgacaaggatagtttttgtatgtacaaattgctgatcatcgcgcatgcataatttcactgctttcacacttcacagtgccttcatgacgaatttggcagacacgacagctcccttggctgcaattttcagcacgtggcgactcctatacaacctgcacaaaataaaaggcaacagtcaaagaaagaaaggagatatctccgtatggacggtactgttgcatcttcaatgtcatttagctaaatcctactaaaaatagatcccctgaagaaaatcagcaatataacaaaacaaattaagataatgaaagtcaggtttgcattatgaaatggataggaacctcagcattgaaaacagaaataaaccaaaaagcagattgtaacaagacgtttacttgcaaaagcgacacaaatttagtatggagacaactttaccccactattgtgattccccatgttgccaatatgtaaagcacttttccagcctcccaaatactcatccatttccacttatcattaagggtgctcaatgccattgcaacagctgcacagatgttaaaagttagaacatgctacacagaattgaacagcacgtaaagcagactaagactctcaaagacagaatattttgtcaaagaaacttagtcatgtgatcaagaaatcttgtttattgtctcagtgcaatgaattactggtccaattaatttcatttgtgattggatgtgttaaaggggtcagtctcccataacatgctccaacattgagttcaccaagtactcgactagaacaatgcatacaaaaacttgttgtgataaccatatccacaccataatatagcactgttgtttagatccacaatgttggaaattagtaaatcacaacactatttcaaacagcatattgaagttcaagttctttcttggtcacacacacactgactcattgttttgaaccagttacctaagtaacagagtttagatgcaaataaacttcatctttatcaaatttaaagtaacagcatggagataagaagttagtatacccttttgcagctccactggtgatattgactgaagaatacagaacaacaaatagttagatcattgaggtagtatagagagtattcatcaattgttgaaaacaagataccttggactttggatcttcaagaatgcacctagcaataaaggaggtcataccatcaataatgtcatcatcattaacaagtacataattttcattatcaattccactgatttcctccatatttgccccgggtttatcacaggcaaccaagacccaagatccattcttcccgccaccttcagtgtatggaatatctgcaatatccagttctggttttgattcatcaatcaaacaaaaggttatttacattgttgttggcacaatgtaacgcaggaaacaaatagtcataaaagtatggttcacaaataaaatcgcagtgtttcacacagatgtacctgtcatgttatcaggagatagctctgtttgttgatgccttgactcatctcgaattttctcaagctgagccaagaagctagcattgttaactgctgctacaagacgattatgcagctgcatcatgaaatcacatccatgaaaagcaaaatcggtcagacattaaaaggtaaaacaaattgaacagtgatagaaataaaagctggataagggcatgtaatcacacaactgaatttctaagtcataagtgttttggtccatgcatattatcagtcagcaactcagcatcattgcatcacgaattaaacttaatatgtcctgttacaccccctcaaatggcatggattcgaatgattgttgttaaaaaaacggtgacctgataaattcatacaccgcaattcctgccaaatttcggatgctcgtgtttttatagtatctaacaaaacatcatctatgatcatgtcaattctcagaggattaaggttaatactcctaatctgaaaacataagagagcaacagggagttgcaagaggctcacatcggcagggcactcctgggaaacacagggctcgccttggagctcgcggaggatggagaggtcgtcggcgaggcgagcgcggaggataacgttctccgcccgcagccgctcggcctcctccccgtccaccgccgggggggagacgccgtcgtgggccgggccgtggccgcggcggtgctcgatggcgtagcgagccacctccgcgatctccacgagcgtgtgcgccacctccagggggatcttgtgcgccatcgccgccgccgcctcgatcggccgccggccgctcgatcccctggcctcgccgacgacgggaccgcgggaggagagggacgagaggaggacggcgaagtaaaccctagggccaaacacgcaacctgagcggagcacgaaaggattgtggtaaaccggggacaacccgtgctgtgctctgctcaccacagaagaaaagagagagaaaagaaagggttacggagtagtagtactaattaataacgggattcggtcacgttcacgtggcgccaagctgtgtctaaggagaaggaaatagaaaagattaggaagatacgtaaaacgaggtaagttattagcgtatgattaattgagtattaactattttaaactattttttaaaatatttttattataaaattttttttataaaaacgtaccgtttaatagtttgggaagcgtgtgcgtgaaaaacaatgtccctttctcacctaatctcctagaactaacgcacccaaatgtcacagggaccatcatagtaaaaatttctctatgtagaaagtggaaacgcactgaacgtgaaaattgtaggaaaaagaaaacactgtcgccacttttgcttccgtactccgtaggtccgttaacatccaaaatgttgtgcacaaaatagcgaatgaaaattttggcctttttcttctaacttacagtactggatatggagggtaaatgacacgtgtaaattttttattagttaattttctgcggaacaccatacataagcatacactcacatttattttagaaaaggttttgttacccggcctctacaaccaaccaaatatatgtagcatttttaaattaagaacttagcctattaaataagaaacttagccctcaaataacccgaatattttaaattatgaacttaactcggcctctacatccaactggatatatacttcctttttaaatcctcaaataacccgggtacttttttacatgtacatccaaccgaatatatgtagtatttttaaattaggaacttagcatatcaagcagagaacttagcccagcctctatatccaactggatttttaaaccctcaaataacccgggtatttgaacttagagccttgggatgctactcaagtcactgtaaccagattatatgacatttcacacactcacattcaacctactactatgaacaccttaacagatacatcgtctagaatcaaaagaatagttagttgtagacgcaagcacatgtattaagtttggaacttgaaattgagtggacatactccatcacaaggaccctttctagatgagctacgctaagttcacgacacggatagctgttaaacaaagtccaaaaattacatgaaaaaattagaggaaaaatttggacatgagaaaatagctttacttactactcccttaatcataaatgatttatattaggataacatttgataaaaattttaaaactttaaccataaatttcaaattaaaataagttaaatctaatagctttacaatattaggatatttcatttcaaggtgattttttttctgttttataaactgagcatttgagatgttattgatagtcaaaattttaaaagtttgatttaagtttatccaaaacatcaaatatttatgcctagaagtagtatattgtttagtctcttttttttttcttgccggcattatgaagcaaaattagtgatcaataagtattttgtggtagggcaaattttgaatgatgaactccactttcagtgttcggaatacaaccaaaatatcaagctaagtatttgtgggcacctgtgtctgcgttttgcaaaaaaaaaaaaaaaaaatcaagctaacattgtttgtttgttttctctaacaagctttgcttgtcgcttttgaagaaaattttgcttgcttggattaattgcgatcacgtcatatcggtgatacaccaatgcactccaaagtaatatcatagacacaggattcttaataccactagatcaagctttgctaacctgtgaagagattaaagaaaacatgagcatgttgttgggagaacatagggcaataagggatggggtagcttttagagggaaataaggattttgtccttaaaaaaatgagaaatgatttaccttcaacagcgaataatatgggagcgtatcctatgcacacaggccctcgcgtgtacacaccgtgtacaccaactaaaaattatcacaaaaaattctagaaaaattcatacatatactttcaatagtattacatctacgtgcaaagtcgcatcttcaaattcattctacatagaaaataacaaaaaagataaaattctgacaaaattgcaaccttaaaactgtcagatttttttttgttacggttaaaatataatgaatttgacgttaagattttaaccctaggtgtaatacaattaaaagtatgcgtataattttttttctagattttttggtgacattttttaagttggtgtatgcgtataattttttttctagattttttggtgacattttttaagttggtgtgcacgtgtgtacacatgagggcttgtgtgcatatgatatgttgccgaataatatgacagaacaagcaatgagctatcagaaggtcacacgaacagcccagaatacacatttcgctgacaggacactacgcaagttagagttgtacccaggtgcatagctgcattatgcagtcccatctgctgtacattatttgtacaaatatattccagctatcacaaggctaggcacaaaattagagacaaactaaccaggccctacttgatacaatgccgtcgatcaatttacagtagctcatatacttctctgataccgagatttcagagaagcctgacctttctcttcattaggagcatttggcaccggaccaacaaaatcagcatccccactgcttggccagactagaggaatcagcttctgctgatatgcattcgtattatcgcatatgccaagctggatgacaaacgttactgtgcagcctcttcctgttccttcgctatccaaccagatgtgccctcccatcaaagtaacaaacctgagataggatttttcacattttcagttaagtcgccgagtttacagtgagggagtgagtatatagcagcctcagcacaaattgggttgcagaaaaaggagctgataggtaagaaggtggtgatgtatagtaaactacctcttgcaa

SEQ ID NO: 5799 - DNA, 22262 bp, Oryza sativa
cgcgccgccgcgtcgccgccttcgagccgccgcgccggcgccctcgtgctgtcgtgccgccgcattcgtgaccgccgcgccgccgcctcagtgtgccgcgccgtgcgccgtcgtcgccgccgccgtcgtcgccactgccgccgtcgtcgccaccgctgccgtcggtgagccgctgccccccccccctatttgtcgccgtgccgccgggtagagagggagccgagaaagagaaaggaagggagaagccgagggagagaaagaagagggaaggaggagagaaaccggaaaggagagagagagaaaggaaaagaaaagagagagagagagaaaggagaagaaaagaaaagagagagaaaggaaaagaaaagaaaagagagagagaaaggagaggagagattagagtgggccccacgtgtttagtgaatagtaatccccttcttaatctttattagttgaatctattacatgtgggtccgggtggttaaaaatctaattatagaagttttttggtctcgagtttatgacatgtgggccccacttgtcattagctcttcctatttccctttagaaaataattcggtaggaaaaaggaataaacccggggtcccacttgtcaatggatatgtcttggattaaaaataaatcgtttatgaacagtagcttttcgtaatttctcggattaattcaaatttgaatctttacactagcataacttattcattttaactcggatttgagtgaaacttgaacctaaattcatataaattcataagctttccaatgatatataattcactattcaataaaatatatttataattataaattaattaatatcaaatgattagataataattaacctaaatagtgtgccaataaataaaaaaaatggatattgtacagtagcataattatctttaatatatcttgtcactgtagcaaccaaataaattagttataatcaatccttcaaattaatgggtgtaaaggaaaatattagtgccatttactagcctatgtccaaatataactaattccatgacttataaattatttacataaagtttagcctcatattttgtaactaaactataaacacatatagatgaatctttaacttgtttaggagagtaatcacagagctagttgtatttggaccacttaaaaaaaattagttgataccatgtcatgtgaagtagaatatatatatatatatatatatatatagtcggttgatatccattagttaaccaaatagagccatcttaaaatcaacatgtattatatagcttacagtaaaaagaaactactcaaatatatgatccaataataagatattgttgcttacacatatactatacatcccattatagtggtacggtatagtattaatttgcgtgttgcatatatgaaattaagagggagtgtatgacaaacatgtatattagataaatactagttataaatattgacctcatataattataattatagtttaactgtaaattaggattattcattgtaaaattatgtgatgggataatctgtaaccataatatgattaacctaaacaactctaacatacaaagcatggataattattaaccttttacaatttattgtgacaagtaaaatatgttcataattaaagtaaagcttccatcaataaaataaataatacaaatgattcactgtaattatttgattgatcctaaatccatccgacaacagaacctctagtatacgaccattttatttagatagatgcatgtgtagccataatccttccatagccattagctagactaaaccacaaattagccagatacgtatctcattcatactacattggctagctcctaaatagaccaccatgataacagaaagattaagaaactttagcccttagcatgttggaacccattagcaagcgcgaataatatgagcaaccttaggttcaacctcaacaaatatattttgtttgtgcatatttgattgttgcttgaatattggtttttctcgcgtattatagactttgtgtatcggatagtcgtgaggcaacgtcagcaacttccaggaggtgaaggttgatcaagaattatatcaagaataaggactatcctgagcaaggcaagtcatcactattccttgaacatgttgatcccaattgcgaaattgttttgtttacaaataaaattgcatgcaatgatgaacatcctacttgtgattatgccatgccttgattattgtttacccttaaatctttgtaaccatgtttacgtatgagtccctagtcaactatgacaattgcttagaaatgctattctagaatcatgcatactcatatttatcaaatgctatatgcttgggcaattacctttgggaaggtaattgagatgcggcatgtagagacatgagcgccacattgccatgatgttgatgacatgatttgtgaaaggagaaataaaattaaacaactattttcgactggggcggacggaggatttgggtggtatctggaaaaggctagtaccgtccccggtcaattaaggaccgagccatgaagttaagcatgaaacgaccctcgtacaaccgcacttctcgtatgggtatagacctagcggagtagatagccgagcggaggcagtatccctgcatagatggttcacccctgagtgaggcaggtgcgctacggtgggacagccgttgaggtagggccgagaggcgtgccctacatcggtgtcgccattggtaggactgccatgagtgtgtgagagagagaacttaacttgagccataatttaatatgtgtgtgagacttctctttcccgggagcgccagaactcctctcactgctagaaacatggacgcctagagtgcatgaggatttaagttcatggagcgggtactgccaatgcgaggttatcaaaaggctttgccgtggcgcgtctcatgtgttgggacgaggctcatgtgttgggcagtcgcggagtgcgggtaaagtgtacatccactgcagtgtgagtaaaccaaatctattcgaatagccgtgctcgcggttaatgagcaccgggacatgtattacacttggctagactctaaattcttaacttgtgttggatgggatattgcatggtgatttttatgctgatggagccacttcctgagaggagggaaggtggacgtcctcagaaaaccatgacgactcaatggcgggaagctatccttgggatcacaatggatggtggacagaaccgtcgttgtttaatgtgaacactggaactaaaatttgatcagtctatgataggtcttaggcttgtgaaaatatttgcaaaacgcagctttatgcaaaagaacctgaaaccattccttgaataccctctatcatatgcattgttgttgtggtggcttgctgagtacggttggtactcacccttgctatttatatatcttttaggagagtgttgaagagaagcccttgtcggtacgcttgcgtatcccacaagatgatcggagtgcggtcttgttctaggtctcgttccccagtcgactgcctgtggcatgttaaccgggcccttatattattttgtcttctgctgttgttctctgatagttgttggcctacctggccctaatgtaagtatttaactcttttagtctaaattcattcgtgatatgttgtgatccaactatgtatgtgtgtaccaactactgatccagggattggtacggataaacacagaagatttccgatttccaaaatcgggggtctacaccttagtaacgtttgataaatttaaatagcctgtactctagttgtacataattattctcatgattttattactatttcataattttacaagttatcttttgttttacattagtactttttgaattgttctaacacgaaacactatatttttcagagatggcacgtcaggatacacctcagttgttggacccggcgatagatcaccgacaccggtctcaccttactgcggtgcagggggctcagcttgggacgttccgggcacggacgtgcggtgagctacttacggttcacgactcctttgtcgagaggtacgaacagtgtattactataacttagttgcgctgtactaatttttataatgacatattaatttgttattacaggctgcgtgaggccagagacgcacacttttcacttgccgtgcggtgaggtagcccctaccctacaggacgtatcgtacttgttggggctaccgctcgcgggagacgctgttgggccagtgaccgcgggtgtggactggcaagacgatctgacggcatgtttcgcactagtacagcgcgcaccgcatctcccgctcgagccgttggcacaccaccgcaacaccggacctacgaagaggtgactgcttcagttcaccgtgagtgttttttgtaccgaaatgacaagcgtactacatatttagtccacaagtaaggtgcctaacattttatcgaacgcttgcaggtcgagcagctacaggcagaggccgacgagtactcctacagccgctgtttggaggcgtacttgctctggctttttggctgagtgatgttctgtggcggtcacgggcacgcggtcgacaagggactcgtgcactaggccaggagcatcgccgacgccgcggtaggcgaggtgcctcagtggagctggggttccgcgttgttggcggctctgtatcgtggcctttgtgaggcttgcacgaagacggatcctagcgcgacctttggtgggtgccctctctttcttcctatctggacagctgagaggattgcgatcggtctgaggtggaccagcacgcgtacgaggagtcactgtacgcggagcgaccagaggtcaactaccctacgatcggtactctgtggtgccgtcgtcaggtacatcacatcgatcttctcgtattgttaagttaattgctaagttcattgtacatcacatcgaacgtctcgtattgcagcaccgatgggctcacgtccaggttaggcggtcgtatcctgagtttgttatggagttcgaccgccttctgccgattgacgtcgtgtgggagccctacagtgtcgcggctacccaggctcgtgcgccgttgggtcagtccacactctgcaccagggaccaggcgtactggatgactacggttccgatggtcttcgacatctgcgttgagcctcacgcccctttccacgtgatgcggcagttcggcttccgtcagccctttccagtaccgtttccgacgaccgtcccagctgttgttcaccggtaagatctttcactatgctttcagttgttgcattaaaatctacctgtccacaataatttgcaacatctgtcgattcacactaatatgacacattaattcgcaggtactcgcgcaagggtcagcagtcagctggcgactggcccgccaagttggcgacttttgttgaggactggttgctcgcaaccgaggaggtcgtggaccacgagggagagccacacactgaggaggcgtaccaggcctacctacgctggtaccagccacgcacccgtactagggtcaccttcgctcccttggagcagcagccccacgttgtgagcactagagacctctacgccaggcaccgggaccaggacttcgctcgtgctgtgagtaccctgcatcacaccattcctttatgttttcatgtctttctctttatcaaattttacgaatatgtacgaacaaattaaccatgcaggtcgacgacatcaaccgggtcgtcgttgacggttcaacgacgatccaacgtttaggcgcggggattccggtacccgtagaggagcacctgacgacgtacacgcagatggtggagtcgatgcgctcgattctccgagtgctcacctgtcgtgcagacgacgttgctcgggcagacgtagctgtacagcggccacccgtaccgactggtccccgtccagctgcgcacgttcctaggccgactccccctccgcacggaggtaagtatttttaaggatttttctgcacatgcctcgcacatatatgtgagccgtttcacttgccgattgcttcagggtttcgtgcaccgttcagcaccccgccttcctcggctaggccttctgttgtgccccccacaggtacttaaaaaataacattacttcgacaatcaatttacatgcattttatgtcttagcttacaagggtcccgttgtcgatgtgtaggtttcgcccagttcgctatgacgcaggccgcccacttctcccaggctgcagggtcagcgtctcaggcagctgcatcgacctcgcactcagcgcagttctggcagtacaccgggactttgtcacaggcagccggcacgtcgagtcagggtccaccactggaccatgctgggacctcgtcggaccgcttggtgccttccaccttgctcttcgacatcactgacttcgacttcgcttcaggctcgacagaggagcgtggtcgcgacgcggggcagggccagtagagcagtcttctctttgtttatttgcttcactttccagtactgtatgcttgtgtaatgaatacgttgttgttatatgtgcacgatacctgttggcgcatgcacgatacctttcggcgcatgcacgactactttctgccgcaccgatgcagcctcctttattcgcgtacgatacgagtatttgctcgccatttgccgcatacgactaatgtaactttcggcgccgatcaggcatgtaactttcggcgccgatcaggcgtacccaccatgccccgccacgttcacatgtcagggatatcactcgattttttgcgcccatataagtcgccttaacgagtgaggcctcacaatcttccagaactcagtcacattcagtactctcttccccacttgcttcattacaaatcctaccggctttcgtcaatggctagacgccggggtgttgaggatccgaactggcgtagcaatacttgtgtatacctactaccaccttggtgccagcgtcctctctgcctatgcggtgatcgatgccaactaatggcttcgaggaatcctgatattcgaggaaggcgcttttttaggtgccctaactatgatcgtgaggtattttattatctgcatatgcttattcattccgtatgggcaatcgttttattcttcgtaacactactctattcggcagacccgcactacggcttacgcatacatcgagtgggtcgatacagaaaatcccgttctcgacctaaccacttgtttacaagaaggtcgctggtatttcgcatccaaaagtactgagcaatacttacagagaaaagcggcttatgaacgacaatgtcgtgaacaacagagcgactggcaggtgctaactatagcactccctccatgggaagcccgtccaagatgcaggtgtggtgatcgttgtcaggttcttcattccataaagcctacaacattgggtcgaaggttctttgtttgtccaaatattcttgacgacgatttcatggtaagaatattttgattacatgaatcctttttttctcacaacatttactaactttgctcgctttaaatctattctttcctcccaggaaccaccaaggagatgtcaatacagagaatgtatagacaccagaagggttctaactccacctagccgtgttgtgcagcttgaactaccagagcaatacagggttactaaagcgcggtttgagagaggagagggatcctcacgtaggggttagctattatcggacaacttggcatattgaaatttctactgtcatgcttccttgtcccattactacatcgtcgttgtgttcaactattgcactacctccctcctagttcgaatctaatatcatctatgtaaccgcaatggaaatagttgtatcatgttcaaattgtactactatttcttcatgttacataactctccttgtttaagtccatataatgtttctacgaccgagactgcgataggcctatattaattatccgagtactaatacgtcgaataagttacaaaataataccttacttaacatatgaaattgcgaaacaaccaacttcaatacatttttataacaatattaacatgttttaccaataaatacttctttatttattattaacataacatagaaaaatcgtttggccgtactttttgcatctgggtcccttgccgccctctactggggcggcaaggggcccaaatgcaaaaagtacgagcgcaacctctttatggcggcaaaaattgcaattagccccttgccgccctctgtatgggcggcaagggggttattgcaatttttgccgacggcggcagacggcgcggtcgacccgctgtctgccacgtcagcttgtcgcccaccactggggcggcaggttctagttttgcaatttttttggccgatagattatttctgtaaatattaaaaaaaatctaaaaatgaaaaaaattctgtgcaatggcagaggatggtaggcatggtgcacatgagcgaaacctatgtgcgatggctgctttcgtcgagccactgcgcgattgcatcgcgctctcacaggtgcagttgtctgttttgggagcgtgattgtggtcttgtagacgggcatggccgcatggccgcaagggcatacattgccgacaaaacatgagataacttctgccaaaaataattgaaaaatataccgttaaaattttcttttcttagaaatatatgacaagcaaaaaggttttagaagagagaatataccgttgtcacgagggagtaaagcaaactcatgacgacgagatcgtatggtgaatctgcaaagtggcgatgacaacaacgatatcgcgggactttggactatttgccactctcttcaatagcacattctcaaatgccatcttccctaataactctaattatttgtgttgaaagtatgtcatgaggggctttgatcgaggatgccaaaaccaccacacctatgaagtgctgctcgacgatcaaggggttcgactggggtgaagccgagggggcaaggccgaaggacgaagctagaagggttcgccaccctgtccataggacttgtcgtcaagtctctgtcagaggcgaagccggaggggttcgaccatgagctagatgccttcgccaaacatgcctgagagtgcgggatggcccaagaaggccattcgccacacatgggctggcccacgaagcccgactagggccccatagctaggatggacactatgtgccctcactaatgtccttatcttaagggtatcaatataaattctcctatacacactaaaccctagtgagtatgagtctttactaagactataaaaggccctataggggcatgtaataggggatccaaaaaaatatcatcaattaataccttgttttactattcaaccactccaccgagagaaccacgtctttcgacgtgaagctattgtcgcttcgacaacaatttgccatcgtgattcatcaaattgtttctattttgccacttttaactgccaacacactaaaagaaacagaaaatgaccttactgctcctctcatctcctctatcttttcttctttcctcatctctcctatgttattcctctcctacgtgagaatcccatgtactgttgcagttggatggatggcgcgagcctccgcgatttgacggcgaggtctttgacgagcgaggatatgtcgaggtcacctcgaccacaagcgagatactcgcgctggagcatacaacttgacccatgccggctccctccccccctcctaaacatccatttgcaccgtttctcccaacatcacaggatctatgcgaagggcctgcaaccaagatgtactaccttggccccgatgacccattcgatgaaccatcaaccattgtcgcatccattgcttgtcctgctatccggttcatccatggcgctagccgtccctactgcttagcttgtctcacaccagagattggttcatgccatgccagagaggaagaaggtagaagggagatgaatgagagggtaatgaggttattttcttatagttttgctaagttgtcagtcaaaaataacgaaacagagacaacttggtggatcacgatggcaaataacaaaagttattgggaatgataacatttgagaatgtgacatcgaagagagagtggcaaatagcccaaaatccctaacatcgtgcccgacaaatgcgaagtggttgtttgcggaggtggacccggtgacgtcgccactacgcgctttgagtccacgagagtgtgggcccctatcatgtcctgataaatccaccccgaattaaaaatcactttataaaagaaaagaatagaaattattataaatctaaaagaaatctcaagcactaaacctctgtaaatattttctgctttaatgaaaatacattgctaggcaaatccctagcagctttccaggtgattttttttttcaaattgagcttggagtatttttcctaaaatctccatgttcaaaattggtccctcgatttttacttgatttctagagcaaaagaaataattttaaagcaacaaaaaccaaatttgtagttaattaaaatgaaaacctaaaaataaatctctccttctctttaggccatttccggcccaaagctcttagttgctctttcggcccgccaccggggtcctcttctctctctcctccttctcgggccaacctcctcttaaataaatactctctccgtttcacaacgtaagtcatatatatatctagattcattaacatcaatataaatatgggaaatgctagaataacttacattgtgaaacggaggaagtagctacttgttggttttacaacgccgtaatcttgttttgggtttttttttcttgtaactttccttgtaagtatttttttatgcttttgtaaaattacactattgggttaggcctggtagtattccctaaaaaagttttttttgttttttaagttaattaattaaacttgttcaatataccggataaaaaaatcccttttttctttgttaacatcaattccacatggacgcaatatatagtctgccggcctaatgaagcgatcaaacctccagactccaaagtccaaactcacctacggcctagctttgacagctacgtatcctatacgaaccatctcattattatgggaaactactctaaactcgttgttatgaattttttttaaaaaaaatagattaatacgtgttaaattattatactaacatgcaagatcaaattctatttctatttctatgagttgcaactgaaaaaaatttgactacaaatatacgttaactagatattatttaatttgtctttttcgttgcaacttatagaattcaaattttaccttgtatgtgtatagagtgatttatcgtatattaacaatttatcttgttattttttaaaaaaaatcataatcatttgaatcatatgtaaataaggattgagaatttagaatccccttaccattattaccagcacatcaacgcccgtgctgccgcacgctgagcaccgtgcacgagcgcatcgttccgacgttccctttctttcgtcgtggactccggctactcctccgctgccgccgccgccggcggaatgcacgtcgtgatctgcccattgctcgccttcggccacctgcttccgtgcctcgacctcgcccagcgcctggcgtgtggccaccgcgtgtcgttcgtctcaacgccgcggaacatatcccgcctccctccggtgcgcccctcgctcgcgccgctcgtctccttcgtggcgttgccgctcccgcgcgtcgaggggctccccaacggcgccgagtctacccacaacgtccctcacgacaggccagacatggtcgagctccacctgagagcttttgacgggcttgccgcgcccttctcggagttcttgggcaccgcctgcgccgactgggtcatgccgacgtcgtccgcacctaggcaaacactaagttctaacatccacgtgaaccattcatgagatggaagaagagaggcagaaccattgaagacatacgcacatgatagaattgcagagaaactcgtcccgcccaggcaccccggcgcccagcggtcgcctcctttgcccaatcactcctcattcgaacacgctcgagcgcgctgcagagaagctcgtccgctcctcgcgccaaaacgcgcgagctcggtcccttctcgcctttacctcccctccccttccttatcgcgacgtttttcggtctctgcttggtctgcaaatgggccgaaagcagctgaacatcgcgcatgagacgaatgggaggaggacaggaacgcttccactgaacttgtgccgttggatgtggaagcaacggcgatgcggaaagctacgtccctctgacgtagaatttaatacgtcgcgcagtaatgaagcaatcagcccgatcggagcaagcttggtaaacctccaaagtatacaaagtccaaacccacgggcggtactgcccatcgcatcatcaggcgtccgggcggtattcatcggtcgcgcccgcacatcgacgcccacgccgccgcacgctaaacccgcccgctcggccgctccacgcgcgcaccggcccccttcttccgtcatggactccggctactcctcctcctacgccgccgccgccgggatgcacgtcgtgatctgcccgtggctcgccttcggccacctgctcccgtgcctcgacctcgcccagcgcctcgcgtcgcggggccaccgcgtgtcgttcgtctccacgccgcggaacatatcccgcctcccgccggtgcgccccgcgctcgcgccgctcgtcgccttcgtggcgctgccgctcccgcgcgtcgaggggctccccgacggcgccgagtccaccaacgacgtcccccacgacaggccggacatggtcgagctccaccggagggccttcgacgggctcgccgcgcccttctcggagttcttgggcaccgcgtgcgccgactgggtcatcgtcgacgtcttccaccactgggccgcagccgccgctctcgagcacaaggttgcaccaagtcctactaatagctcaatctttgcactaaccttaattacataattccatcattgatgctacgttattcgccttaggtgccatgtgcaatgatgttgttgggctctgcacatatgatcgcttccatagcagacagacggctcgagcgcgcggagacagagtcgcctgcggctgccgggcagggacgcccagcggcggcgccaacgttcgaggtggcgaggatgaagttgatacgaaccaaaggctcatcgggaatgtccctcgccgagcgcttctccttgacgctctcgaggagcagcctcgtcgtcgggcggagctgcgtggagttcgagccggagaccgtcccgctcctgtcgacgctccgcggtaagcctattaccttccttggccttatgccgccgttgcatgaaggccgccgcgaggacggcgaggatgccaccgtccgctggctcgacgcgcagccggccaagtccgtcgtgtacgtcgcgctaggcagcgaggtgccactgggagtggagaaggtccacgagctcgcgctcgggctggagctcgccgggacgcgcttcctctgggctcttaggaagcccactggcgtctccgacgccgacctcctccccgccggcttcgaggagcgcacgcgcggccgcggcgtcgtggcgacgagatgggttcctcagatgagcatactggcgcacgccgccgtgggcgcgttcctgacccactgcggctggaactcgaccatcgaggggctcatgttcggccacccgcttatcatgctgccgatcttcggcgaccagggaccgaacgcgcggctaatcgaggcgaagaacgccggattgcaggtggcaagaaacgacggcgatggatcgttcgaccgagaaggcgtcgcggcggcgattcgtgcagtcgcggtggaggaagaaagcagcaaagtgtttcaagccaaagccaagaagctgcaggagatcgtcgcggacatggcctgccatgagaggtacatcgacggattcattcagcaattgagatcttacaaggattgaagcatctcaggatgtacacctgcaacagtgcaactacaaaatccttggaataaaatgatttttgttttgtagtccacttacccaaaatatgcaaaggccgaacggtggggaaaattctaatcctgatttttttttcatttttgtttttctttgttatttatcaatttgataccgcccagacaaagttgaaatttaattgtaaaactttttatagtacatggaacacgcacaacatactcatttcctgtagagtaatgctccggtgcaatctacttgcagtattctactccgagtagaattaatctcgaccgtttattttaaagggcaggtaagtaatctcctaatatcgtttaggggtaattttggtttgggatgttttcttcggttcgcatcgcatcaggtccggactccgtcgcatgcagacacctcgctattcctcccccggcctcgccgccttgtccgccccctccgtcaccgtctgtatcccccgccgtcgccgccttgtccgcctcctcagtcgcatcgtccgtctaggagcggacgagcgtggcagcgtccgagcgagcgacgatcttgagcaggagttctggtggtagtaaaaattctggcatgggcttcggcggcggcatcacgcacgcacgcaacgtcatttgcgtggcggcatcgtctcagctcattcgtcttcttgtcgttccgattgtttcatggattacatggatcgattaagatcttgcacgaccaactccgacgaggatgacatggtgattgatctatggattggaaaacgataatacccctacgcgaattatttttcctggatgaaaacacccctccacatttctacttccactaattctggtgggagtagaactagatctcagccctacaattaaatatgatcaagggcccaaattactttctactccgagtagaaaacaccggagtaggactgtttcctgtatgtgaaacttttttcgagattttccaaagaaaacattcattattcattatctggcatctcggagagggcgagaggcaagcatgatgcaagtgtaccatgctaataatactgtacttaggagactactgactactccacgcgggcgtcagtcgtcaaagttcataaatagccggcagcggaacgtctgattctttaattggtggagaacttaactttgcactcagcttgacaaattgtacaggcaagatatcaagatcacgggctttttcatctccaaacgatcacaatcttaacttaaacaaaccagggtggaaggtaggcaaagaagaaaagtacaaagttgcattgtgaagttgcagtaaaaaaatgtcggatgacatgcagatacagcaaatgcttgacttcctcggtggcggtgccggcctgccggcttaactaaagtagttccttccctgattggatctttcaaagtctccacgactccaaagtgcaaacatatatttgagcggttcagcccgtgctaaactggaaactgttttttggatggacgcccacctatttattacatatcaactaaacagttataatttttttaaaaaaaacaagatagattaatatgtaatatatcattcgacaaacatgcaaattcaaaatcgacttctataaattgtagcgaaaataacaaatttaattgtgaattaatttgttatttaattgacatgttagagtttaatacatatactagttagagtttaatttgttgtttttgttacagtttagaaaagttaaatttgaacttgtattttttggagtgatatattacatactaatctatattatcgttttttttaatttttttataactatttagttaacatgaaatgggtggacgttcatttaagatattagaatccatcttcatcccgcgtctgctcgatgatatccatgttcttgaaatagaatccagattgctctacctctgccttgcgtgttacaggaagaaagctgctatacgttcgaccgacgcgtacgactcaacggcggaatacacgacgtgagccagcagcccagcactgacttggttatatggtttgctgctcccactgtcccacagtcccacataatccacgtggaagcacatcaaagctcatatataaagcccaaacttcaggcatggaaaattaaatcaaacaaaaccgttgatgtagatgtttgtaaaaaaaaaaagagagatgaaaaatttagaggagaaagggaggagactaacaaagttcagcggcgaggtaggcgaagctgcgaggcagccgcccggtcccctccccactcgcggctacctggcacctctccgacctggcgtggcggcggcggctcccagctagctccggcctggcgcgggcgagggaggcgaagctgcgaggcggccgcctagtcccctccccactcgcggcggcctggcgcctctccggcctggtgtggcggcggcctggcgcgggcgaggaaggcgaagcggcaaggcggcgatgcgaccacgagggatttgggcgtcgggcggcaggaaacggagagcgtgggctgaaaacggaggctgcaggtgggccggcgcagcagaccgttcgattagatttcaacgctccagatcgctccaatgtcacaccatgccatgccataacaatgtcactgaatttgaatccctaccacacggtcatcaccgccggcgacagctattccttgcttgcgctgaggtctgctcgtcgtcgtgtgtgttcatgtagggaaaaggaggatgtaggaacactcagaaaagtaagaatggaaaaggaataggaggcgctgacatgtggatcctacatgttgattcagcatgttagactaagtcaatgagccatgtcagcaagaatcgctttcaaaaccaccgagtgattttgtatcagttttaacaatttggggttcaagatatacggttaaaggttacaaattagattagacctatatttgagggagtcaaagtggacttattctcacctagcaacacttgagtttcccaactcaatcctctcgttttctacgtgcacgtttttcaaactgctaaatgatgtattttttgcaaaaaaaaaaacctatacgaaagttgctttcaaaattatattgatccatttttagaaagaaaataactaatacttatttaatcacgcgctaatggaccgctccattttatgtgcaggaggatttgttcccaactgcatctaccgaatgcatccttattttgacaggtaaccaggaaggcaacaggcccggcctgctcctggccagcatgttagactaagtcaatgagccatgtcagtaagaatcgctttcaaaaccaccgagtgattttgtatcggttttaacaatttggggttcaagatatacgattaaaggatacaaattagattggacctatatttgagggagtcaaagtggacttattctcacctagcaacacttgagtttcccaagtcaatcctctcattttctacgtgcacgtttttcaaactgctaaatgatgcatttttttgcaaaaaaaaacctatacgaaagttgctttaaaaattatattaatccatttttagaaagaaaataacaaatacttatttaatcacgcgctaatggaccgctccattttgtatgcaggaggatttgttcccaactgcatctaccgaatgcagccttattttgacaggtaaccaggaaggcagcaggcccggcctgctcctggcccaaaactcgttgtcctaataccttcacgggccggacttgggcacggattttcggcccgtacaaaatgggcttttcttctacgcggcccgatcagacccggcccattcccaggtctgccgcggggaaatcgccttcgggcttcggcccctttgcacttttgcagaggagcaaagcttacaatagggcaacccaaaccaaaccctggccaaccccacctccaaccccccgcgcagccgaaggaatcctcgacggcgacgacgatggccgccgcgacggagaagacggccgaggagatccgccgcgagctccaggagctccagcgccagcaccgcgaggtcggtttctctccctctctccctcccctgagagaccaccctgtactcagcacgatctcctctccccgtgcgcagatcagcgagcgcctccgagacccccgcggcctccgccgcggcgcgcccgccgctgcaggacccggcgggccccgcccacttcgcggattccctagaccagtacggcgtcgcgattgcgtctcctcttccctttccctttattttgtattcgtgatttgatttatttccgtgttcttgtgttgcaaggctgtggatttggtggaccagtctgcgcctaagcggaggattctatctgcagtggttaaagtatccgcctaggctttggttttttattttccttagtcaaacttgtggtttgtttgtcgataaccctaatattctgtgcatttgtttggtgtcatgaatggaggtggaggatactgaagctaaggaggatgtcaagaaggaagcggaggcagaggggccggagggcggttcggctgctgctgaaggcggtgagaggagggatggtgggttcaggagggatgggagccagcgcatgccgaggagggtgagtaggctggaactataggggattgcgggttgagtttgcttaactgtattgttttggttgcaggagtttgatatgtcattgccagaacctctcccgagggaatttcccaaggatgaggatcaaagccttgtgaagaggaacaagaggatgctggggaagcttcttgtcggtacattagaggtaaccgattcaatagacatacaaaggaacaatccatgggtcaagcgataataagatatcaacagttttcagtgtttcctctccaactgatacacacaaaagaaaattttcagtatttgttaactagctttatcttgggtatggcaacctgtcaattaggtaggaatttaatggaagtactagtggcaagccacccttagtccccttcattgtgaatatttcaaatcagtgtaattgatttttccttgtgcttggtaatccagaaatttcagcaagaggacaaaaaactgtccaacacagaggcttatatgcgcagatcagaggttcagcgaaaggtactaacaatttctcttggtcttgggccaatctacatttaagcatgatttagtggctgatgtcagttgcatccactttattcacatgatgacatgtgctaattagaaatttgattttcatacatggaattatgaatgtaatattgctgttggaatttaactattgtgtcccgtgccatgacccatgaatgaaccaaacgatctcaataaaacacatacatcaacagaaaacgtcttgtctcctgatactacatcaatgaaatttagataagtagaatgcatttttcaagcagtgttatgtttttctgttcctgtggtcctgaaaatatctattcccataggaactatctagcgcacattcactttatacaactacctttttgttgctatatgcattgccctagtagaactttggacagtaccatgagttgaatggaccgtgttaaattctttttattaccattcttttgctggacttaggctaagtgatcttccattattgagatatcgatttcattctctagggtctcagttctttctttcaaagtaatctcgcatatactatggtctagccttgattttattctcgctattaggtctgatgtagcatggaatattgaaaaagattgcgtgaatgtaggctgatcaaaaggctcgtgaggaaagtgaaaggttgcggcagcaagagcgagagcaagcaatagagaagcgtaagcgtgatatggtaagctcacatcagtgtttatgacttgcatttatttatgattggttcacctgagttaaattgatgagtttatgttgcaaatggtttcctgatatgctcttgaatagatgctgcgtgctcgagtagctgctaaggcagaagaaaagaggttggagctgttatacatgcagtgggctgagcatcacaaaaagctgtccaatttcttaaggtcgctttacttctttgcatcattctgcacctttttttatccatgaatggggtccctttttgtttccttttgttgtgccactttgcaatatttttatctgtatttatcttactcttttatgaactggtcttattgtgtgctgcaggttatttttattcctggtccaaaagtatccatattgacaattaaattgagggaagatgcgtttctgattgtgcaaatcttgatgtttgatgttcataggggtttctatatccattttgctaaattacacattagtatctttttgaacattattgttgtttgtcaggacaactgcggaaccaccaatttactacatgccagctaaaccaataattgatgatccggctattgctgaggagaacaaggaaaaggtattttctgccctatataagtcaaagtaaaaacgctaagtttacaaatttttgaaggatgaattgcgaccctttatacacacctccatctacatgcaacttgggaggcagaacactacagatgtacacaatgaggacaaacttgtgcctactacaaataataaattgtctattttgctgctgtagtatttgtgtggcatagctaatttcatcatagggcaccatcagaatgccagttgcctgcatatatccagtcctgttggtttctgctctgtcatggttcaatcaaacatcaaataagtacaacggctaactgatcagccagctatgaaattgctgcccccctcccccgcattatgattattttggtgacatgatataaaatcttaccaaaaaatgcatatcgaatcagtaagatttctgggcacttgaaagtacgtggtcagtgctatgaatttgtcatattttacaaagctttatacttgaaagtgctctggtggtttgggtgggactggctgtattcgataactgtgcatcaatgctcttcctttgcatgtatggagcatattgatctaacctttcacgggatagtccttggtcaagtgcaacatattaagagaatgccacttccgcaagtcaatactcatctttcacattttgccatttacatcatatgcttgctagtttcctgggcttccttttttgtacaatctggggcaaccgatttttctttgtcctcttcatccatcatgaactcatattcaatgttgcaggcatttcaagaatggaaatctgaacgcagggctgagctaactcagtttcaaaagcaagtcgaagaacagtacatgtctaatgttgagaggcagttggaaaggatgcagaatgcgcggaatgcacggaggggtaatggtccttcaaacatgcaagaaatggacaaggagctggacacgcacagggcggagcatggtccaaaaactcgacgagttcttgagggtggcaatgacgatgaggatgatatggacgatatggccgtggaagatgagctgatggatgaagtccttggcattaacgagccaatcagcgatgagcaaaccaagccgtctgaagaagctgctgatggtgttccggtgtctgaggaagtgcaataggtaatttgttttgtattgttgcgaggtaggcatctaggagttccacatttgatatccttcagctgccctcattttctgacgcttgttgtatgtctgttgacgcttgagattttccccgctgttatcaagccatatattgttgcgggatgtattgccgttgagcgatatactctgttaatcattgcatcctttgcgtttctagtataaatcgagcaatttactgatgaatgttggcttgcccagcgacaggggttatcaaactgtcttaagattaccatgatggttgacatacgaaagtttagaactattttctgaaaaaaaaaatcacagttgaactgaaattcgttggagcttaataagaagcttgccgactgtaaagtaattccaatgggggtatatgttaattctttacaagaagatctagatgtgtggccgcatcgctgctatttattgttcagtctcgctcagggaaagccttctccaagaaacttgcaatatctatttactgttcaatcttgctcggggaaaaccttctccaagaaacttataaatcgtc

SEQ ID NO: 5800 - DNA, 4049 bp, Oryza sativa
tcctgcagccctcccctcgctctaatcttcttcccctcaacccgctccaaaattcccccgcctcccactccaaaaccgaaaaaaatcccgcgcggccgcgtgaagccgtgaatctactcctcccttcctccgcgcccgcgcgtcgccatgaatccgcaggcggagggcgatgcggcggcggcggcggcggtgctgggggcggacccggcggggctgacggcgctgctgggggacctgacgtcgccggcgaacgaggcgaggtcgagggcggaggggatgttccacgcgctcagggcgtcccacccggacgcgctcgcgctccgcctcgcgcacctgctgctctccccggcgcacccctccgcgcccatggcggccgtgctcctgcgccgcctcatctccccggggtcgcaggcgttcgtctacccggggctctcccccgccacgcagtcctcgctccgcgcgctcctcctctccgcggcgtccgcgacggggctctccaagtccatctcgaagaagctctccgacgccgtcgccgagctcgcgtccttcctgctgccgtccaacgcgtggcccgacctcctcaccttcctctacaagtccatcgcctccccatcctcgcctccggcgctgcaggagtcggcgctcaacatcctagcccggctggcctcccatctcgccgcgggcttccccaacctccacgccctcctcctctccgcgctctcgcacccgtcgtccgcagatgtccgcgtcgcggggctcaacgccgctatcagcctcatacagtctctcccctctgccgccgaccgtgaccagtttcaggatctcctcccagccatgatgcgcgccctcgctgaatcgctcaactgtgggaacgagggctctgcacaggaggcgcttgagatgatgatcgagcttgcaggtgcagaaccacggtttctccgccgccagctgcctgacgtggttggttctatgttgcaaattgctgaagcccctggattagaggatggtacgcgacaccttgctgtcgagtttgttgttacccttgctgaggcaagggagcgcgcgcccgggatgatgagaaagctgccacggtatgtgggccggctatttgcggtgctcatgacaatgctgctcgatgtccaggatgaacctgcgtggcatgcagcggtgtcggaagaagaggatgctggggagactgggagctatgttttcgcacaggaatgtcttgatcggcttgcgattgctgttggtgggaatacgattttacctgtggcagctgagttgctcccatcattttttgcttctgaagagtggaagagacgacatgcggcactggttacgatagcgcagattgcagagggctgtgctagagtaatgattaagaatctggagcaggtagttggtatggtgctgaattccttccgggatccttatcctcgggtgagatgggcagctatcaatgcaattgggcagctttcgacggacctggggcctgagttgcaaaataaactgcaccatgttgtcctgcctgcattggcttcatccatggatgatttccagaacccgcgcgtacaggcaagttattattgaggatttacacttaagtcatctgctgcacttctttcaatattcgttatcgtattttatagtgtaaactataaagcattggtggccctgtaacccacaagtatcaggctcagaggaacttggaagttaaaaagatattatcttgacatatatgcattctaaggaatgagtagaaattgctggaaactaaaaattatatttaaagagaagttcgtagactgattaaggtctaatgctcaaagctgtcgtacttttaatagaatagtacatggaaattttctcaattatattacatatgtatcagtaaggaatgggtctatttaacccctcaactatcgtgttggtctaatttcaactctccagttatgcaagtatgcaaccttgtaaaacacaattcttgaatatcaatacccaacaatctacaaccctcaacctcaccctagttgtttgatgtttgaagtaccatacaatgtgagtgattatgctagcctatgtgcacaggttattgtcgtgatcaagtttcatgatgcaatgatttagagaggtttgatgagactgctattaatgcctaaattgtttgtagtgtgtcctcatctgagatcacaactggttacacgtttttttagttagtggccattagtttgtgccacttgctttttctttgacatatacttacaattgacttgtcattaatacccatcaagttatcagctagacatgctctaatcattgttttatattccgaatgagttcaggcacacgcagcttctgcgattctaaacttcagcgaaaactgcaggcctgatattttgacaccatacttggatgggatagttgggaaactactgtcattgcttcaggtaatccttgcatttgatcatggagccttcattttgtgcagcataaacatgaaccttttcggaaattttgtttgttttctgatagactggaaaccaaatggtgcaagaaggtgctttaactgctttagcatcagctgcagattcttctcaggtacaagaggaaatatttttgaaggttttcgggccagcattcttgctcaaagttttgcaatcttattgtttcaggaacacttccaaaaatattatgatgcagtcatgccatatctcaagtctatactcatgaatgcaactgacaaatcaaatagaatgttgcgggccaaatcgatggaatgcattagcttagttggtatggctgttggaaagcaaaaatttaaggatgatgctaagcaggtaataatttgctagttgctctgatacattgtaatacgtttgaagaaaatgtcaaagcacactgtataaatgttatttatgacttgttctgattgtattgctgatgggcttatttgaatgctgtttgctgaattcgttgtttctttggctaacatatttctcttgctaggtgatggaagttttgatgacattgcaaggatctcagatggaggctgatgaccctataacaagttacatgctgcaagtatgttgtagcttaaatactattgccattttatgccatcactagtttgcttcagttttgcttattctaattgcattttctaggcatgggcgagattgtgtaaatgccttggtcaggacttcttaccatacatgaatgttgttatgcctcctctgctccagtctgctcagcttaaaccagatgtgagtgtcacatctgctgggccagaagatgaaaatggtgaatctgatgatgaggggtacgtttttgttacgctggcaacttaccataatgttgtcacattcccatgatagaatattgaaattgatgaattgttatcattgtaggcatgatattagtttgttgccctgtttcaaatttgcatgtatttgtcagatccataacagagcatttaatttgaatgttgatatcctgttgttgtctgattctatgatcttatgatatctgtaaaattttgtgttttacctggctgcctgcataaaatgcagtgttgagactattacgctaggagacaagagaattggcatccgaaccagtctgctggaggaaaaagcaacggcatgtaatatgctatgttgttatgctgatgagctcaaggaagggtttttcccatggattgatcaggttatgttacgattttttgtgaactctatgtgtacacgcacgcgcctatgtgaagagctccagctgaaccttgaatctgtacaggttgcaactactctggttcctctcctcaaattctattttcatgaagaagttaggaaggcagccgtttcaggtctgcaactacccttttcagtgtattctccattatttttagcatttttctcaaagtgacattgtgttatctccctagcaatgcctgagcttctacgttcagcgaagttggcaatagagaagagccatcgcaaggtcgggatgaatcttatcttaagcaactgtctgattacatagttccagctcttgta

SEQ ID NO: 5801 - DNA, 36594 bp, Oryza sativa
tgacaccccaccccctaaattttttgtttaagtacgtgaacctacataagtgcaggatgtagggaaatacatatctccacgccaatcattggatttataggtatgtaatgtgcattctttgccaatgattagagagctccatcatcagtgtcaaagtgataaaccatatctaactgtcgggaaacttgtaggaatataggaggatagtaaggtaaattaaacttctctcttggatcagttgagacttgagagtagggcaaacctagacacaagaggcaactcaacagggatgagtggcccgaacaagcagcctttttttcttccacttataaacttttttttgaaagatttttgtccacttatctcagttctagtcactccctcctaaattttactatcttcttttcaaaatataagaaaaattttccccgttaaccattacttaggtaaaatccattatattctctgatggacgtagtacatataatataaaaaataaattaatactattaagcagatttctatactggtaatgtatttgttcacttgcatccatgtaaaaaggacacaaatattagggaatgatctaatatcaaataattagaagggtgaggtttcgaatacagatcgtctagcccaccaccttgtgaagctagccggaaaactccggggcgtttctctacatccctgtaaattaatcaacgcctggtagatcaaacacatttacgagtgggagaggacagaggaacaagacggtaaatgtgatcgcgctatttattgggtacattgatcccatctatcgattgtaatcagatgactgtggcctcatcgtttcgcctcatcgtttcgcttatacttatacttatcagtcaaaacttaaattttcaaccttaaatttaaaactgattttgaggttttttcattgaagtttatttttcagtctttgcttttaaatcactaagaacacgtatataaaagttttattcacaaattacttttttatttacaaatataccgtttcgcttttcgtttccacaatttgttgcggcggattccatatttccacggacccacgttgttgacagatgggtattctcctctccagggtcaaacaccgtaccggcgtaccacacaccacgaaccccgtttatctactacttccaccatctcattttaagtgtagccatgattttccgtgcacaattttgaccgtccatcttatttaaaaaatttgtaaaaaaaatttaaaaacataagtactatttatattttatcatctcataacaataaaattataaattataaaaatattttaaataagatggataattaaagttggataccaaaacttatggttatactccctccggttccataataattgacgttttggataaggttgaggtcaaacttttataactttgaccattaataactttaaaaatatttagtttgaagaaactagaacaacatatatagatttgtcttttaaagcactataataaaagtaaacatgcatttatttattatatatatattaataaaaaaagatcaaaaatatattttatagtccgtgacattgtttaaaacgttactacctccatcccaaaatgtagctatttctagcacagtactttgtcccaaaatgaagctatttttctacctaccttctcctctcaaccaatcacaaccattctttttcacctactttctcttttcaaccaatcgcacacattcttcaatcattctcacttactttcttaatacccgtgccaacctcaaaaatacttacattttgggacgggggaagtaattaaagagtaaagtctatcaccggtccctaaacttatatcgttgtgtcatcccggtccctaaactcgcaaatcgaccgttcaagtccttaaaattgttcaactgtgtcatcccggtccttaaacttgcagatcactcgtttaggtcctccaacttgttcagctgtgtcactccggtccctaaacttggatttgaatatcatctgggtcaaataggacggtctaaatattttatatttaaaaataattcataactttttcatgtgaactctaatgaagataaactttatatcaaacttgtagcccgcgacacgatctacaactttgtagttgaatttttttttattttaagtcatttttttcccaaaatgtaattttaaaattaaaattacaaaatctataaatatgcaataatattttgggaccctaaacagttttaattcaaaaacttttcaactacaaagttgtaggtcgcgtcgagagctacaattttgatataaagtttgtcttcattagagttaacatgaaaaagttatgaattattttttgatataaagtttttagaccgtcctgtttagggaccggggtgacataactgaacaagttggaggacctaaacgagtgatctgtatgtttagagaccggaatgataccgtcgaacaagtttgaggacctaaacggtcgatttgcaagtttagggatcagaatgacatagtggtataagtttagagaccggtgatgaattttactcttaattaaaatgaaaccgaagcgagtactatttaaaatgtgacggaggggcagtactccagtacatgcacagagccacagattccacggaaaaggtggcgccaccgccacctaacctggccgacaggcgtgaactggccatcatttcccggcccccaccctgccccggcacatcacgcgcccccacgcgattatcactcgcacccatctcatcaccgagtcaccggcaccggtcgcggacgcgtcgatcggtcccgaatactccctccgtaaaaaaaaaataaataaataaatcctggtttccgtgtccaattttaactgtccgtcttatataaaatttttttataatttgtatttttattattgttagatgataaaatataattaatattttatacgtgacttgtctttttaaatttttttataattttttcaaataagacggacagtcaaacattagatacggaaaccaggttttgtcttttttttttttttcgaacggagggactcggccgcgcgcgcactgccaaacctccccacgtctccgataggggagacgagacgagattccatcgcgcgctcgcgacgctccgctccccggtgcccggtccccatcaccgacaatcattgagacacgcacatgcagctaccgctgcagcgctgctatatactcccaatagttggccactgtgcgtgcgtggctgcgtgtgcttgcgctactgcttggtctcactgtgtgaacaactgctgccgccgcctgccggcggtgtgctccggccgcgcgcggtcgtgatggctgcacggcgagcgaactgcgcgctggtgctggtgctggcgctcgcgctgttggcggcgcgggatgctggtgccgcggcggtgcccaagcccaactggctgggcgggctgagccgcgccgcgttccccaagcggttcgtgttcgggacggccacgtccgcgtaccaggtcgagggcatggcggcgtccggcggccgcgggccgtccatctgggacgccttcgcgcacaccccgggtaaaactgcgattagtcgcttgctctactctacttttgctgtcactcagttttaactctgcttcttggcttcgaaactgtgattttcttttttccaaaccgctatggcagtttcggtattcaattacttacagttgcagtacaatacactacttagtgcccaaaaatatatatttcacaaatcacaactgttagtctactatacagcggccccgtttggatccggagggctattaaatagccctccggaatcttgctatttaaaagtattaaacgtaggttaatgacaaaacccattctataacccctaggctattttgcgagacgaatctaacgaggtatattaatccatgatttgctacagtaatgctacagcaatcagccgctaattatggattaatatacatcattagaatcgtctcgcaaaatagactaggggttatggaatcggttttatcggtaatctacgtttaataatcctaaatagcaagatttggaagggctatttaatagctcggaggatccaaacaaggccagcatctgagtaaagtactcaactcaacagccactagatgacagaatggtgacatacggctaaatgattatgacatttgtgaacgacagtgctacaattaagacacagcttgctagaattatgtgccaaattggaatgttgaacagcgaccaattcgatgtggaacgttgaccaatatctgtgcatctttatccttatatactccactacagtggtagctgaatactacttgagttttagtttaaactgacattcttgtagatcttgagccgtcaatcatgtgaattgtgatcaacttgtcaagctcacccataataatatattttttttattttacatttcaatgaacaggaaatgttgcaggaaatcagaatggagatgttgcgacagatcaatatcatcgctataaggtactagtccacagggtttacattaccgtcggtaaccgcgtggttaccgcggttactggccttaccgcggggtacggtaatagaaaaaccacgataacctccttaaattcaaataaatttaaaaaataatttaattttttgataaattttgcacggtttcgtacggtttttcacgattacagcggttaccgcacggtaaccgtgcttaccgccagggcacggtaaacccggccccggcggtttgggaaaccctgctagtacatcacaaagtcctctgcgttggtatgcctggcactaggcataactggttttttttattccatccggtcataaaaagtttgaccaaaccttatcctaaacgtcaaatattttttatcgaatggataaaccaaccatgcaacttttgaaaaaaaaagtagttttgtttggagtcctctagctaatttggtgcttttcctacttttacttccttttggggaggatggggctggggttgtatcttcctttggtaaatagaaagggcatgtgtgcccagatttgtctttcatcagataattgctcccccagatttgctaagtaaatgaaacttctgtacttcaagataacactacagatcacaaaacagctggtataatggcacatctctatgcattaataactgtaaatgctctaaaatatgcgtgtccaaggtcttacattacatgtaagtgtttccattctccattatctaaaaaaaaagtgtatccattctggaacaggaagatgttaatctcatgaaaagtttgaattttgatgcctaccggttttcaatctcatggtccaggatcttcccaggtacattgagtctgactcagattgtagcatgttgccctgataccctgcatcattttttttaatgacaatttgttactgccaaatatgcgcctttggtgtacctagatggtgagggacgagttaaccaagaaggcgtagcatattacaacaatcttataaactaccttctgcagaaaggtaccgcttgatctcatacttgaatcccctgcaaaagaaaaagatctcatacttgaaactttcaaacttccatggaaactgagtgctgtataactaaatatttccttcaaaccaagcaggtatcactccttatgtcaatctttaccactacgatctccctcttgcgcttgagaagaagtacggaggctggttgaatgcaaaaatggcgtaagtcaaattagtaatttatcctagctttttgtctgttaatctattagaactctcgtcatttgttggttattgacttattttagacttggttttaaacatagaagcacacatgataagtatgaatgcttgggacaaaattatcagtttcttaacacaaaaattcctgactaaaattggctccaattctagacaaatgacaattattatgaacgtgaaagttctattgttctgtcaaaagaaagctgcactgcattatgattattggtacctgttgtctagctaaatgcagcatcctgtatctctggcatcactagctgtataagtaacactctgaagtctggattatcttcatactacttgttctgtagggatctattcacggagtacgcggacttctgtttcaagacctttggcaatcgtgtcaagcactggtttacatttaatgagccaaggatagtagcacttcttggttatgaccaaggaacaaatcctcctaaaaggtgcacaaaatgcgctgctggtgggaactcagcaacagaaccatacattgttgctcataattttctcttatcacatgctgcagctgttgcaagataccggactaagtatcaggtattttttctcgacttgttttttagataatttaagctttattgaactcagtcaattacatcaaagtgatacaatcatactaagaacacttctgacctctgcacaacaaagatgcacacaaccaaaacacccacccacatactagtttgaaaagaaagaaaaaaaacagacaattaagggccaactgtttttttttaacggatatctcctactggccagtctaaatttgggaaatataatttcaaaaatgtaggcagctcagcaaggcaaagttggaatagttctggacttcaattggtatgaagctctttccaactcaactgaagaccaagcagcggctcaaagagccagggacttccacattggttggtaagaccataaagaatatcctctcagaaagcctattttttttagataatggaagctttattaatctcagtaaattctatcgagcttcattgaaaaagaattatcattgttaggattgctaacggttgcaatggtccaggtatcttgatccattgataaatggacattacccgcagataatgcaagatcttgtgaaagataggctgcccaagttcactcctgaacaagctagattggtcaagggctcggctgactatattggcatcaaccaatacacagctagctacatgaagggccagcaattgatgcagcagacaccgacgagttactcagccgattggcaggttacctatgtttgtgagttccttgcctcgcctcgccttgcgcttgtacatcagtatcgttgctagacatattctcctaaatattttatcccctaaattctgcagttgcgaaaaacggcaaaccaattggaccacaggtatgcagtaatcagttgtatccttctccagcttcagattcttctagcactgcattctactgacgtgaccaaactgataaattcagaagtaacataactcataaaacctttgttgatccatcgatctttacaggcaaattctaattggctttacatcgtgccatgggggatgtacggatgtgtgaactacatcaagcagaagtacgggaatccgacagtcgtcataactgaaaacggtagctctgaacttctcccatatccctccattcgattttccgctccatattgcacaatctgcgtgtaatccagaagtgatgaacatatcaacatattccatcttgtcatcaggaatggatcaacctgcgaacctcagccgcgaccagtacttgcgcgacaccacgagggttcatttctacaggagctacctcacccagctgaagaaggccatcgacgagggcgccaatgtggctggctacttcgcctggtctctcctggacaacttcgagtggctgtcaggttacacgtccaagtttggtatcgtctacgtcgacttcaacacgctcgagcgccaccccaaggcgtcggcctactggttcagggacatgctaaagcactgagaatgaaagacacgcagactgaagttgaagttgccatccattgatcatcatgttcagttctaggctgccgcttggatggcatcagagctggctatgaactatgtgatggaaataaaaggactgcaaattgattcgattatgcaattcgtgtctatgatcagaattgtggccgtctagtgaacttgtagaagtgtactcttgatgtgtgatcgatcttgagtaatcaatgtttgatcagatttcgccttataatttattagttgatgagatttggcttggtgattttataggaaactgttgtttgaagcgataggtttttgtattaaaaaaaaaggagttatttagccagttttctatgcaaaaattgaactgatctagcagcaacccaaaattaggcagagcgagtcctaaactacaagcgaaacaagctcattccgcggcaaacgcattgtggggcctcagcaagaaccacgtcgcagcatgcacgaaccgagcacgcgccattgtgcatgccagcctcgaccacacacgtacgcccgcgatcgcaagcacaccaccgcgccatcgcccgcgccgtacgttgccatcgcagcaccgccatggccacggcgcccgtcaagatcgtcgtcctcgccgccgcggtgtccgcggcggtggcgctcagcttcttctaccggttcaggtgcgtccacctgccgacgccgtacgtggccggcggcgggcggcggctgatcgtggtgtcgaaccagcaggaggtcggcgaggagatggacctcgcagacggcaacgtgcagctgctctgccacgggtacggcgagcacgaccacagccggtcggtgtggtcggcgcgcgccgacatccccggcggcgcggcggcgcgcctgtcgctgcccgccgtgcgcggcgacgaggtgttcgaggtgctgtgctcctaccgcggcgccaaccggtgctgggcgcacggcgtgcgcgtgttcgccaacccgggccacgacaacctcttctgctcggagcacgccggcggctgcgaggtgcggttccgcaaggacggcggcgtcgagaagcagtacggctccacctccacgccgctgatattcatgggcttcgtgccggacttcgacaacgccagggacggcgcctgcgcgtcgtcgagctgcgtcggcaggacgatcaacagggtgatcggccaggagagctgctgcgacgattcctgtgggggttgggagaaggcatcgcccaagaaatcatcatgaatccatccatgcaacacatgtagatcagtcggtaattacctgactttttgtatcatgtagatgtaatctaatcatacattaatggataggtaaaaaggacacctgaattgagtctcaatccaatgcaatcttggtacatgacaattcggtaatactagcgttctcttttctttaagaactgacgaacaaaacatagggcttcttttgaagtactccaaaaataaatagtctgtcaaaattcagaacttgtggcagttgcgttcctcagtacatcagcataggcaagggaataataggatctttaatcagagtcttcatagacgccctcatcatcagaaagctcatcaaaagaacgaatgtccagctgatagcgcaagatgccaccgatgccaccaaaacctctgcaaaactgtgacccctcctgggatttgttggtaacgaactcaagtgtgcatccgaactttttgtactcgttagcaaaccactccagaagggatgttttgtcctgaacttctaactcagcattggttgatgtgtcgcggaaattgctctgatcagcttcttgctctttgttcagatgttttattgcagtttctccagtagcactgttcttaagcacatatctgttgacatcaaggttttcccacactatcaatgtctcaacagcacccatttcaagagtcttaagggtgtcatcaacgccaaaaacgtacttcccggtatcttgactaatctcttcaaagtacttcccaatcaactttttctcctgtatgaacttcacattcgctagaatttcagctgataactcaatggcttggttgaaaccattttcaccaccataggaaacatcaacaacattaagtatcttggcttgaagacgctgatcaaacatgtcagattgactcagttctgtcttaaaatcagcagaaccagccaaaattagtccagaaacattaggctgactggtagctggattgatgaagaactgagtagcaagttcagccgtctttcggacatagttatgacgcttttccatccgaagccgagcaaaacgcagagcagattgccctcctcttccatgtttctttgggagatctacagtgaatttgtgaaggatctcacgagtattgccactcagtgtgccgaaaagagttccattaccatccataacaataaagccaaacttgtcatcggattccaagagctcattcaaagcttcggtgtggaatttgttgtcacagagatacaacgatgcattgatgggcttgaatggttcaaaatcaatagtgactttcttttccttgccatcttcagtaacaattgttcctgtgtagaggacgagtccatttggcggaaccttgttgtacagcttcagcctctgttgagctgatgtgatggctgccaaaacagattgtcgattgactctactcttgatgtttgaagcagtaccatattcatcacccagcatcttggtcacacgggagacttgatcacgtgggggcataatcagagagatcatgcttgtgccattgcctctagcagactccagtgccttgatcaacttcttaatcttccaaatctcaatattcttgtcagtttcttgaccatctgacatcttgacaaaattaggatgcttgattcacctgcagaataccaaattcaaatattagtaacaaacccgagagacagaattcagagctgtcaaatacaaggaaataacaaaaaaaaaaggttgatgaattttttttagactagaatacactatctagtgtctagtaaactgatcgtagctgctcccttacaaaacaagagtgctctatccaacgtcatccaagacaaagctattagcttatgaaagttgccacgcaataattcttaacactacaagcgttaaatccaatctgcaatttgtatcaatttttgtgtataatataaatgtagtttgtatttaagtggacataagccacggcaacaagccatggacaatcatacatgactacatgactggcctataaggccataacatgtgctgcttcttcacaagtgaagcatttacgacatggtggttagagcaaccataaatccataggaatggtcgccaatgacttgtgctcacaagaaataagaggaaaaccagttccttaaataaagaataggaaaaatttaaaatcagaactatccatactaactgagttactaggtttaacacaaagaaaataaacaatcatatcaaaatgtggtctgcagcaatcatttacttctagctgaaatagaacagaaaaatcattggtggtagtctctatatttataccaacatataatacagaaacaaaactctctccatacttggatggccattttggaacataggagtaagtcataaacaatcatttctaggtcaattgcatagtatggtaaacacaaaaccaagagttctgggtagacagaaccagaacaaggctgagggtcatccaaataggtttagcgactcaaaccacaattttgtcaggtcacgtcctgtgtcccttactcagttcctagtgatcatgagttgtttggtcatttcatattccgtaccaaaatgggcctttctagttctagtttgcaagcaacatggattagatttttggctggtaaagaattactcatcaaagttaaacctagcacatcaagctattatcaaagaattggaactttagtcaaccaatttagcttgaaaaggacagtaaggacaccatccaaaatggttagtgctgatgatgctaattggacatttgggacaattacaaatcagtggcggatctaacatgggacatggggtttcagttaaacccccaaacttcttgcgaaccatcaagctgttattagtactaaggttgagttaaatttctagaacagaagctagggttaacgcaaattcgagaaaaagtgcgtgggtagagagagagagatgggaaagaggacgtgcgtaacggatgcggcggaagcagcaggaggaacgacggcgaccctatgcgctcgctcgcgcgatggatggggatcgacgcaggcggcggtggcggaggatgtgctcaccaggatggatgcggcggaagcagcaggacgaacgattgcggccttcttcgctcgcgggatggatggggatcggcggaggcacagggggcgggggcgggggcgggggcggcggtgggcaagggcaaactgacgaggggtcagggtaactcacgcacgacagaagagtcaaaatggcgagggtaacttagtaatttctcgcatcaattcacccggattgcacacccatcccatctccaacctagctagacggtcgaaatctgaaaaatgaaaataatatccattcgtcctaatctcatttttcagatggagtctctagtttaacccttgagacggtagattttttttaatagaataagattgagatggtggataaataataaatatgtttggacattgtccaattaggcatggctcaccgaatgagtcgtgttgtgtcgatccacgtggtaaggctggagcctaggcatggtctagtgagatgtcgggttatgttgtgttggcctggcacaattagggtacatgtgttatgtggagaccgcttagcccaaatttgatatataccgagaaaaagaatacgaacagaggctattacatcctactgcacaaactccgatgaagctctagtgaggtcctccgctcaccgatagcatattcctcttcctcctcatcaagcactgtcgtggcccttcactttctacttccttcacaccgagctagtgaacgcctaatgaccaacatgcttagcggttgtgctcacaaatgtggttggccacgccaccacattgtcatgtaggcttacatcgatgagcgtctaccactgcttcctctgcctcgagcccctagcttcttctattcttacattctcctttcttcctagctcctgctcggatggcattatggtagtttctcaattggcggttgttcgccagtcgtcggtcatcatcgtgccgcatggaccatgccatgtcgtgctattcctgggccatgtcgtgctgtctcactacatgcatttgtcatgtaggcatgtcgagccagatagcaatccaagcatggtgtggctagacgggtcgtgccaacgcaacccatacccaaacagatcgtgcgattcctggactgtaaacggcacatgcgtgcctgggcggataagaaaagacctagcccatttgacaacctataggaggatttagcaaactcatagtcgttcctctgtttcttcggatgaaatcaagtaagacaactcagacactccaaaataatttgattagtgttaaattaaagggaactttaaatttttaaaaagatattcccttccatgatagcgattacactccaaccaacactaaacttacatgaggttggatcaaatcgaaccgagctgcaagggagcggagacggagcgggagcgggagcgggagacggagcaagggttttacctagaggtagggtgtgcgagggaagataactatctaggcaggtagacggctctcgtctgacgttccccttcggctacctctagggctgcaaagagagccatattcttccactactacactgcaagtggaataataccaataataacgggacaaaaggaagtggaatggactagtgtctagtggtggcaatggttagatacttttcgattgcagaaattttacagctttaaatctaatttctctaaaattcttcgttccaaaataagtgataacccaaagatggatctccagtatccataacagccgaaagatatgagaccagaagcaaacataagtatccacttcacaagtcagattgtcacaacttctgctacatactctatgtgtctaaaaaaacaatttaggctaggcaagaatgagacatagcatagcataatgaatctggacatgatattattcagatttgttgtattaggtatatcctttcattgtctaggtttttttttttatcggagggagtactttgttcgccgacctgcgaacttgggttctatcacagccacaaatccaacatatgccggtggagaatggaggctgactagccccgtgcaaaagtgcattgcgtagtcaacgtggatttgtggatcgcaatcgttcctttccagcgacaaaacagcacaatttttgagctcacatcgcacccgtccacaatttttgagctcacgtcgcaatcgttcctttccagcgacaaaaacagcacaatactggattcgggtcaacgtggtaacgaaagatacattgatcataggccatagcggcggttcattgataatagcggtagcttatcggaaggtaggaattttacagcaatcggtgaaattatcgtcgagatgagatattcagatacacccatggtgcttgctgtagtacagagacggaaaatggaacaaaatatccagaaacggaaacaaaactgcaatacaaattagcatctataaaatgctttacatcgtctatggtctgctaaacattttcaatatgctgggttaataagcaatatatatctaacgcaactaccaaattgatcccaagtactggtcaaacatttgaccctatccctgcacttttctctacttcatctccaggtgtctggccaatacacattcagttccaactagcaaaatataccaaggtgaatgcaggactattcaccagagcttctaatatggctatagtttatcatcctaatacctctttcagactccccaggaggaaagctggttaatctggggcaaagtttgctccctcaactaactcaaaacttcagaaaatgatggtcatctgctattgaagctgccagtttgtgtccgggtaacataggagaggcgtgaagaaggaatcaaaggggcttcttcatcaacccctgcaccttctgacgccagacttccaacagtggtttcatcattagaatccatgaaattgtcaggcttgtatatgtttgaaatcttcttatcctgcaaaaagttgaacatttcaacagttatgtgacttgtaagtacaagaaaaatgagcaatcatttggttttgcctattatcaaagttacgccaagtaaagtattaaacaaaattggaagctccaatactatatttacgtggtatctgatttgttgacacgggagaaccaaacttcatggagtaataaaatgttgtggttaggtggacaacgcaacagccacccatatgatacaaattggaactgcaattgctatagtagtggaagctatggtactaaaaggtaaccatttttagacaataacttggtgttgtgtgacaacaacgcaatgcgtaatagcagttttttttatgcaaccgataacaagggcagagacaagcaaagaacaagataagaaagtcataactggaacaatattgtactataaagtagtgatacatcatacatgaaagatctctatggatgaacatgttcaagaggaagaccacaaagaatcaagatatctaaataaagtaagtgcagagaaagtcgtactctgaccttcgtagctctgtcaggagcgatatcagctggaagttggttcgctctgacatctttcatcttcaaataattgtacatgacaacgccagagagagctacacattaaagcaatactaattaagaaggttaatcacaaacaacatatttgaaataaaagtataagcaaatttcacaagccccggatttatgtccctttgtaactcaaaagaacatgttagtatgttacacatgttaacataaccccatgtttatgctatgcaatggaacacaaaaccacaggttaagattatagatatagattctacttctagagaaaattgaatggataattaccaacagcatatccaattatattgaggcttgtaataatagattcaggaaagataatggttgagagggcaatgagtatccagtccttcagaactcctgcgactcggatggtgactgctcctgttcttccaataactagaaagatggatatgttcaatgcaaatgcagcaactgcattaaagaaaaatatccagtagttgaactgaatttgagaaacatccatttctggcttttcaagtaaaaaccaaggaacaaacaggaagatgaaactgcaaaacagaagaatacatataagaaattgcagagagtaaaatggcacaaacattttagtgacatatagaatatgcaaagcttagttgtatggagacaaaaacagtgcataataatcacagaggctacagaagaaaaaccagtgagtgcaaaagttgaggcagcaaatggttgttcctaagtcctaacaaactactttctgcttctcaacaagaaaccacacatataagtcttacagacagatgccataaacctctcgaatgctcttgttgcctaatacatgcaatctaatacgacgaatatacatttcaaatctgttcttttatttattcattcaaacaactgaggttagaaactactacaaatgaagaacagtgttctcttcataaatgtcataggaaaaccaattgtgttataagttttagtgatttttatttacatgtgtacattacaacagcacttgcacaataaagtagcactagcaccatttggttgtacatattatataaatccaagtcattaatatcactaatggaacctcaagaaaatggcagtttacatgttttttataagagcaaactaaaaaattctctttgtttttcgtacaagtattctgtaagactttaagagagaagtcgttatttcattcaacggtagttggttgaaatcatatcaagcaagcaaacttttcagatatagttgcaatacctgcaaggggctatataatataggcttgtgatagggtttagagttaaccccttcttttgaaggaggacctgtgtcagaaccagcctgagggcttccgcaaaaatgcctgttacttggtataatgttcctatgatattaaaatgaatctcgccatatgatgaaactacgacaccaacactgaccaagaccatgttcaagaaaagatcccatcttaatttgtcagtaccacatagaacagccattataaatgttgccacaggcactgcattacaaagtaacacaaatcagtaccagaaatgataaattgatttacagggagtttcatggtaactcactcaaggccttgagcatctgaatgaaggcgactgaaatatacaagtatgctgtgtttccaaacctgtaaaaataatcaaatcaattaaagtattgttagaattttatgcaagggaaactcattcttcatacacatgattcaagataactttacaggagaagtagcaaatttccaaatattcatatacagtaaatgctgtatgggggttaataaaggaaactaatagtatagttcacatactgagataagatactactgtccggtattaacaaaaatagagtttgcatactgtgccccatttgcaaaaataaccaaagtattagaacacattatacacatacagagcatgcatttgttaattcacatcgcaattacacataatacacaaaccattctattcaagttatggtatacatggcaaatagtacacacagaacagctaggtttgaaaacaatctcaatagcaaaaactttatcaattcaaagcaatcaatcaggtcatcataaaatatcaaaactgcaagtatcatgccatttgtgtaatgttgatagtcagctttagatcaatgcatttaacattttaggcctacatatatcacatacatgagtgcatatgctttcaaagccatgctttctcatacaggagataataaagaagtgatcgaggaaaaaaatgaaatgaaagatggttccatatcttgtctatgtttagcttaccaaagacttgacgcgaagaaggcactaattggaatcacacatgtggcatatctgcattaagtgaaagaaatgactaagaatcaaattccacacagtgaatgacaaagttaagtgctcttacatttggaatgtcatcttgactggtgcaacgacctgcatcaccaacatagcaagatgactccattagctcttacaggaaaaaccaaatgacagcaccagacaaactacaaacttaaagcttcaatacagaaactaccttgcctattcttgcataagaacagtttctattcgacaatcaacactttgtatgccatttggttgaaagttacaacaagcaagtaatccagtgtgcatcgaacatggaaggaggtaataggaaaattggcacaaagaagcataccttaaacacacggacaaggaagaacgttacgactccagaaaacgccatgtgaatcattgtaagggtaataggaaagggaaatttgaagtactttggagaaagtacccactgcaaaaataggaaaaatgagagcattaagttcatagtcagcgtggcctctcataattaaacatctacttacatccaagcaagcatatagcaccgcaaaaaaaataatatgcaaagccccagatctgcattatcagcatccatcaccgacattcgtcaaatccgttacgctttgagcccacattatactacagatgacagtgtgctgtaccaagaaccctgattcacctaacaaccctaaaatcctacagaaagcaaagcattgtaatagaccgtccaccaaactaacggatatagcaattaaagtagcactcactcatattgcagttctccaaaccacattagaagtgaagtcgttcaaggagcaaacactacacaaaagacactgcgaacaaaatggacctcagatcatcgcattcctcgatttcttctctagcccagagcaaacgcaaaaaagcaaaagcatacacgcaggtagagcgaatcgcaaccggcatttcgaaggaggagaagccctaccttgttgaacaggatgactcccgacgagaggcagacgtagattagcaggtagaggtaggtcagcacgagctgcctgctgatcatcatcgcccccgcctccggcgcccggttcacctcgcgttcctcctggggttcggttcactcccggggccaggcggcttcggcggccgcggcggagggccggtgcggcggcgagtcggcgcggcggtgggggaggagtggagtgggcgcgcgaaccatagatctgggacgcgtgcggcgcctctctcggattggaagattgggggaggaaggaaggaagggatcgagagggggagggggtcagggggaggactgaaatgagatggtgggagacctggcagggtcttttctgcaaaaagtgggattaattagcgcagtgctgtttcgggcccacatgtctgtcactgatccacgcgtttctaatttattgttttctgcttgactatgcggtggttaggatttagggggataattgtcgtggtttgcaggcctaaaaaattgcgtacgggtttggaattatttttgttttgttttgttttgctccctaccttttgcagcgtgcgatgataacactggatggagtaaaatttcataggttagagtgaatttcacgttgaactctatgtattttgttaccataagtctcaaaatatgaaccgtttaactcatattttcaatttaggccctcctttttttcactttgatttttttttctcaacattgttttcatctagtagacgatgatgattttggcatggcggtggaaacaagagaagaaatgtatccaatttgaaactaaaaggtaagaaaattagatccattgtaaaaaaaatggaataaagggaatccaaggtttcttttaactaaagaaggtcgaaggtgaaatctactctaatttaaatatgcgtgtataagactatcatgacgaaactatataatactccctccatgcacaaaagttacacatattactattgtcacaaagaccaaggagaaattaaattacctttgatgttataaaatcaaagagtgaatgcaagcatgtaatcaatgagtatttagatgactccttggattctaataaaacatttaatttatctcttcatctaagtcttgaatgcatagagactacaaataggaataacttatttggaaaaagtcaaatatgaaataggtctaacttttgtggatggagggagtaccaaataatggattgagcaattaatatttaagtgcccatattcaaccaattttatcatatttttatgggaacataaaactaatacataaaatttctaaaataagtagattttctgtaaatcgattttaagtctataatttgtaatcttatggcttatacatctttagtctgcgaaaagtattttaccttaaaagtttgtgacaaaatcgataaaattttaccaaagtataagcagtttgctatattgttataacttatcccttaagacacgacaacccattttgccaataaacacaagacgcaaagacgtgccaactccacagttgatagtccagatcaaaagttttcagagcacatcatcttccacgtggaaaatccacacatgacaacgccatcaggagatggaagaacatgatttttttttccactgtccgtcaacaatagagtatgtgtcacactgactggactagatactctctgtttcggggtgagaggttgggaacctctcaacgtgcatgtaaaaccagtagcgtagctagaatttaaagtaaatgtggtccatttatatgtaatatgttaattaaaatagtggtcaactatacaatttttattatattaactagcacatatactataattttaaatttttaggtggtccatggaccacgatgccacctagctggctacgccactatgtaaaacaggttacttattaacataacatatgattagttaggtgttatctgaaaaacttaaaatatatattaatataatttttataccaactttcatgtatattttttctaaaaaacacgttatttagtagttcggaaagatatgcacgcgaaaaacaatggaataatggttgggaaatgggaagactcccaacactatcatctggccgagttcggttaccacctctccccaacctttacttcctcattttccgtttacacatttttctaaactgctaaacggagtgttttttttaagtttttttgaaagttattttaaaaatcatgttaatattttattttattttatttaactagtgtttaatttatcaataataaacacttcattttatgagtggggaggtggagtttcaacctccgccctctaacaatagaccagtcggcagagcaactcaccccatttccccttgtaattttcaggtccattctgtactgtagtctgttataaaactagccccaaaatcgacatcggtagctaaacgtggaagaaaacgccataggagatccaaaacgatagcgacaccgaggcacgatatttggtaacggagttcagccgtagcctacatctccggggcactgattacgggcactcctccccgatccagcatatacaacgtatcagagttacaacgactcacggccggtcgccgccggcagccgctccctctcgctatgctaagtcaccatgcggttacaacaggcacggccctctatttatgagagaacctaggatagagtccgactcatactctagtcctaatacctattacaactccaagtcctaaactgtaatcgactatgtacacatattcaacacaaactctaacacagtctgcaggctacagccacacactctggatttggttagtctttgtccttactactagtatgactgaagatattctatatatctatgcttaaggccataataatatatcacttcttcgccgttagctagctaatctacatagactaagtagtgtggtcgttgtcaaacattaattaatcttgtagtcaaaatgtctactttatacaacgtacccaacggagaacggaccatcgagcatcgaatgagggggtgtttgaaccggtagaacatccaaaagagaatctattacgctagagcccttttccgccctcactaggaagttggaacacagaaatttcatgataattttataggatttttatcataatgaattctcgtatttagaggaggccaaagaaagaaccatatgaattattatattaatatatttcaaataggcccaaaaaaataaagcaaattaagagcctaaggttctcttgggagctgggaggtcgcaggtttcatcttttccttaatgtcatagtcatagcactgaacatggtattgtctctaagttgtgattcgtcgacaaaatatgagcagaaacgccggagagaagagagtgagttgcctccccgtgaacaattgaattaagcaagcaaatcaagaaagattattgaccgtccattcaattaataacacataaatcatccaacaaaaagtatttcgaggtaccgatacgttacggtaccaaattgttttcgatcattaaatctaacaatgcacatctatccaattagatctaacgaacgggttacatgaccgaggattagactccatacacaattacacacaagttttccaactaccggaattcgaaccagagcgagagtgcagcagacttgcaaaactaaagaaatcactcctttttataataaaaaaaatcaagaaaaatcactcaaggagtgcaacaaaagtaagcagcagtgacgtcggaagcactggcctccgaatattttaccgtccgactccgactccgactcagaaagggcccaaccgttccacataagctaacgaccgggtaccgccacggcccactcacgtccccccgctctctcgtcgtgttcaagtcgcgagcgcgagtttctccgtaagctacaaggacttgacctgggaacccgcctaattgccactcattaatccttttcttttcctcggtcagtttagagtacggattagtagactgaatccactaacccctagcgctgttgcatattaacaagctcataaattcttagccccatacgcatagaaggagtagtgttgcacgctcgcaccggtgcacgttggtggatcgatcgatctccatggcggcgcttcaccaccaccaccaccaccacagccaccagatcaaggcgccggcgccgacttggctcatcgtgaaggctaccccgccgccgagggacggggccaagaagctggccgcggcggcgtactcgccgctcctgctgtcgccgtccgtgtggcagaaggcgcaggacgccaagaagggcaaggcggacggcggcgacggcgccctcccggcgtcaccgaggatcacctgcatggggcaggtcaaggggaggccgaggagatgctcgggcgcgcgccgcggcgaccgtccggccgcgagggccggtagctcgggtctactggagcggctcacgctggggctgttcgggcggcggcggagggggaggacgtcgtcgcgggcgtgctccaaggtcagggacgtgccgacctgctcgtcggcgcagtcgcgggggaagatttattgcggccgcggcggcgcggcggcggtgtgcacgcttgacccgccgttgccggtggtgatcaggcggcccgcggcggacgacgaagcgccgacgctctgggagaggcggcgcggcggcggcgggaaggccctggagactctccggttaacgtagatcgctggctcgctgcagagttgcgcttggcaaccgcagcccgccggtgagtatattgacagaggaggccaaagacaaggaggcaacggacgacttcagccgaaggctacggatgcggatgctaatttcctaaaaatttgtccataataccatgtatgtttacagtttaatcatttctttttgctaatttgtatagttgtatctacttgtatgttgatcctactgtccattttaaaagtcttgtctctacgatttggaagctcgcccctttttttctccccacatatcttctccatccccttcactaaggcatctcctcccaaggtctctaggacgctcccggtggctctgcctccgaaacactcacgtacttgctcccgccatatcagtcctaccatgggtaggatgttgggagcggcgggctgcaatctaagtgaatcattaagtgtattatcatctctgtcaattctttttctctatagtttctacaaatagattattttgctggtttgctgatttttcctacttcagatacaggaacaaaaaaaaaagaagagatatctttgtttccaaggagatgactgaatcgaacccttccaattgttgtatgggaacacatatttgatattcagactaattgtttcgtatgcttgctggattggcattgaattgttaataccatatcatcattcttgacaagtctttactcatgtgcagcactgacaacacatattcacagtatcaagtcgtccaaattagccatgataaggtacagcatagtttgatttgcatagctccttactgtcagcaaagttgttctattgaatttactttctttttagtgaacctgaaaacgtcgataaggggcaccagccaattgctgattaaatttttgcctttgtaaactcatattcagattttcaatgaatgattcatatcaacctatctggttttctgttattaccacaatatttatgaccattaattcacgatatatattggaaaactatctacttcgcgcttcagtttgacaaattcagaccttattatataagctataatgatgagtaataaagggcaagagctgaaattagcatttctatatcatactataatggaagcactaagaacatatcattcagctttgataataattagaaataaaaacatttgtctaagcgaaagatgttttaaggtgcaagaaagaacatacgcatcctcacaataattcgtcaatttaattcagcaagggacagtgcttctcacttattgagttgaaaaaaaatatatatctagaagtgctaaactcatgctggcctcatgtcaaaatggtgttagttcaatttcaattgttagctgagtcacacaggaggaagcaggctgctcaactcaagatggaggaaaccattcttttgtgcgtgtgacaaatatgtagattctataattagcctcttatttgatcctaccatgggtggaggagattcctatataaaaaacttcagtacagtcacagttgttggaaacagaggcacagctcttccgcaaaaatatgctgattgtggaattcacgaatttttgtttgtctgaatagtgcaaaagaacataaacgagataaaggaaccacttaatttcaaagccattgttaagtctgaacaatattattagtataactttcaatagaaggtcgattatatgttccaaataggacatggaactttgtcaaagagctttgaattgatgacgggttggctgaatactttagcactacatatacatgcaatctctaatgttgtactgattaatctttctacaaattcttgaaaattcaaaaagaaaagtgtcaattgctacttggtgtttttttagcaagcactcttttctgaaagatctacaacacaaaaaggggctctcattcatgaagaaagagcgggacgcactacccttgggttttactgcctctcgtagtcctgcctcaggaacttcaggtattctcctttctccacctccttagcgcatatttgatctgataatattgctgccttgctggtatatatcactgaagtatgtctcctcctacaggagaagaggctgctgcaaaacgtacggcagttccaggtccctctgcagcgttacatggtccttatggaggttcaggtgagctacatacttattgcagctaactaagcaaatatgtcatgttcttcttgtggatgatcagtttgaagaagagaaatgagtggattcactgacagcaagacaactacaacactgccgccaattatcttaaaccaacgatcaggtttaataagagtttctttgattttgagtgtaatagttgactgatttcatcttgcctttttcacttgcaagctcaactaatgctctttgttaaaaccatgtttgatatgtaatggtccacgtatacatgcttcttaaacagacatcttcagtcgcgcaaagtgcgaccgaagatgagatgccctgctctccagaatcaagattatcctgaaatcaactgaatcagactaatgagcatgtggcctttaccgtttggacagcaaaggcgccaatggcctcggtggcgagtgcctgcccgagtataattaactgtacaccattttgatctgttgagttaagtaccttctctaaagcatctaattatagtaatatttgttattaagatataaaagaaataccaaaactaattagtacaaataatatgcaaatacatttagaacacagtcagacatggatacatttagaactactcctttcgaactgataatattagtcgttttgaataaggataaagtcaaattttaaaatctttaactataaataatttctaaaatatttatgttaaaaatatggaaaccatatgtgtagattagttttaaaaagtacttcaataaaatcatatatttgttgatattcctatatatactaaatagaaaataattatcaaagctattttttttggataccgtgctcttgtaaaaaaggacaagtataatcaagccggagggagtagttctgtttgtacttcacttaacgtgaaggtgcgctaggccgccagttgggcctgtgctagctttcacaaaagaattaggcccaaaatctaaacaacgcccaccaacgggaacaagacggccgacgaagggaaccgattgaaaactatggctggctggctggctgcctgcctccttcgccgcataggactcgcagtcccggtggatccccaccgaattaactcccacgagcagccggtccccgcgtcatttacaagttcaccccggtagccgcccgaatggggaagagacaagcaatgccggccccgctacactcgggtcgtcgaatcagcgagaaaaatcgacacttgcactgtgtagaagcacacagttttgtgttttctggatagtaggagtatttttcgatctgaaccaaacaagcacataaccaaaacctcaaaacatgtgtagccaagttggctagctttcaccgagtacagtatataccctactacggatattggccgtctgaattgttcttcagctcattccaagacgtcaaatgctggacaaattcatcgatgcacctctcttcgcgctccctgtccgccacgatctcctgcagcttccgggcattggcgaagaacgtcttcccctcttcctccaccacgacggcgcggacggctccggcgacgccgcctcggtcgaacgacccgtcctcgtcgttcctcggcaccgccactccgagcttcctcccctcgagaatccgcgcgttcgggccttggtcgcctaagatcggcagcatgatcagcgggtgcccgaactggagcccctcgacgacggagccccacccgcagtgcgtcaggaacgcgcacacggcggcgtgcgccagtatgctcacctgaggagcccaccgcgtcgtgaccagcccgcgctcgccggtgcggcccaggaaccccgctggtaggacgctgtccgcgtcgacgccggcgggcttcctcatggcccagaggaagcgcgtcccggcgaggtccagcccgtgagccagctcgcgcagcaggtccgcgctcatcggcgcctcgcttcccagcgcgacgtagacgaccgacttggccggctgagcgtcgagccactgcatgattgcgtcgtgcttgccgttcttgctgacgccgcgggcgccgtccggccgtggcgggagcaggccgaacgggacgaccggcttgccgtagaacctcgtcaggatcgtgaacgcgccgggctccagctcggggcagctccgcattgcgacgagcttggacctctgcagcgtcaggctgtagcgggtcatgatggacacccccgaggcgccttccgtcgcgaactcctccgtggcgcgcttcgcctcgaagctcggcgccgccgtgcccatggaccggactatcgcctcgcgctggtccgcgctcgactcggttggcggagcagacgaggccacgacggctgcggagcaggggaggatcatggcgcacggcaccccgcgctcctgagatgccagagcgacccagtgatgcatgagatcggcgagaacccaatccggcctcttgccgccggcgcacgcggtgtcgaggaacgcggagaacggcgcggcgagcccgtcgaacgccttcctgtgaagctcgaacttgtcgaacgggacgtcgctggtggcctcggcgccgtcggggagcccgtcgacgcgcggcagtgggagcgccacgaggtcgacgagctctgccagctcggggcgaaccggcgggaggcgggcgaggttgcgcggggtggagacgaaggacacgcggtggccgcgcgcggcgaggcgctcggcgaggtcaaggcaggggagcaggtggccgaaggcgagccacgggaagatgacgacgtgcagcggcgactgcgaggaatgggcgtcgtccattttcggccggcgcgcaccggtcagcactcaggcgtcagcgtgtgtgtgagaagtttggctctgatgatccagtcatgagtgtatagggagtactccgtatgcaaatcgtgctagttaaaggggagaaaacgaggaaagattcccgaacgcgatgcgtattgtcgagcccagccgagtgcgaggcagccgggactactcatctcctccctccatctactacctccctcaaaaaaaaaaaaaacttttatccagattcattattttaggaggaaacccctccttagagcaggtataatagagtatgataagccagcgatacaagcatccatattatagaaatcataggtggaagagagagaaaaccggagagagaaggcagcgggcgccaatgcaatcgtcgagctccagcacaggaaacgatgcaaagtcctgagaaccagccctcagtcctagtcctagcttttgcccaatgactcaaccattactccatcatagcaagttcaatagtagagttaactgccggctctaaaattcaccacatcatttaagagataactaaaccccagtagatacatcaattggctacacccatgctttaaccaaggcatcctgtcaggtgttggtaacttctgcatgttcaagttctaattttctattggttgtcccgagctgcaaggggccagagtgcctaggcgcttgtgcttgagccagcgactggattgtcgtccgctttgctctctttgctttctctctctctatcatatatgttaaaatattagataagcaggctattagcccactattgtacctgctctcaaagattgggaagaaggaaacaagtctgattaaaataataaaaatcaactgcttagggatgtgtgggtaggtaacttagcagctagttattatacgtatcatctattggtaccatctattacttacgtgtacaaattttcagcccatcaacgggcgatactattaaacttgctcttagagcaggtacaatagcaggctattagccagctgtaaatatattttaataagataaaagatgagagaagagcagcgggctacagatctgtagccagctgtagcgcggactccaagacgcaatgtgtatatgacaggtgggaccatatattaatagtatagtaagtaactattgtatgaattaactactagattaactataaatgaattagagctagtgctggactatactattaaacttgctctaaattgagttattttggtatcaaaggagattttgactttctgagccgtgcaggtcgattacttgcttgtgtgggccggccatcggatgagcgcctcatccacgcgtcatgaatccgcgtcgggagtcgggactgcacgggctgctgtttggaattttttttatttataattttttttattaaaagttttacaaaaataattttccattttgaaaattgacggaagtagtcgcctaccgccgccctcccagagggcggcgaaaatgacgcggcagccggccgttcgctctcgggcgacggccgtcaacgaaatttgcaggcggcccccttgccgccctccgctagggcgattttatactgtgcggggggccgcctgcaaatgggcggcgagggggggcatggaattttgcaggcggcccccttgccgccctgggggagggcgattttatactgtgctctatatttttgtataaatatcaatagttatcaaatctttttatattgaaaactatacaagattaaaatctccaagactggtaaaatacaattttattattttttaggtcatatttggattgttaccgtacaaatattttgttagtgccaaaatataagcaagttttggcactaccaaatatttggtaaggtaaaattgcatttgatcatatttggtttgctgccaaaatgtaaaattgtagtgaagaatgttctacataatctcaaatctagattacgtattaccaatgaataggcttccattttcgtgtgtggtgtgctagtgggaaagaagatatgaagaggttgccttcagattgtcaattatatagcgtcgttttcactgcaatatatgtgaactcaatgagatacattattcattagatgtgacaagacgatcacgcgtgggcgtgattcactttatgtcaacaggcagcgccgaaagttgatagtgataactcgagctgccgcttttcatgtgtgttgttgtggactgtgcgcgctactggatctgacactaccgtgaagcgccgaaagtgtgttgtcgtgagcataagttgttctagcaccatatgaatgaaaagaactatgtagacgagacaaacacaagtagtactgcagtagtaatagcaaaagtagtactgctttacaagtttgtaagccaaaagaaacggtcacataaggactgaagaggtagaacactactgacgaggcctcttacccctgtccctcctaccctgcgccctaatgtgcccctgggagtacgtgagtcggtccgggggtacggcacggctaacccgtcctgcctgtacaggtgtgacctctggctgctctgagtgtgcgcctctggagctcctccaagctgagaggagcctacttccgtcaattttcaaaatggaaaattatttttgtaaaacttttaataaaaaaaattataaataaaaaaaattcctgctgtttgcaccccgtctgcaccagattttttttccgcagattggcagctgcggtagtgacatgtgggccctgggccgcacgttggttacggccgaggagttgcttcttcgggaccgaaacctatgtgcaatgggattttttttttcatttttagatttttttaaaatatttacagaaataatctatcggccaaaaaaattgtaaaactagaccctgccgcccatctctgaggcggcaagctgacgtggcaaacggggaaggaacgggcggtgacggagggagggtttttttgcaggaaagcccttgccaccctctgttgaggtggcaaggggcctgaatgcaaaaaaaccagtcggggccggtcattttgcaggcggccccttgccgccctttggccgggcggcaggcctcgctgcctataaaaggcatgctggccagccctcagccctcattcctcccccctcaaatccagtgaaaaaaaaagaagaaaggggaggagaagagaagaaggggcgaagccctgccggattcagacgccgatttcaggtaatattcatatatcctatatgtgactatagagttaaatattgtgtattttttaaaactttgtttgaataaatgcattatatttttagggttttatctgtactaatctagaagtgcgtattgtagatatcggtaactacgtagatctgctagtttggaatcaatactttaccgttgcattggcatacacaagaagatattacgttgtagatgtttattgcatgaaagagtaatatgatctagttatttcgttgacagatatgtcgaacaaacaaatattccaagtttaccatggcccaggaaacgtccgttacgggccaactggggtagatctgtcagattttattgtatcagaaaggggaattgatagaccggctgagaggagtgtaccttctataaaaggatggttaatgaggggcttgagagttgatccatagacaagtgacataacaatcaatgttatagtaagtcgggcaactgagggtttttattgggaactaatgccggttcaaaactctcaattgtggagatggtatgtggaaaatgcattgcaacgcgggtggcctctagctatggttccgtttgttcacccgaaggatccaggtgtgcagatgaacatggatgatggcgagggaccaagtgctgaagtaaatgagacttctgtggaggaggtcaacgcacgagaggacgggggcgtagtagctccagtgggcattcaaccaggtggagtggccgacgagggggaaactgtcggtgccattgtggatgaaatggagagggaggattctgacaacgagcgtgtagaggaaggtgattcgtcagatgatgagacggatattaatccagcagaatgggctagtgaggatttttctgggctggtcgtctctgaagaggatagtgtgagatgggagtacaaagaaaatgaggttatccagggagcgatttatagtagagcagaagatatgaaggaggcggtaaaacattttgtagtgtcacttcatagagagttttgggttgccaagtccaaccggtcgcaatatgaagttcggtgtgttaaggaaaaagatggttgtccctggagagtgcacgcgtataaggggaaatggaaggattattggatactgtcagtcgttaccaagcatacatgttttctacctggtgttcagaaataccacaggaacattacatgtgcatttgttgcatctgagatgtatgcgcatgtcatcgataatctcacatatgaaccaaggtcaataatccgacacatcgaagagacatacaagtatactattagctatgccaaggcctggagggccaaacagaaaataatagagatgagatttggaacttacgaagcctcgtatgacaatttgccacgcctgcttggtgttatcgaggaaagaaaccctaggagctcttacgcagtgaagaaattcccctcaattgaacatcctggcaagagtgtgctgcaaagggcgttcttagctctacatgcatgcaagatggcattcgtgaactgtcgtcctgttctctgcattgatgggacattcttgacaggaaagtatcggggccagatactaacagcaataggggtagatgggaacaatcaggtattgcccttggcatttgcttttgttgagagtgagaataccgacagctggtactggttcctgaaattggttaaaacaaaagttgttggtatgaggccaaatgtgtgcctgatacatgataggcacgctggcattctgcgagcgatagaagagttgcagtttgggagtatggaacgaggataccctggtgtttgggaagatgtacagagtaggtggtgaatgcatcatatgggagctaatttctttcttcaagcaattcaagaacaaggagctcatgaacatgttcaagaggctatgtaatcagaactaggagaaaaaaatcaatgagctttggaagagattagatgagttgacagccaaatgcagtgatcagcgtgcagcggctccatcgaccgccgttgctaaccctcctcaagctcttggacctctcccaacgaatagtccaacattggttagaagaactggattggagattcggaaattttctcagtagattatgcatgaaccaaaagagaaatgggccaaggcgtatgacacaggtggtgctagatatggaataatgacaacaaatttggcagaagtttacaactgggtgatgcgcggtgtccgtggactgccactagttggcatagtggagttcattttacatgggacatgcagttattttagggatcggttccaagcagttcttccctctataccgaacaacagcattttgtttggaactttcatgcagaaaaagctagaggagttgcgtaaaaaggccatgaaacatcgagctctagtgcaaggtacccaacagcacaggtttgagatactatgtcaagataaggcaggcaggggtatctaccgcaagagagtgaagcaggagtgtgttctcaaagccgacgacacatgtcattgctcttatgcaaagccgaagctgctccacaggccatgcacccatgtcattgctgccgcaacggagtgtggcataccagatgcagtatatgtgtcacagtactttaataagcaagcaatatatcatacatggagcggcgagatttatgggttcggcatagctggggagttcacagagactaacgatgaagtactcaatattcctgacccatcgaagctccgaggcaaggctggaaggaggaagactcgtcgcatccacaacgatatggacgagtcggaggctggcagggtgaagcgttgcagcaaatgcgatgaacgtgggcacacctacaagcactgtcctaaagacaaggagaaaccaagtgcggcggaggcaggactatcaggatcagcagcagatggagctcgccctacgggtgaaggcactacctccactcgaccacgtcctaggcgtcgtcgtgccacgtctagctacgtggtgtagttcttatgttctatgttggcatgtggatttgcttgtaatttgtttcaaacttatcgatgtgtttatgttttgtcgtgtaatgtcagacttcggcatgtcatgtctttaggtctcgtgatgtaacgtcagactaaggcacctaatgtctttaggtatgctgatgtaatgtcggacttcgacacgtaatgttatgttatgttatgttatgttatattatcgaactctacatatatgttaaattgcacgtcatcgttatgtacccttatgtaacatcctgaaaattcaagacaatgaaaatcacgaaaattttgaactttttaaaacttttgcatcatgctggttgttatgattgctattgcttgccaaaccgtaaatgatcaccaagaaagtaaagaaaagaactacatttaagcaatagatatgatttacgggaatatatttaatcctacaaataattatgcacaagatattaaaatcaaataaaagaaaagttattattaacctattttatcaaatattaaaatatttgaataatgtaggtgggtgccataatatgtgtacacatgaaatgatgatcattcaaataaactgagctctatgtatatataatagaattacgggagtatttaattcgatatgtagatcgattttgcaccaagttcctaattgcatttagggattgaaatttgatatattaaacccctccatataaaataaactaacatataaataaattgagctaatgtgctattgtgttaataacggtctcattagaaaattatagaatctttaataaaccttaaatattggacaatattaaattttgggcaaattcacatttgaacacttaatacggtcacctaaatgcttaggagtaaatacaaatttaatttgcaacttttctcaatttataaatcaaccaaaaccctaaaagaagaaaaataggaaaactttgaaaaatatataataataataagaattaaccctaattaaaaattcaaataaattatataaataaaatatgagtaatattaatctagaataaatccattggttggaatgacacaaatattgggtaaacttcatttatacaaaatctaggatttatagaatcaaatttacacaagaaataggctaaaatggggattaaataggaaaagacactattcatcggccgccaggtgttcgatgtggtcccctaacccagcccctccgctttccccctctctctgtcgcctgccaccgcgccgacgtcgccatcgccgtccctgccccgcgctgccgtcgccgtcactgcctcgcgccgcgcgccaccgctgccacgccgccccgcgcccgcgccccacgccgcgccgcctgcccgtcgcgttgccgttgccgcgccgcgcgccgtcgccgtcactgcctcgcgccgccgctgtcacgccgtcctgcgcccgcgcgtcgcgtccgtcgtgtcgccgtcgtctcgagccccgcgccgccctgtcgccatcgccgcgcgccgagccccgtgccgcgccgcgccgtcccgtcgccgcgtcgccgtcccgtcgacgctccgccgtcgtcgtcgcgtcgcccgtcgccctcaccgcgcgccgagccgtgcgccgccccgagccccgcgccgccgcgccgccg

SEQ ID NO: 5802 - DNA, 27747 bp, Oryza sativa
aaattgaggtaactctttagtctcactaaattaaatttatattggaagcttatttgcttatgtaatatttatgatcggcatcaggatttaaaccttagtgatggagtcattccctcattatgatccggtactaaatatggcatgttttactattttcagattaaagtattttataatggtctttgctggtaaaaaaataaatctaaaccaatcatcctctcttacttactgaattatattttttttgagaattgtacaattgaggctcttgtaaccctgttaaatcctgaaaaataaatcctaaaaaaatcgcttccattaggagttggacctaggacctcaggtgctactgagactcttgtaaccactaggttacaggccctttcacttttatttactgaattatgtcttataccaccacttaactaccggttgtagattttttttattaatgacagaagttaaaaataaatagttgtggtcaataaaatagggagcatataatgtacacacaattttttttgtacacaccgtgcacacgaactaacaaattttactaaaaattttagaaaaaaattgtatacgtacttccaataatactagccacgtagtcacgctttgtgcgacttttgattttgtttaagaacttttctatatggtctattagtttaggtaaacttataagaaggttttaacataataagttattattttacaaagtatggacttccctagccaactattgatttagctaagttgtactatatgtttataagagaaatcactagaaacctcatgtttcttctctctttatcccctctcttttttatcatgtgtctaggggaggtaccagaaacctccggaaatttccatttatttagctcatctgtggtttgtttatacatgtacccttttcatccaatgaccattgtttatccaaatccttcatccgatggctaatatatttataatgatgtggcacgttctcgtgtaagaaagcctgctgctttcattatataagataagataagattacacttacgtgttaaatattaacctcgaattaattatattttggccataacaaaaatattctttttacaatttaagagtataaatctatcagaatttttttctccccatatataagtaatgaatttgaattgtgactttagacatagatataacactactaagggtagatgtacattttttagagtttttttttcatattttttagttggtgtatatggtgtgcacacaagaaaatttgtatgtataggatacgttttccaataaaaaatgctcgatttattgaccaaagttataatatgaatagtcatcggtgatatagatgtattatttatttattttttttcaattttgtatggaataagctgagcgcgatttctctaggtgtgtgatcgacagcgaaaccttgaaactgtcgatgattcctctttgttccaccgtgcaacacaccaccggaccgcagcagattgcaagttgcaactgcagcatccttaatcaactcaataaaaaaaaagcgtgcgcatgttatcctagcgtactaaagtactaaccttaaacaaggctgcgtttgaatgtaccatgacctttgaattatctctcatttttcgttagcatgttaaatggcacatttcgtgaaatgatctatataaaaattgagatcatctatttttaacattatattaattaatatttaattaattatatgactcattggaacggccccgttaacatccgtgcatgacgtgcatggagtcatgtctgctgctgtgctgcaccctaaaatgcacaggtagaagcacaagaagttacgtacaactgcgggggattggttggcattacatcccagaccgggcaaatcggcaaattgatacagcgttgtgaacgtgggagggcgaacatcaggcagggtaagctcagaactcgggaagtttcagaacgtgaaccacgcgagagggagtgagtgagggacggtcggaccaccagaaaggcagcgctgatgggaagaatctgggactttgtgcaaagttgtgtgaagctaccgcgagaccgcgggacggagctgggacaatcagtacacgatctgcctttccagcggccgggcacttcagatctagtcgctgtgctagtactgcttgtcaccagccggcaaaccaaaactttttgctcactcacagaaatgtggttgattagacccctttgctgttaaagaagatgagagtgcatgttgctttctttggcgtcgacaaaggaacgaagtctcttcttgacatgaagacacccagggcatcttttgaaacacgggattaaaaaaaaagaaagtataaaaagcacaaaatgtaaaacacacatggctccaaataggtccttttcttactggttcaaacacacctctgttagtcctccctaagttctctccccctttttttttttccttttttggaaaaaaaaatctgtagtcgatcatcttaacacctgtgaaaattggtttcgcatgcggttgtgatgctcgcaagtgaatattgtgatttttcacatacacctggagctagacagttgcttcacccaccagcaaaaaatacttttggctgtctaaaaaggtttctttgtagcagtagtagaaaaagactatcaataatagatttgagtactgctgctacagtaccttgtatagtatgtgctaatgcatggaaatgcagtagtacaagacttaaacgctgcggttttttgataaaaaaaggtgatataaaaggcttttaaaaagattcaagtattttttaaaaatctataatagttaacattaattaatgatgcgataattgagtgtgttctccggcaaccaaaatgacaactcacctcacaatcttcaggggcttttggctcttttaaggatagcatggcaattgaatgccaatttatcgagaaagagagatgacacaactcaataagatttttttatgtgtccctataattttgttaacacctcaccattcttaaaaatgcttgattatggggagtaattaaattgcatgtgcggtacacagaaatatcatacatgtgcaattagtacataaactaataaaaatatttattctagtgcataaacttgtctagtacatatgaatcaagtcttcaacgatatattataactaattaggatgtctcacacacatataaggccatgagacatgttgtattcgttgcatactccctttatattttacgttttttattcgtataataaacattacttatttcatgtttgatcaagcatatgtatacgtaggtaacatcatatcatgttgacataggagtctacgtaatattccaattagcgttcaacttagtgatattagttatgacttgctttttcccccctttatttgcacataccaaacaagtttatatatatataaaaaataatttacaagttattactattctaaattacacatatctcgcaagttcaccgacactgttcaatacgtggaattgcttaataaaccggtcaaagttcaaaagtatttagagtaaactttaaaattttagcaaaatttatttgaaactgatcgttttttaatcgataactgctcggttaagttatggatgaagccactaggcagcgtttttgatagaaacaaataagctagagggcatgcagagtaaccttttatccttttatggatgaaaccacatccatcagtaacatttcctcttctttcccaactcacctcttttttcacgcacatatttttcaaactactaaacgttgcatttttttacaaaagttttctatataaaatatcttaaaaattatattaatctattttttaaaaaatagctaatacttaattaatcatgtgtaatgagtcaccctattttacgtgctcgtgggatttgttccaacaccacacgccgacagcagccttaagggaggcaggatcatgccactcattccttaccacatttagttatttttccataaagattcgcgattcactcaatgcgtgtaagattccctgacatagatctgtggatctggggcaaattgaggttagcccatatcatcttgtttagaggatctcaagttctcaactgcttcatgactctggaacagagtttatacccaatgcgatcctgttcctcagaatacgaaacagagtggcctatacgcaaaacagagtttgcaccaactgatcttcacgattggcaaaatgggaggaaacgaaccaacgaaccaacccaaatttctgtacacctgcttggatggaaaaataactatcgaggaagaactcggttagttcaagtcacctttcttccgatggtttgacctgggccgtgcctgtgcagtgctggttcatcacggagaggcccttttttcattgggccatgcttgggccacgcacctgacccacgcgtgccggcaaggcacggcgagcaggccgtgccggtccgtcacggcccatctaaaaaacgaacgatatcgctaaacatctgtcgataaatttctctcaatttcaaaagtcttttcagccaactgattttccttaagatcctttttttttgcgaaatattaagatgtgagagagagagaacgcgcgcgcaattagccggaaacccagccggagaaaatacggcgatgtttatagtaaggaaacgaatcaatccacggcacagtccaaacactgaaacacacacacacacacacacaaaaaaaaaaaaaccgaaaggaagcaggcaagcagcaccgcgcgttttggccggcgccggcgtttcgcctcctgatcgactaaagagaggaggagaggtgcagcgccgccaccccctcccgatctccaaatcctcgacgacatcgccgcctccaccacccgatcctccaaaccatcgactatagatgtcacaccggagcgtcccaggcggccgccgccaccttccccgcatctacgggccaagaaacttcaaggacgaatactccagaggcgacacgaaagccgagagtgtgccggttcttgccaagatcgcgaggtgctacgaccactgtcggttgaagtgtctcgaggaggagttcatctccagcggcggcttctgcttcggcctcctctcccacctccaacatcgtcgtcaacagcgtcatcacgtcctcttcccggcgtccggaagtcggcggcggcggcggaggagagcatgccgcggacatgttccagcggtcgctggatgggctcgtcgccttcctgacctgcctcttcccctacctccccgaggtggaggcacttcgctacctcgacgccgccggggcggacgccctcgtcgccgcccgactcatcgtcaaccggcgcggaatggagcagtcgttcgtggtcgactccggcgccaccgtgatcaccgccgagatagccctccggtgcgccgccgtcgccgcccgccacccctgaaagaaaactcaatctagaggtaatgtcgtcgatgcgacggttcgtgttaattcagcactgaatcgtgcgatcatttacagatatatatgcgccatagatgggaggaaccggatctcctatacatgctctaacaaccttatcaggttaacaaactaccggcctcctcatcttgcgcatacagagattacaggagattgcattatctctaacaaccccgaccctcgactgctcgtgttagggtggaagctcgtctcgccggtgacctgaaaatgctcatcacgcccaacaaatctcgagtcaaggcgctactagacaacaccatgatgaaccacgccacagtgaaagatgatgaaattctccatctgaagcaatcctgggagctcgccgaatctcggcttgatcaccacaacacaaaaaccaaactggcaaaatcatgggagcgactcgcaaaatctctgctcctacgtgcaaagcctcaaccagttctccctcatgtccgggcggccaagaagcgaatgctcttcgcaacgatccgcggcttctacctgcaggcgatggcgaggctgccggccgacgagctgcgcgctcggtatcaccgcagcatgctcaaggccggccactgctacggcccgctggaccccgtctccaacatcatcgtcaacaccatctggtacgatcaggcggccttctcgcagagcaagccgtgtacactgcagatgatcagcaccaaatgcctgatgcgaatcgtggcccgatctttctatggcctcctgtccttcctgtgcactcgttacccggactgctcacctgaccaagcgatggggtggctgcagatggccaacgctgacttgcggattgttgatcctgcccttggttatatgtccaataagattacgagaacagacaacatcagcatgagcttctgttgtaacttgccactgcaggttgggattggatgtttgtgtttcagagctgaggcatcaagaagatcggttacccgtctgccggtgtccacgaagcttatgctgctgcggctgctgctgctttccacccagcgccgcttgcgcagcaagagcttctcgcatcacctgacaacctggctaagcttgggtttgtatatctgcatgcgttgcagcacggtgacaggctctgctctgacgatgtcaccttgatttccttgttgtttcgcaagcgtcacttcgagttgcgacatcaacagcagccagagcctaaaaggttatgcaatgatgcctacattgcgctttgtcaccggcgtttcaagttttggctacatcatgacctagtctgcaagaacgtggaagttgcattggccacattcaaccttgacaaggtttggtttcttcaagttgacccccctctatttttgttgtatatgcttagcctcaaatgtccaattaactctcttcgattgtgtctttagttgaaggtgcacaaatataggcttcattttatctgtggtgtcaatgagtgcgtatctggcctggagtacggcccggtcagaagcaatagcccatggaggatttacaaatataatcactctcatatcaactttctggcgatttgcgatgacccccaatctgccaatgatcctgcaacgctcttctttgctgaatgtagcaactatagcgttcatgaggagtcttggtgcatccctgtggtttcgccgcatcgagatactggtatgctctggtcttgaccttacgatcgaaaaacctttcaatatccatctcaatatttcccttccaagtagatttgtctatgctatcgtaatcaatttcatatcagtatatatctctagttgaaaactcaccgacatagcagaggaccaaaggttaagcaaaaatagtgatgtgatgcccagaaaagaaaaaagaatgctgctaaaatctgtccaatagaaagattatattagatctgtctatggtaaatagatgctaacgtgtgatagattacttatgcaggatgcttcatagatgacataggtgatactctctctgtcctgtttcaaaagggcacagtttcttgatctgtccagttttaaagggagtacggatactattcactgtctgattttattatttttgtttctttaattgtagatcaaatttagtcatacatgtttgtgtatagacttatggacaaggattttctacacctagatgtcatggcacccatcatttgcatgtgattcaaatagttacaggaaaaaatgaaaaaaattagtagcatcgattgtgatgatataagtctatacataaacatgcatgactaaatttgatctacaactagagaaacaaaaacaataaaatcagacagtgaatagtacacgtaccacgcagataaaatttgttatttttgtttcttcatatgttgatcaaatttagaccttcatgtttgtatagtgtcttatattatcataatctatcttatcaaattttataaaatttttatataaccttttaaattacatgcatacatgtagaaaatactttccatagacttatatcatcacaatcgatgctactaaactttttcaattttttctataactatttgaatcgtatgcaaatgatgggtgccatggcatctaggcgtacaaaatccttggcatttaggtgttattttcactttaatttgttatttttgttgcaacttatagaagttgaatttggtcttgcatgtttgtggagtgatatatttcgtattaatctatgttgtcaatttttttaattttttaataactatttagatgacatgcaaataacgagggaatgtcccctcaagggatgaaaatccacgtccgatttctgttctcaatatggagtgtgcaaatgtgacagaaggaattctactcgcgttaataatcaattgtcactaccatactattattagtttataacgtgttgtcatttttgtatgtatggcagaattagtccgttgcatttactgtgagagcaaggggactaggattgtgcatcctggtgagaagagcttccatggacgtgacacggaatttgagaaggtgatgcgtggagaacgactctttcctggattacagagaggatcctacagcaacattcggctcgctgaaagaaccgatgcagattgggtggataatctggaggaagattgcatctacatcactgcctgcgcagcggataatgatagaagagtgaacccgctcaattacccgcctatgtatcgagagcgtgtgctaccgtgctgcgaagcagcaagtgatcgttcctagttatcagttttttttttcatatatttttcttcacaacattataaggtggcacactgattcggtatccacacaacgctaatctctctacatgctcccgtgctgaaggatcaattattcgtaatcgtaggtacatattcagattaagatcgggagctcagatttcagatcgagatgctgttggggatgcccttggcggtgatgccggcggcggcgccggtgacgtcggaggtgttggggtaaagcagcatgtatgggaactcggctgggccattgcggttcttgagccccgcgtcgccgttcatgcccaccaccttcccttcgatctccaccagccggtcgctgaaccgccggaacgcctccagcgccctggcgtccgacgtccacgccggcgtgtcgcgctgcccgaggtacacctcgtcggaggagtgcttggacaggacctcgatcagcgagatgccgatgatggtctggagctggctggtgatggtgcggatgaaggcccgctccgggtcgcgccccagctcgccgtacgcctccgtcccgggctccggcatccgccgccggctcaccgtcggccggttcgggaggtaaccggcgtacgggtactggccgaagttgaccgccgcgtgcagcgccgacgcgatccagatgatggtggtgcacgcgtcgcggagctccgacacggcgtccatcctgggccaccacgccgcgcccttgaggtcgccgtgcccgacctcccgcacctccgcccaccacgcctgcagctccgcgtcgcctcggagcacgccgtcgtcggtgtagtagatcgccaggtactcgcccacccactgctcgatcgcgtgccagatctccagcccgtccgccgcgtacgggtagtccttgatcagcagccgcaccttgtacgggctcgtcgcgtcctccaccgccactcccctgcaaaaaaaattcacacgattttgcactaaattgtacattcttcccactgatgccttacaaaaatcaatggagatgtgtaatactactaccttttgatgagatcggcggggaggccctgctcggtgaagttccagttcttgtacaccatggacgacatccagagcgcgtacttgccggggaagacggtcatctcgaagatgccgccggcgttgatgagcgtctgccgcgccagggcgttgatggtcatcgtgtcgcggtagtgcgggctcagcagcttgtgcaccgggtgcgtcacgctgagctgccggttcgtcgcgatcacgaacggctccatcacagcgtgcgtgttcagcctgatcaaccaacaacaacaaccgatgagtacaaatctccgtcgatgaagcgatcgattgctctggttttgaacgtaccagtggctgatcagttggtgccagccggagtcgttgacggcgacgtaggccttggcgagctgccacacccaggcctcgacgccggtggacgccggcgtgtacacggtgctcttggcggcggtgacgtcgccctggatcataggctcgctcagctcgatggcgagcggcgccagcgtgccgtcccctcgcaggaagaagagcgtcctggtcgcgtagatgaagttgccctccaggccgttgacgtcgatcaggaacggcatgaaccggtcgtggtggtccagaatgtacagccggttgctgtccagcgcctgcaaatcgcgacacagtaaatttccacacactattgccatttgccagcaacaattcaggtttgcaagtcacgattgatagcaaaatctgcacgtacgaaaccaacctgctgcacggtgaggccctcgaggttgctcccgatgtgcgccgccgtgatcatgctggtgtggtcgccgaacttgctaggatcgagactacttttcggagggaattcctgcgggatcaacatcgagttaaatttgccacatttcacgttgcagcagccgtgttcactatcaatttggcatgaacgcatcactgatcactcaccgtgagacgcgtgatcatcatcgggttcacgccggcgagcacctcccgcgcgaactcctcgtctgtcctccacgcctccttgtcctctgcatacatagccaaacattacatcgatcgtcagttttcacctaaagattctgatgaaaagtctctacgatgacaggttgcgctcacgtttgataatctgaggcatggggagcttgaggatatagtcgccggcggcagggaggaggtccttgacgagctggagcgggaatcgcttgcggagctcctccagcgcggggacatcggggagcttgaggccaccctcgtacaggtcgaggatgtcctggaacgagtcgaactcgccgggggtggtgtccacgtacgtgcggatcgccggcacgatcccctccgcgatcgccttgatcgagtagcccaggaagtccgccatcttcaggtgcccgaaccgctcgtcccgcggcacgtagatctgctccaccagcgacagcctactctccgagtccggatctgcacgcacgcatacgtgtacaaaaaacatcagtcaaagtcaaagtcaacggtcaaccacacaaaccgggcccaccgtcagtgagacattgcagctgaacatggaccagttctggtgtttcactatgacaggtgggcctaactgggaggtatgtgagtgaaggtgccacattctagtgtaaaaatgtataaaaaactttttagaccttaaaatgtttttttaagaatcgtaaaatttttggttgggggatgcgtaccggtggtggtgggtttgcggccggtgcggccgcggcgagggtagggggtgtcgggggagccgccgaggatggggcgagggttgccggagtcgggggagccgaggtcgttgtagacatcgtagcggtagacgcggtcgtgctcctcgtaggggccctgctggtcgtcgccgcgcaggttgcggagctcgtcgtcgcggtacggcttcagcgccgccggcatctggctcggcaggtaggcctgcgcgtcgccgcagaaaatatatcacaaagttaattatagcacgtactcgtattaatacgcatcgctaattactcctacttaattggttagttgattgcccaaatcagtcccttgatacggcaccggccttggacacctggctgcacgctgaacaagaggcaggcaactatctgttcactttaaaacttttaccgtgtcatgtgttcgcaaagtaaaatcgagtgctgtgtcgttgatcttgttgaaaaagcttctcggggccatgaaacaatgccgtctaaatgggtgtgaactgtgaactgtggcaactatgatgagttgatgactcacgtgaactcacatgccttcctgagtccaaggactattccagatttctagtactatagccacttttatgttgttatcatcaggaagcatatccattgtagagctgcttcttttttttgaacagtgctactaaatccacttcacctaccacataaacaacttacataaagtccattcacttctcacctaaccaaatatcttccctatggacgcctaccaaacgacgtgaatcaagcaacttactacataaagcatctacgaactggccaaacaaagaagaacggcaaatggttactgtaatagtgtaatttacatgcagggtagcataatacagtatgcagcagagaagaactcacatcgttggcgaagaagacgcggtcgtaacggtacttgtcggcggggtagacccaggagttggcgaggaagacgacggcgccggcgcggccggggacgtcgtcgagggtgatggtcttgaggaagaactcgttgctgtggtggttcttgacgatgatggcccccggcacgccgagcttgtcgacgtcccagtcgaacgtcacgccgaaccgcgactcccccgtcgtcagcgacggcaggctgctcgtcagccactgctccaggctcgcctccgcccccaccttcccccggttgccgttgtctgcacgccgatgagaggatcatgcccaatccgttcccgttaattagtccaaaccaacgactaatcatgccccagctgttaattatactacgtgtcaccacctcgcgacaccagctatagtttcaggcatctagttcaaagtgaggtactacttcttctttttttttttactttttagcttttgtactttgggttagcatctggtactcctgccctggttgtctttttcctcgacgttggtctcttctttccatgtcccatcaaaagaggaccgagctagctaggcaatggccgcccatacagtgtttaagtttgtatggacaaaaatgaacaagagaggtaaatcgaccaagagaagagatgcaagggggtgagagggggggggggggtgtgctcacttgggtcgacggcggtggagctgatgagctggcaggtgacgcccttgccgaggaactcgccgaggccgtcgatgacggtggcgccgaagtcgttgaggtcgaggacgttcttgcgcatgagcaccaccgtgcccttgagccgcgactgcttcgacgaccccgtgatggtgtcgatgatccctcccagcatcttcgcctcttctggatgtctcgagctctcgacctgggtttgccgtggactgatgaactgatcactttaatcagtacgtttcgctctgaatcgagttgcagtgagcgtgagctcgctgggtatttatagccacaagagggtgtaactgggaacagtacaatagggccgtgactgaagattgactggtgagtgctagtgggggatactctgcttaaaatttattatctcaaatcatttggcacaatttaatattcttgagagcgagagttcggtttatcatcttactgaaattctttagattaaactttttgataggtaagtgaattaagcactcgtttcaaaattattatgggtgcgtttagttcacgctaaaattagaagtttggttgaaattgaaaccatgtgacgaaaaagttaaaagtttgtgtgtgtaggaaagttttgatgtgatcgaaaagttgaaagtttgaagaaaaaatttaaaactaaactcggcctatgtcgaaattattgacatagttttggtaataccaaacattatcgtcacatctctacgactctatcagcccaaaatttaaacaacatcagagatttcggtacccaaatcttagtaattatactttattttttaaatataacattattaacttttaaacatgatatttcatcatttgctttgttttataaaaaaaagttatataagcattatttatgttgtttctactttttataaatacatatatgtatttttattttgtttttacatactttatcattaaagatatttcaagtatgacttatatgttcatatatttatatcaaatttttaaacaagatggaaaaataaatgtcttgtctagaaatgaatgacataatttctgctactatagaaatgaattggagttgtcatacttccctcttgtcctcctagcgagtctgtgccctccatccaagtgagtaatactccatccgtcctataatataagggattttgggtgaatgtgacatatgctagtatgctgaatctggatattgtgggacagagagagtacgttattgtattcttaatcacctcctagtctatcgtttgttgtatcgttttgactttttttctaattaaacttcttttagtttgatcaagtttataaaaaaaattacaatattttgacacaaaacaaatatattatcaaaatatattaatttctatatgttattaaatatttctatattaaatttaaagaattttaattataaaaaaggtaaaaataatttataatataaaacggaagaaggctaattacgaccggtcacgtacgggtgcattaaaaaggaaaacagaaggaatacgttatcaaaccaaaccaccccccacactggtgctactggccttaattaggactagggccatggcatcggccacgtttgcgatagcttaaaatcgatttgaatatttgggaagacgcgagcggcgtgggaaacgtccgcgtgcaccgtgcagctcgtctcattcgtctcggtttcccctgctcctccaaatcgcgacgtcgacgtgcaccgatgcacggtgtgccggggcggctcgtgttgtgcgtgattttatttcataataatgctgactccaaactcctaactgctcaagtccagctatatctgatttgcattgttgacataacaacttttcgttagaggggaatacatttatgtgcatataagtttttcctgtttacatcgcgtacaccaagaaataaattatactaaaaatgttagaaaaacccatacatataattttaaggaatttgctatattcttttagtacttagtacttgccagactcattatattttagttgtaataaaaaaaataaaagtttcgacagatttgaaagtaaaaaatatgttagaatttcatcgctccctatttataataaatttgtaggtatgactttatacatatttgtaaaactactgaaagattatatacattgttttagaattttttaatcatattttttaattgatgtatatgatacttataaaaaataattatgtgtataggatatatctctgattagagatactagcaaacaaattagcggaggtgaaatttcagtatcaattttagaccgatataggtatcgtcttcatcatcgatctttgtcatcgtgaattatccgaagccatcgtttctcttattcgcgatataacagagagcctcgtaattaattcttcctcaccaccaggatctgtttgatgttagaaaagggtaacgatcgagctcttgattctgaattgaaccacgtgtactcccaaaagctaggggagaataaaaaggaaaaacagaacaatatctgcagtacgactctgaatttcgtgtcagcaaacaagagagagagggggaactgtggccatgcgattcacacgtccatttgtgatttgtgtgcctcgacttccgatctctcacgtcagtccgtgatttgtaagagcaggtacaatagcagataatagtaaactattagccaactataaacatattttaataagataaaagatgagagagaagaacatcggactatagatctatagtcagctgcagcacggactctaagacgtaatgtgtgtataagagcaaggtcaacaagagagccaactgctggctccaattagtgtccatgtcatctatagtactccctccgtcccagaaaggaggacgttctaggttagttaggaaaaattagtgttgtgtgaaaatgaccattttgccctcaatttatagaattggggctaatcatttgaatgcttagtaggagtacgacaagtacactgccacatctgtacaaaaggaatatttgaagcatccaattaatgctgggtgctactactagtatcaacactacagattggtgttatacacctaattcgagtgatatggcgccaaaacataagggcttaaaagaatccaaccggtctaatcaaattcaaaaactccatggatggtgctttgccacccaagggtaccctccataatcctcaagcagcgaggcagttacaagccttttatcacttcatccatcatcctacaaaccaactccacacccacccatcacaatggctatagatctaaacatattagcagaagaagaggaagatggaggggctttacctgacctcaatgaagcacaagccaatctagaagaagaagttcctggaaggtatgttatccaggtagatgaccttgctcgagttgcttgccatggaaatgatcaagttgtacattcttttgatctcaacttgggagcttttgatctcaacttggaagcaacagaagaacaagaacaactgcatccaggttttttacttcatctaatctttctcaatgcataaaatgggttctttctcagtgcatgttgattgcattagtaaatctggctctaaaaaactatggtgttgtatgacatgcaacagcagattataccccctcatcagcacacatgctctctctctctctctctctctctctctctctctcacacacacacacacacacacacgatctgaaaagaacaaaaggttgctactgtgacagttttgcagagtttagttcttctagttccattatcatgtatcagaagacactttagaaactagataacaggtgtagtaatcatagagagtaaaactcaagacatgtcactatggtttcaaacagattaaagcattggcaaacaaatagattagatttcagagcctagtatgaaattttagttcacatctgaccatttcttttcagaatcctagagcatctggactttacagaagatagagaaaacaaatgaactgtaaatagcacattgttacctaacatcgaattagggaggaagtaactttggtcatggccagagcatgttggaagaattaacaggcacaacctattggtgagcagaacgatgtcaagatttactaactaattttgttaattgctagtacaaagaaccaatttattgccaagaacccacacgtcttgccaaatttaagtatttaatattcatcaacaaatcacgtgtttatgatgcgaaatattgaatcatgcttagatggtcacatacttgtgaaatttgaattgtgaaacatccttaactccagctcccagtcccagacacaatattcctgttgacctgctactgaaaataagcaagaactgaattaagtacctgaaaaaaattacttgtacaacactagaacttaaatagagctagaggtagaattaaatacataactgaattagcatgacaacaaatcaatgctaccttacgaacagatgtatgaataagtcatggatcttgatatggaaatatggaagagttagtactattgtaaactacagttatgagtcatgacattgcaaatcctaaacatattcaatattctttgtgcggcactgaccagcaagtagttttttttagacaattatcagcaagacatggagcatgacctggatatgcatgcaaatggaaatgaggaacaagaaattcaactgggtaaaagttcattactctttgatcagttacaaacatgtttacattcttgattttaggactgaataaatctacacaatctgattaacacacattaacttaccatgtaaatttttttgtagacaatgacaatgaattgcaacatgagctggaagccttggaggatgatcttcgggactatggcgtgtatacagatactgtcaatgttgtctttgatagagaggagttgtcagactcagaagaagaagaagatgcaaatgcaaatccaaatccagatgcaaatggaaatgaggaaaacagttctagagaattgacaaacacacaaaggcaaagaatttatgaattgttgcttgcaaaaagtaaggatggaaaactagaaaaagacaccacacgtgcagttgctcaagtgttcaatgtcagcatccgtacagtccagcgtatttggaagagagcaaagctttgcatcgcacatggagtacaagttaatgttgactcgaggaagtgttacaattgtggccgcaaaaaggttgtaatagacttgtcggttgtatcagctattccattgcgccaaagaagcactatacggtcacttgctgaagccctaggtgtgtcaaaaagcacattgcataggttgttcaaagaagggcatctacgacgtcactctaactcactaaagccttatttgaaggaggcaaacaaaaaagaaaggctgcagtggtgtgttggtatgctagatcatcgtacgttaccaaacgaccccaagtttattgaaatggaaaacattgtccacatagatgaaaaatggttcaatgccaccaaaaaggacagaactttctacctgcatccccttgaggaggaaccctatagacctgtccaaaataagaatgcaattgagaaagtaatgtttctatcaacagttgcgaggcctaggtatgatgctgaaggcaattgtacttttgatggtaagataggcatttggccttttgttagaaaggtaacacaaccttcttatacaagtgttatttacttctgttttttatgtttaaacctagcctatttgatgtactaacaggaacccgcacaaaggagaagccgtaatagagagagggggacacttgtaacaaagacaattaaggttgatagagacactatgagatcatttataatctctaaagttctcccagctattagagcatgttggcctctagaagatgcaagaagaacaatatttattcaacaagacaatgctagaactcatgtaccaattgacgatgagcagttcagtgttgcagtagctcaaatggggcttgatattcgcctcgtgaatcaacctcccaattcccccgatatgaattgtctagatcttggcttctttgcatcacttcagtccttaactgctaatagggtgtctaaaaacatggaggagctaatagagaatgttcagaaggaatataatgactacgatccaaagactctgaatagagtgttcgtgacactacaaagctgttgcattgaagtaatggaagctaatggagggaataagtacaagatccctcacatgaacaaagcgaggctagaggcacttggcattcttcctaaagcccttcgctgtgatcgtcagttgtatgagaaagtcatacaacttctaggcaactaattgtgcacttgtgtcataatatgtacttttgtcatctatgtacatgtgtcgtctatgtaattgtggaaactaaatatataatatgtttgcttgtttgaatgttttatcctaggttctattaacaagttgattgtccatatgcacaataaaaaaacaagcactagtatttcatagagatgcatgacatttcaataagatgttgaataaccatatattccaaaagatgtcaccaaacagaaccacataatatataacatgataggatgccactatgcagctgactaattatgagttcgtattttggactaacaacaagaagtacgtagacggcacatgtcacgcccagaaattctcgaaccagaatttctaagctgaatgtgcattgaatccctgtccaggaccagccagggtacacaaacgacaattgttgacatacggatccacgtcttacaaaaatagaaaagattacaaatgcagcggaaaagataaaagcgagctaaaccgggaagcttgacttcagcagcgggcgactccactccacaggcaatccttgacggcagcgacgaaaccaaatttgacaaaacagctccaactaggaagatcttcagctctggtgtgggggaaaagagagcaagactgagtactacccactgtactcagcaagtcataccggaagaggaggtatgatgcaggatataaccaaaggaggctagaggttcttttgcataaagctagcatttaaaagcagtagttgaaagcagtaaaacagttgtagtaattaatcaatattaaccaaacactgtccaacgctacaccacgttgcaacaggcccaaccaaccacctgaactacaccagttcattaagctaaactaggggtgagactaatcacggtgaatctggttgatcgcccataaccgcgggcacggctattcgaatagttttactctggccagaggtgtacaactgtacccacaagacacgattccacacatgtcgccatgccccgaagtatcaccatgatactgcaaagggggaaatcgtgacaagaccctccacataaccctcccctaaccatccacaccacgctaaggtttcacccccacccctcaaaaggcagtgggcggtcccctcttgcgccgcggtgaatccggcagctggacaaccggacaccccggccgacccaactccatcacgcccaccctcgccaccggtgcctaggaaagggtcgagctatacttcagatcaagcagttacccactcccgcttgtggtaagcacggtaagtctcccagggtttcccgtgaaccggtccttaactgccatgggtgcgaccagcaaaaccatgcacccacaacccaccattcaatgtattttaattaactaacaccattgcggtggcaccaatccaaagctatgctcatagtcaaagtctatgtaataaggtgatccccatttgtgtgctagttgaactaagcatggctaagcatttcctaaaccaacatctagtcattttgatacccaggttatcaatgtcatatggtaaacaataaatggctgagtaataggacccattccacatgatattgtaaaagaatgcaacatttaatagaaatgcgggatatttgtaaattgggtacaatatgatcaaacgtattgcatgacttgccttgctctcgcactgacgagacctcagcaacgtcttcgagaaaccgtggatcgacgaaacggccgaaacctacgcgacaaacaaagcacacaagcaaaacaggctataagactactgaaacagagaacaaaaccatttttaatggattctacacatttttcttgatttactgagacttgaatgggattaaacggagctcggatgaattagatatgaattttagaagattcactgtgtttattactataaaagaaatccttaaataatttattgcgcaatattaaccagggctgacgtcagcacggaggggtgcggcgccgacaggcggggcccactggtcagcggcacgggggaaaggaggggcggcggcgccacgtggcggccgaaccgacggccccgatctacccaagggtagatcggacggcggcgggacctcgcggccggggcgcgcgggcgcggcgcgagacggcggcgaccatggcgccggcggcgcggcgcccacacggcggcggcgcgcatgcggcagcggcgcaaggcggcgaccgaaggcgaccgaccggcggcggggagcggcggctagaggaggagcggcggctacgcggctaagcggcgcgcacgcggctacacggtacggggaaaaggagaaaggggagggggaagcctcaccgacaacggtcgacgacggcggccgacggaggacgacgacgacggcgggacgagctccggaacctcctaacgaacaaaaggagagggattagagagagaggaaagagcgtgggagggcgagagcgccggccgaaggcggcggccatggcgccacttgccggcacacgacggggatgggtctccggcggcgaacctcgacggggaaggggcggccgaggtagatctcgaccccgcgaagctaacggcggcgacggcgcgagacggcgacgagcctagcggcggctagcggcggtcggagtagcaaaagcggcggcggcgggtggttgcacggcgcggaggcgatggggagctcgggagagatcggcgaaatgggaaaaaagcgagagaggaggacggcgatgcttaaaaagggggagagggagccggacgtggccgggagcggcgggattcgacggccgacgtgggggagtggggaggagagagaggcgggattcggttttcgaatcccggccatctcgggcgcgggcgcgaacgggagggagaggggaaagggcgcgggagacgcggcgcacgcgcgggcgtggccgacgtggcccgggagagacggaggcgtgggcgcggcggcggtttcggcgcggcggcgcgccgggatcggcgggaggtgggggaaggacccgacaggtgggccccacctgtcggcgaccccgagagaggaggcgggcggcggctgccaggctgggccctcggcctgcggccggcccagcaaggaggagggggaggaaggaggggaatgggccggcggcccatccgaaaagaaaaaaggagggaaaaagggagggaaaagaaaaagaaaaaggaaaaggattttccctggaattaaaaattgcactttggtgatttttaattggttaaaattatttccaaggctctgaaaattccactaaaaatcctgttaataatgtagaatccaagaaaaattccacatgccgattccgattattatttgcatttattaattagggaattagctctaggttaattaagataatttcttcggacgatttatttagccaaatttttaaagcaagcaaaaagggggaaaacttcagggcgtgacaaacctaccccccttaaacggaatctcgaccccgagattcggaagagctggcgaagaggtgcgggtgggtggccttcaactcatcttctctttcccaagtggcctcttcctctgagtggtggctccactgaaccttgcagaatcttattactttgtttctggtctttctctcgctggtttcgaggatacgagttggcttctccacatacgtcaagtcttcctggatttcgatttgatccggacttgcctgttcctcaggaactctcaaacatttcttcaactgggagacgtggaacacattatggatgccaagcatgttggagggaagctcgagctggtaagcaacttcacctctacgttccaaaacccgatatggtcccacaaagcgtggtgccaactttcctttggtttggaagcgatgtactcccctgagcggagtgacacggagatacacataatcccctgtttcgaaagcgagctcccttcggcggttgtctgcatagcttttctgccgagactgcgcgattctcaatctttccctaacagctctgactttctcttctgcctcatttaaaacttctgtaccaaacaactggcgttcccctgtctgatcccagaagagcggagtacgacacctccgtccatacagtgcttcaaatggtgccatctgcagactagcttggtaactgttgttgtacgagaactcagcatacggcaagcttttgtcccatgccccaccaaaatcaagcgcacaggctctcaacatatcctctagtatttgattgactcgctcggtctggccatctgtttgtggatggtaagcggtgctgaaattcaaccgggttcccaattcttcttgtaatttctgccagaactttgaagtgaattggcttccccgatcagacacgatcttcttaggtacaccatgtaaacacataattcttgccagatagagttctgctaatttcttccctgagtaggtggtgtgcaccggaatgaagtgggccactttggtgagtcggtcaacgactacccaaatagaatcatgccccgatgacgtcctgggcaaaccggtgatgaaatccattccgatttcttcccacttccattctggaatctgaagtggctgtagcaaacctgctggcctttggtgttctgcctttactcgttgacagacgtcacagagtgctacgaattcagctatttcccttctcatgctgacccaccaaaacttctctttgaggtcttggtacatcttagtactaccgggatgaatggaatattgagtttgatgagcctcggttagtatcaggtcttttaattccttgttttcgggtacacacaatctttctcccatccagattgttccttgttcatcctcaacaaaacctcgggcttttccgaccctcatgttctttttgagctctgctatttcaggatcacttgcttgagctatgcgaacctgctccaccagtgtgggttgtgcctctagggcagccacgaatccgtgctcaactataccaaggttcaaatgttccaaatcatgttgaacctcacagcatagttcctctacccatgcgacgttgcagtaactcttcctgctcaaggcatctgctaccacattggccttgccgggatgatagtgtattcccatatcataatctttgattagctccaaccatcttcgttgtcggagattcagatcaggttgggtgaagatgtactttagacttttgtgatctgtatatacctcacaacggttaccgatgagatagtgccgccaaatctttaaagcatgaacaactgcggctaattccagatcatgcgtcgggtagttgccttcatgaggacgcaactgccgtgaagcataagaaaccactttgccatcctgcatcaacacacatcctagcccctggcgagatgcatcacaatagacctggaaatctttcgtctgatcaggcaggattaagactggtgcagacaccaaccgtcgtttgagttcttcaaaactcctattgcattcagcagaccagataaacttttcttccttcttcaatagctgtgtcattggcttagcaattttagagaagttctcaatgaaccggcggtaataacccgcaagtcctaagaaactccgaacctgagtgactgtccttggtggggtccacttggtaactgactccacatttgctggatccacagctactccttgagcattcacgatgtgaccgagaaactgaacttccttaagccagaagtcgcacttgctgaacttggcatatagctggtgctcttttaacttttcaagtaccagtcgaagatgctgctcatgttcttcctcggacttggagtagattagtatgtcatcgatgaaaaccacgacaaacttgtctagaaattccataaacaccttgttcatcaaattcatgaagaaggcaggtgcattagtgagtccgaaagacataactgtgcattcgaacaacccgtaccgagtgatgaatgctgtctttggaatatcctcttcgcggatcctcaactggtgatagcctgatcgcaggtctatcttagagaacacagtagctcctttcaactgatcaaacagatcatcaatccttggcaaaggatacttgttcttgatggtgacctcattgagtgcgcggtagtcaacgcacatcctcttggttttgtctttcttctccacaaagataaccggagcaccccaaggcgacgtgctcgggcggatgtatcccttctgtaactgttcatcaacttgcttcttgacttccgccaactcgttggctcccattctgtaaggcctcttgtggatcggtgcagttccaggtaccaagtcaatccggaactcgatatccctttttggtggcattgttgtcagatcatccggaaaaacctctggatactctctgactatgggaatatcctccagcttcttagtggttttctccactgctacctcttgttcttcaccagcagcctggtttaaactaatccctggcttctgcggcactggagactggaagattaccacctctccttttgcattggtcaacttgatggtgcggctggcgcaatcaatcactcctctgtgccttgccaaccaatccattccaagtatgacatctaggtccttggattcgagaagaatgaggttggctggaaaaatcaacccttgaatttcaactgtcacagatgggcagtagtgagttgtggtcatgccacctccaggagtatgaactcgcattggtatcttaagcttcactaaagataacccatgtgcaccagcaaaacgcttggaaataaaggaatgggttgcaccagaatcaaacaatattactgccggtgtcgagttgacggggaatgtgcccaatataacctctggtgctgactgcgcctcctctgcagatgcatgattaacacgggcctgaacgaacttgggtccggcacgtcttggcttcgggcactttccaaccgtgtgtccgggtttgttacaattgaagcagagttcgggtttttctcccaacctcttgggctgttctggcagagctggctgaactgattgagctggaatctttagtgaactcggagtagggttgaggctgtgctgctcactattgttgtgactgtcactatggtggttcttgttgaagttacccgggtggtagggacggtgctgccggataatcatggtggaagggctgcacccctagggctgctgctgttgtagcccttagggcctccaacatcgcggcccctacagtttccgcctccatcatcacctccacaacccgatctctcgccaaagccagcgccgtagccatccctacggcctccaccgccatagcccctaggttcgccgccactgcaacccctagggtttccgccattgctgctgatggcgctctcagtgttgccgcggccgttgagcatgttgtcgcacaccggatatggcttgctcgtctgggggtgggggaggggggatggatggggattggtgcggtgtgctgatgggagggagaagcggggtgctggtgtggaagacgcggcgtggaaggagaagaaaacgagagacgagcgatggggaagaagagaatacgagaggagaggataaggtagcgcttcagagcaaaaatcgtttggagaagaaagagttcgctagtactgttttagatggccccacttcttttttttatttacccttttttttatgtgtgcttgtctaggagtttgctagtgcctgccaggctgccaggctgccagcgtcaagaattatgggacaaatggttaggagcagaacgtcctcctttctgggacggagggagtagacattatagtccatatgtaccatgaagaaattttatgtttactcaacataaatattttattattttcgtgggtcccacagtcttatcctgtctcttctctttctttctctcagcttctcttcctttctttacttctcttcgtttcttttgcctgcatatgcaaagtatgcagcgatgaaggttacagccaagcctgccagggatacaggcgacgagtgcgacgatggacgaggctggtcgccgcggcggacgtagaagacggcgggcgcaggagacggccgtggtggacaaggcggacgcaactgacgacaggggacactggtggagaagtgctttttagtcccggttcgtaaccccctgtagtcccggttttctaaccgggactacgaatccgggactaaagatcgctatctttagttccggttcaaataaccaggactaaaaatcgatctttagtcccggttggtgagatgg

SEQ ID NO: 5803 - DNA, 26317 bp, Oryza sativa
caggctcgtgcgccgttgggtcagtccacactctgcaccagggaccaggcgtactggatgactacggttccgatggtcttcgacatctgcgttgagcctcacgcccctttccacgtgatgcggcagttcggcttccgtcagccctttccagtaccgtttccgacgaccgtcccagctgttgttcaccggtaagatctttcactatgctttcagttgttgcattaaaatctacctgtccacaataatttgcaacatctgtcgattcacactaatatgacacattaattcgcaggtactcgcgcaagggtcagcagtcagctggcgactggcccgccaagttggcgacttttgttgaggactggttgctcgcaaccgaggaggtcgtggaccacgagggagagccacacactgaggaggcgtaccaggcctacctacgctggtaccagccacgcacccgtactagggtcaccttcgctcccttggagcagcagccccacgttgtgagcactagagacctctacgccaggcaccgggaccaggacttcgctcgtgctgtgagtaccctgcatcacaccattcctttatgttttcatgtctttctctttatcaaattttacgaatatgtacgaacaaattaaccatgcaggtcgacgacatcaaccgggtcgtcgactatgccatgccttgattattgtttacccttaaatctttgtaaccatgtttacgtatgagtccctagtcaactatgacaattgcttagaaatgctattctagaatcatgcatactcatatttatcaaatgctatatgcttgggcaattacctttgggaaggtaattgagatgcggcatgtagagacatgagcgccacattgccatgatgttgatgacatgatttgtgaaaggagaaataaaattaaacaactattttcgactggggcggacggaggatttgggtggtatctggaaaaggctagtaccgtccccggtcaattaaggaccgagccatgaagttaagcatgaaacgaccctcgtacaaccgcacttctcgtatgggtatagacctagcggagtagatagccgagcggaggcagtatccctgcatagatggttcacccctgagtgaggcaggtgcgctacggtgggacagccgttgaggtagggccgagaggcgtgccctacatcggtgtcgccattggtaggactgccatgagtgtgtgagagagagaacttaacttgagccataatttaatatgtgtgtgagacttctctttcccgggagcgccagaactcctctcactgctagaaacatggacgcctagagtgcatgaggatttaagttcatggagcgggtactgccaatgcgaggttatcaaaaggctttgccgtggcgcgtctcatgtgttgggacgaggctcatgtgttgggcagtcgcggagtgcgggtaaagtgtacatccactgcagtgtgagtaaaccaaatctattcgaatagccgtgctcgcggttaatgagcaccgggacatgtattacacttggctagactctaaattcttaacttgtgttggatgggatattgcatggtgatttttatgctgatggagccacttcctgagaggagggaaggtggacgtcctcagaaaaccatgacgactcaatggcgggaagctatccttgggatcacaatggatggtggacagaaccgtcgttgtttaatgtgaacactggaactaaaatttgatcagtctatgataggtcttaggcttgtgaaaatatttgcaaaacgcagctttatgcaaaagaacctgaaaccattccttgaataccctctatcatatgcattgttgttgtggtggcttgctgagtacggttggtactcacccttgctatttatatatcttttaggagagtgttgaagagaagcccttgtcggtacgcttgcgtatcccacaagatgatcggagtgcggtcttgttctaggtctcgttccccagtcgactgcctgtggcatgttaaccgggcccttatattattttgtcttctgctgttgttctctgatagttgttggcctacctggccctaatgtaagtatttaactcttttagtctaaattcattcgtgatatgttgtgatccaactatgtatgtgtgtaccaactactgatccagggattggtacggataaacacagaagatttccgatttccaaaatcgggggtctacaccttagtaacgtttgataaatttaaatagcctgtactctagttgtacataattattctcatgattttattactatttcataattttacaagttatcttttgttttacattagtactttttgaattgttctaacacgaaacactatatttttcagagatggcacgtcaggatacacctcagttgttggacccggcgatagatcaccgacactggtctcaccttactgcggtgcagggggctcagcttgggacgttccgggcacggacgtgcggtgagctacttacggttcacgactcctttgtcgagaggtacgaacagtgtattactataacttagttgcgctgtactaatttttataatgacatattaatttgttattacaggctgcgtgaggccagagacgcacacttttcacttgccgtgcggtgaggtagcccctaccctacaggacgtatcgtacttgttggggctaccgctcgcgggagacgctgttgggccagtgaccgcgggtgtggactggcaagacgatctgacggcatgtttcgcactagtacagcgcgcaccgcatctcccgctcgagccgttggcacaccaccgcaacaccggacctacgaagaggtgactgcttcagttcaccgtgagtgttttttgtaccgaaatgacaagcgtactacatatttagtccacaagtaaggtgcctaacattttatcgaacgcttgcaggtcgagcagctacaggcagaggccgacgagtactcctacagccgctgtttggaggcgtacttgctctggctttttggctgagtgatgttctgtggcggtcacgggcacgcggtcgacaagggactcgtgcactaggccaggagcatcgccgacgccgcggtaggcgaggtgcctcagtggagctggggttccgcgttgttggcggctctgtatcgtggcctttgtgaggcttgcacgaagacggatcctagcgcgacctttggtgggtgccctctctttcttcctatctggacagctgagaggattgcgatcggtctgaggtggaccagcacgcgtacgaggagtcactgtacgcggagcgaccagaggtcaactaccctacgatcggtactctgtggtgccgtcgtcaggtacatcacatcgatcttctcgtattgttaagttaattgctaagttcattgtacatcacatcgaacgtctcgtattgcagcaccgatgggctcacgtccaggttaggcggtcgtatcctgagtttgttatggagttcgaccgccttctgccgattgacgtcgtgtgggagccctacagtgtcgcggctacccaggctcgtgcgccgttgggtcagtccacactctgcaccagggaccaggcgtactggatgactacggttccgatggtcttcgacatctgcgttgagcctcacgcccctttccacgtgatgcggcagttcggcttccgtcagccctttccagtaccgtttccgacgaccgtcccagctgttgttcaccggtaagatctttcactatgctttcagttgttgcattaaaatctacctgtccacaataatttgcaacatctgtcgattcacactaatatgacacattaattcgcaggtactcgcgcaagggtcagcagtcagctggcgactggcccgccaagttggcgacttttgttgaggactggttgctcgcaaccgaggaggtcgtggaccacgagggagagccacacactgaggaggcgtaccaggcctacctacgctggtaccagccacgcacccgtactagggtcaccttcgctcccttggagcagcagccccacgttgtgagcactagagacctctacgccaggcaccgggaccaggacttcgctcgtgctgtgagtaccctgcatcacaccattcctttatgttttcatgtctttctctttatcaaattttacgaatatgtacgaacaaattaaccatgcaggtcgacgacatcaaccgggtcgtcgttgacggttcaacgacgatccaacgtttaggcgcggggattccggtacccgtagaggagcacctgacgacgtacacgcagatggtggagtcgatgcgctcgattctccgagtgctcacctgtcgtgcagacgacgttgctcgggcagacgtagctgtacagcggccacccgtaccgactggtccccgtccagctgcgcacgttcctaggccgactccccctccgcacggaggtaagtatttttaaggatttttctgcacatgcctcgcacatatatgtgagccgtttcacttgccgattgcttcagggtttcgtgcaccgttcagcaccccgccttcctcggctaggccttctgttgtgccccccacaggtacttaaaaaataacattacttcgacaatcaatttacatgcattttatgtcttagcttacaagggtcccgttgtcgatgtgtaggtttcgcccagttcgctatgacgcaggccgcccacttctcccaggctgcagggtcagcgtctcaggcagctgcatcgacctcgcactcagcgcagttctggcagtacaccgggactttgtcacaggcagccggcacgtcgagtcagggtccaccactggaccatgctgggacctcgtcggaccgcttggtgccttccaccttgctcttcgacatcactgacttcgacttcgcttcaggctcgacagaggagcgtggtcgcgacgcggggcagggccagtagagcagtcttctctttgtttatttgcttcactttccagtactgtatgcttgtgtaatgaatacgttgttgttatatgtgcacgatacctgttggcgcatgcacgatacctttcggcgcatgcacgactactttctgccgcaccgatgcagcctcctttattcgcgtacgatacgagtatttgctcgccatttgccgcatacgactaatgtaactttcggcgccgatcaggcatgtaactttcggcgccgatcaggcgtacccaccatgccccgccacgttcacatgtcagggatatcactcgattttttgcgcccatataagtcgccttaacgagtgaggcctcacaatcttccagaactcagtcacattcagtactctcttccccacttgcttcattacaaatcctaccggctttcgtcaatggctagacgccggggtgttgaggatccgaactggcgtagcaatacttgtgtatacctactaccaccttggtgccagcgtcctctctgcctatgcggtgatcgatgccaactaatggcttcgaggaatcctgatattcgaggaaggcgcttttttaggtgccctaactatgatcgtgaggtattttattatctgcatatgcttattcattccgtatgggcaatcgttttattcttcgtaacactactctattcggcagacccgcactacggcttacgcatacatcgagtgggtcgatacagaaaatcccgttctcgacctaaccacttgtttacaagaaggtcgctggtatttcgcatccaaaagtactgagcaatacttacagagaaaagcggcttatgaacgacaatgtcgtgaacaacagagcgactggcaggtgctaactatagcactccctccatgggaagcccgtccaagatgcaggtgtggtgatcgttgtcaggttcttcattccataaagcctacaacattgggtcgaaggttctttgtttgtccaaatattcttgacgacgatttcatggtaagaatattttgattacatgaatcctttttttctcacaacatttactaactttgctcgctttaaatctattctttcctcccaggaaccaccaaggagatgtcaatacagagaatgtatagacaccagaagggttctaactccacctagccgtgttgtgcagcttgaactaccagagcaatacagggttactaaagcgcggtttgagagaggagagggatcctcacgtaggggttagctattatcggacaacttggcatattgaaatttctactgtcatgcttccttgtcccattactacatcgtcgttgtgttcaactattgcactacctccctcctagttcgaatctaatatcatctatgtaaccgcaatggaaatagttgtatcatgttcaaattgtactactatttcttcatgttacataactctccttgtttaagtccatataatgtttctacgaccgagactgcgataggcctatattaattatccgagtactaatacgtcgaataagttacaaaataataccttacttaacatatgaaattgcgaaacaaccaacttcaatacatttttataacaatattaacatgttttaccaataaatacttctttatttattattaacataacatagaaaaatcgtttggccgtactttttgcatctgggtcccttgccgccctctactggggcggcaaggggcccaaatgcaaaaagtacgagcgcaacctctttatggcggcaaaaattgcaattagccccttgccgccctctgtatgggcggcaagggggttattgcaatttttgccgacggcggcagacggcgcggtcgacccgctgtctgccacgtcagcttgtcgcccaccactggggcggcaggttctagttttgcaatttttttggccgatagattatttctgtaaatattaaaaaaaatctaaaaatgaaaaaaattctgtgcaatggcagaggatggtaggcatggtgcacatgagcgaaacctatgtgcgatggctgctttcgtcgagccactgcgcgattgcatcgcgctctcacaggtgcagttgtctgttttgggagcgtgattgtggtcttgtagacgggcatggccgcatggccgcaagggcatacattgccgacaaaacatgagataacttctgccaaaaataattgaaaaatataccgttaaaattttcttttcttagaaatatatgacaagcaaaaaggttttagaagagagaatataccgttgtcacgagggagtaaagcaaactcatgacgacgagatcgtatggtgaatctgcaaagtggcgatgacaacaacgatatcgcgggactttggactatttgccactctcttcaatagcacattctcaaatgccatcttccctaataactctaattatttgtgttgaaagtatgtcatgaggggctttgatcgaggatgccaaaaccaccacacctatgaagtgctgctcgacgatcaaggggttcgactggggtgaagccgagggggcaaggccgaaggacgaagctagaagggttcgccaccctgtccataggacttgtcgtcaagtctctgtcagaggcgaagccggaggggttcgaccatgagctagatgccttcgccaaacatgcctgagagtgcgggatggcccaagaaggccattcgccacacatgggctggcccacgaagcccgactagggccccatagctaggatggacactatgtgccctcactaatgtccttatcttaagggtatcaatataaattctcctatacacactaaaccctagtgagtatgagtctttactaagactataaaaggccctataggggcatgtaataggggatccaaaaaaatatcatcaattaataccttgttttactattcaaccactccaccgagagaaccacgtctttcgacgtgaagctattgtcgcttcgacaacaatttgccatcgtgattcatcaaattgtttctattttgccacttttaactgccaacacactaaaagaaacagaaaatgaccttactgctcctctcatctcctctatcttttcttctttcctcatctctcctatgttattcctctcctacgtgagaatcccatgtactgttgcagttggatggatggcgcgagcctccgcgatttgacggcgaggtctttgacgagcgaggatatgtcgaggtcacctcgaccacaagcgagatactcgcgctggagcatacaacttgacccatgccggctccctccccccctcctaaacatccatttgcaccgtttctcccaacatcacaggatctatgcgaagggcctgcaaccaagatgtactaccttggccccgatgacccattcgatgaaccatcaaccattgtcgcatccattgcttgtcctgctatccggttcatccatggcgctagccgtccctactgcttagcttgtctcacaccagagattggttcatgccatgccagagaggaagaaggtagaagggagatgaatgagagggtaatgaggttattttcttatagttttgctaagttgtcagtcaaaaataacgaaacagagacaacttggtggatcacgatggcaaataacaaaagttattgggaatgataacatttgagaatgtgacatcgaagagagagtggcaaatagcccaaaatccctaacatcgtgcccgacaaatgcgaagtggttgtttgcggaggtggacccggtgacgtcgccactacgcgctttgagtccacgagagtgtgggcccctatcatgtcctgataaatccaccccgaattaaaaatcactttataaaagaaaagaatagaaattattataaatctaaaagaaatctcaagcactaaacctctgtaaatattttctgctttaatgaaaatacattgctaggcaaatccctagcagctttccaggtgattttttttttcaaattgagcttggagtatttttcctaaaatctccatgttcaaaattggtccctcgatttttacttgatttctagagcaaaagaaataattttaaagcaacaaaaaccaaatttgtagttaattaaaatgaaaacctaaaaataaatctctccttctctttaggccatttccggcccaaagctcttagttgctctttcggcccgccaccggggtcctcttctctctctcctccttctcgggccaacctcctcttaaataaatactctctccgtttcacaacgtaagtcatatatatatctagattcattaacatcaatataaatatgggaaatgctagaataacttacattgtgaaacggaggaagtagctacttgttggttttacaacgccgtaatcttgttttgggtttttttttcttgtaactttccttgtaagtatttttttatgcttttgtaaaattacactattgggttaggcctggtagtattccctaaaaaagttttttttgttttttaagttaattaattaaacttgttcaatataccggataaaaaaatcccttttttctttgttaacatcaattccacatggacgcaatatatagtctgccggcctaatgaagcgatcaaacctccagactccaaagtccaaactcacctacggcctagctttgacagctacgtatcctatacgaaccatctcattattatgggaaactactctaaactcgttgttatgaattttttttaaaaaaaatagattaatacgtgttaaattattatactaacatgcaagatcaaattctatttctatttctatgagttgcaactgaaaaaaatttgactacaaatatacgttaactagatattatttaatttgtctttttcgttgcaacttatagaattcaaattttaccttgtatgtgtatagagtgatttatcgtatattaacaatttatcttgttattttttaaaaaaaatcataatcatttgaatcatatgtaaataaggattgagaatttagaatccccttaccattattaccagcacatcaacgcccgtgctgccgcacgctgagcaccgtgcacgagcgcatcgttccgacgttccctttctttcgtcgtggactccggctactcctccgctgccgccgccgccggcggaatgcacgtcgtgatctgcccattgctcgccttcggccacctgcttccgtgcctcgacctcgcccagcgcctggcgtgtggccaccgcgtgtcgttcgtctcaacgccgcggaacatatcccgcctccctccggtgcgcccctcgctcgcgccgctcgtctccttcgtggcgttgccgctcccgcgcgtcgaggggctccccaacggcgccgagtctacccacaacgtccctcacgacaggccagacatggtcgagctccacctgagagcttttgacgggcttgccgcgcccttctcggagttcttgggcaccgcctgcgccgactgggtcatgccgacgtcgtccgcacctaggcaaacactaagttctaacatccacgtgaaccattcatgagatggaagaagagaggcagaaccattgaagacatacgcacatgatagaattgcagagaaactcgtcccgcccaggcaccccggcgcccagcggtcgcctcctttgcccaatcactcctcattcgaacacgctcgagcgcgctgcagagaagctcgtccgctcctcgcgccaaaacgcgcgagctcggtcccttctcgcctttacctcccctccccttccttatcgcgacgtttttcggtctctgcttggtctgcaaatgggccgaaagcagctgaacatcgcgcatgagacgaatgggaggaggacaggaacgcttccactgaacttgtgccgttggatgtggaagcaacggcgatgcggaaagctacgtccctctgacgtagaatttaatacgtcgcgcagtaatgaagcaatcagcccgatcggagcaagcttggtaaacctccaaagtatacaaagtccaaacccacgggcggtactgcccatcgcatcatcaggcgtccgggcggtattcatcggtcgcgcccgcacatcgacgcccacgccgccgcacgctaaacccgcccgctcggccgctccacgcgcgcaccggcccccttcttccgtcatggactccggctactcctcctcctacgccgccgccgccgggatgcacgtcgtgatctgcccgtggctcgccttcggccacctgctcccgtgcctcgacctcgcccagcgcctcgcgtcgcggggccaccgcgtgtcgttcgtctccacgccgcggaacatatcccgcctcccgccggtgcgccccgcgctcgcgccgctcgtcgccttcgtggcgctgccgctcccgcgcgtcgaggggctccccgacggcgccgagtccaccaacgacgtcccccacgacaggccggacatggtcgagctccaccggagggccttcgacgggctcgccgcgcccttctcggagttcttgggcaccgcgtgcgccgactgggtcatcgtcgacgtcttccaccactgggccgcagccgccgctctcgagcacaaggttgcaccaagtcctactaatagctcaatctttgcactaaccttaattacataattccatcattgatgctacgttattcgccttaggtgccatgtgcaatgatgttgttgggctctgcacatatgatcgcttccatagcagacagacggctcgagcgcgcggagacagagtcgcctgcggctgccgggcagggacgcccagcggcggcgccaacgttcgaggtggcgaggatgaagttgatacgaaccaaaggctcatcgggaatgtccctcgccgagcgcttctccttgacgctctcgaggagcagcctcgtcgtcgggcggagctgcgtggagttcgagccggagaccgtcccgctcctgtcgacgctccgcggtaagcctattaccttccttggccttatgccgccgttgcatgaaggccgccgcgaggacggcgaggatgccaccgtccgctggctcgacgcgcagccggccaagtccgtcgtgtacgtcgcgctaggcagcgaggtgccactgggagtggagaaggtccacgagctcgcgctcgggctggagctcgccgggacgcgcttcctctgggctcttaggaagcccactggcgtctccgacgccgacctcctccccgccggcttcgaggagcgcacgcgcggccgcggcgtcgtggcgacgagatgggttcctcagatgagcatactggcgcacgccgccgtgggcgcgttcctgacccactgcggctggaactcgaccatcgaggggctcatgttcggccacccgcttatcatgctgccgatcttcggcgaccagggaccgaacgcgcggctaatcgaggcgaagaacgccggattgcaggtggcaagaaacgacggcgatggatcgttcgaccgagaaggcgtcgcggcggcgattcgtgcagtcgcggtggaggaagaaagcagcaaagtgtttcaagccaaagccaagaagctgcaggagatcgtcgcggacatggcctgccatgagaggtacatcgacggattcattcagcaattgagatcttacaaggattgaagcatctcaggatgtacacctgcaacagtgcaactacaaaatccttggaataaaatgatttttgttttgtagtccacttacccaaaatatgcaaaggccgaacggtggggaaaattctaatcctgatttttttttcatttttgtttttctttgttatttatcaatttgataccgcccagacaaagttgaaatttaattgtaaaactttttatagtacatggaacacgcacaacatactcatttcctgtagagtaatgctccggtgcaatctacttgcagtattctactccgagtagaattaatctcgaccgtttattttaaagggcaggtaagtaatctcctaatatcgtttaggggtaattttggtttgggatgttttcttcggttcgcatcgcatcaggtccggactccgtcgcatgcagacacctcgctattcctcccccggcctcgccgccttgtccgccccctccgtcaccgtctgtatcccccgccgtcgccgccttgtccgcctcctcagtcgcatcgtccgtctaggagcggacgagcgtggcagcgtccgagcgagcgacgatcttgagcaggagttctggtggtagtaaaaattctggcatgggcttcggcggcggcatcacgcacgcacgcaacgtcatttgcgtggcggcatcgtctcagctcattcgtcttcttgtcgttccgattgtttcatggattacatggatcgattaagatcttgcacgaccaactccgacgaggatgacatggtgattgatctatggattggaaaacgataatacccctacgcgaattatttttcctggatgaaaacacccctccacatttctacttccactaattctggtgggagtagaactagatctcagccctacaattaaatatgatcaagggcccaaattactttctactccgagtagaaaacaccggagtaggactgtttcctgtatgtgaaacttttttcgagattttccaaagaaaacattcattattcattatctggcatctcggagagggcgagaggcaagcatgatgcaagtgtaccatgctaataatactgtacttaggagactactgactactccacgcgggcgtcagtcgtcaaagttcataaatagccggcagcggaacgtctgattctttaattggtggagaacttaactttgcactcagcttgacaaattgtacaggcaagatatcaagatcacgggctttttcatctccaaacgatcacaatcttaacttaaacaaaccagggtggaaggtaggcaaagaagaaaagtacaaagttgcattgtgaagttgcagtaaaaaaatgtcggatgacatgcagatacagcaaatgcttgacttcctcggtggcggtgccggcctgccggcttaactaaagtagttccttccctgattggatctttcaaagtctccacgactccaaagtgcaaacatatatttgagcggttcagcccgtgctaaactggaaactgttttttggatggacgcccacctatttattacatatcaactaaacagttataatttttttaaaaaaaacaagatagattaatatgtaatatatcattcgacaaacatgcaaattcaaaatcgacttctataaattgtagcgaaaataacaaatttaattgtgaattaatttgttatttaattgacatgttagagtttaatacatatactagttagagtttaatttgttgtttttgttacagtttagaaaagttaaatttgaacttgtattttttggagtgatatattacatactaatctatattatcgttttttttaatttttttataactatttagttaacatgaaatgggtggacgttcatttaagatattagaatccatcttcatcccgcgtctgctcgatgatatccatgttcttgaaatagaatccagattgctctacctctgccttgcgtgttacaggaagaaagctgctatacgttcgaccgacgcgtacgactcaacggcggaatacacgacgtgagccagcagcccagcactgacttggttatatggtttgctgctcccactgtcccacagtcccacataatccacgtggaagcacatcaaagctcatatataaagcccaaacttcaggcatggaaaattaaatcaaacaaaaccgttgatgtagatgtttgtaaaaaaaaaaagagagatgaaaaatttagaggagaaagggaggagactaacaaagttcagcggcgaggtaggcgaagctgcgaggcagccgcccggtcccctccccactcgcggctacctggcacctctccgacctggcgtggcggcggcggctcccagctagctccggcctggcgcgggcgagggaggcgaagctgcgaggcggccgcctagtcccctccccactcgcggcggcctggcgcctctccggcctggtgtggcggcggcctggcgcgggcgaggaaggcgaagcggcaaggcggcgatgcgaccacgagggatttgggcgtcgggcggcaggaaacggagagcgtgggctgaaaacggaggctgcaggtgggccggcgcagcagaccgttcgattagatttcaacgctccagatcgctccaatgtcacaccatgccatgccataacaatgtcactgaatttgaatccctaccacacggtcatcaccgccggcgacagctattccttgcttgcgctgaggtctgctcgtcgtcgtgtgtgttcatgtagggaaaaggaggatgtaggaacactcagaaaagtaagaatggaaaaggaataggaggcgctgacatgtggatcctacatgttgattcagcatgttagactaagtcaatgagccatgtcagcaagaatcgctttcaaaaccaccgagtgattttgtatcagttttaacaatttggggttcaagatatacggttaaaggttacaaattagattagacctatatttgagggagtcaaagtggacttattctcacctagcaacacttgagtttcccaagtcaatcctctcattttctacgtgcacgtttttcaaactgctaaatgatgcatttttttgcaaaaaaaaacctatacgaaagttgctttaaaaattatattaatccatttttagaaagaaaataacaaatacttatttaatcacgcgctaatggaccgctccattttgtatgcaggaggatttgttcccaactgcatctaccgaatgcagccttattttgacaggtaaccaggaaggcagcaggcccggcctgctcctggcccaaaactcgttgtcctaataccttcacgggccggacttgggcacggattttcggcccgtacaaaatgggcttttcttctacgcggcccgatcagacccggcccattcccaggtctgccgcggggaaatcgccttcgggcttcggcccctttgcacttttgcagaggagcaaagcttacaatagggcaacccaaaccaaaccctggccaaccccacctccaaccccccgcgcagccgaaggaatcctcgacggcgacgacgatggccgccgcgacggagaagacggccgaggagatccgccgcgagctccaggagctccagcgccagcaccgcgaggtcggtttctctccctctctccctcccctgagagaccaccctgtactcagcacgatctcctctccccgtgcgcagatcagcgagcgcctccgagacccccgcggcctccgccgcggcgcgcccgccgctgcaggacccggcgggccccgcccacttcgcggattccctagaccagtacggcgtcgcgattgcgtctcctcttccctttccctttattttgtattcgtgatttgatttatttccgtgttcttgtgttgcaaggctgtggatttggtggaccagtctgcgcctaagcggaggattctatctgcagtggttaaagtatccgcctaggctttggttttttattttccttagtcaaacttgtggtttgtttgtcgataaccctaatattctgtgcatttgtttggtgtcatgaatggaggtggaggatactgaagctaaggaggatgtcaagaaggaagcggaggcagaggggccggagggcggttcggctgctgctgaaggcggtgagaggagggatggtgggttcaggagggatgggagccagcgcatgccgaggagggtgagtaggctggaactataggggattgcgggttgagtttgcttaactgtattgttttggttgcaggagtttgatatgtcattgccagaacctctcccgagggaatttcccaaggatgaggatcaaagccttgtgaagaggaacaagaggatgctggggaagcttcttgtcggtacattagaggtaaccgattcaatagacatacaaaggaacaatccatgggtcaagcgataataagatatcaacagttttcagtgtttcctctccaactgatacacacaaaagaaaattttcagtatttgttaactagctttatcttgggtatggcaacctgtcaattaggtaggaatttaatggaagtactagtggcaagccacccttagtccccttcattgtgaatatttcaaatcagtgtaattgatttttccttgtgcttggtaatccagaaatttcagcaagaggacaaaaaactgtccaacacagaggcttatatgcgcagatcagaggttcagcgaaaggtactaacaatttctcttggtcttgggccaatctacatttaagcatgatttagtggctgatgtcagttgcatccactttattcacatgatgacatgtgctaattagaaatttgattttcatacatggaattatgaatgtaatattgctgttggaatttaactattgtgtcccgtgccatgacccatgaatgaaccaaacgatctcaataaaacacatacatcaacagaaaacgtcttgtctcctgatactacatcaatgaaatttagataagtagaatgcatttttcaagcagtgttatgtttttctgttcctgtggtcctgaaaatatctattcccataggaactatctagcgcacattcactttatacaactacctttttgttgctatatgcattgccctagtagaactttggacagtaccatgagttgaatggaccgtgttaaattctttttattaccattcttttgctggacttaggctaagtgatcttccattattgagatatcgatttcattctctagggtctcagttctttctttcaaagtaatctcgcatatactatggtctagccttgattttattctcgctattaggtctgatgtagcatggaatattgaaaaagattgcgtgaatgtaggctgatcaaaaggctcgtgaggaaagtgaaaggttgcggcagcaagagcgagagcaagcaatagagaagcgtaagcgtgatatggtaagctcacatcagtgtttatgacttgcatttatttatgattggttcacctgagttaaattgatgagtttatgttgcaaatggtttcctgatatgctcttgaatagatgctgcgtgctcgagtagctgctaaggcagaagaaaagaggttggagctgttatacatgcagtgggctgagcatcacaaaaagctgtccaatttcttaaggtcgctttacttctttgcatcattctgcacctttttttatccatgaatggggtccctttttgtttccttttgttgtgccactttgcaatatttttatctgtatttatcttactcttttatgaactggtcttattgtgtgctgcaggttatttttattcctggtccaaaagtatccatattgacaattaaattgagggaagatgcgtttctgattgtgcaaatcttgatgtttgatgttcataggggtttctatatccattttgctaaattacacattagtatctttttgaacattattgttgtttgtcaggacaactgcggaaccaccaatttactacatgccagctaaaccaataattgatgatccggctattgctgaggagaacaaggaaaaggtattttctgccctatataagtcaaagtaaaaacgctaagtttacaaatttttgaaggatgaattgcgaccctttatacacacctccatctacatgcaacttgggaggcagaacactacagatgtacacaatgaggacaaacttgtgcctactacaaataataaattgtctattttgctgctgtagtatttgtgtggcatagctaatttcatcatagggcaccatcagaatgccagttgcctgcatatatccagtcctgttggtttctgctctgtcatggttcaatcaaacatcaaataagtacaacggctaactgatcagccagctatgaaattgctgcccccctcccccgcattatgattattttggtgacatgatataaaatcttaccaaaaaatgcatatcgaatcagtaaatttctgggcacttgaaagtacgtggtcagtgctatgaatttgtcatattttacaaagctttatacttgaagtgctctggtggtttgggtgggactggctgtattcgataactgtgcatcaatgctcttcctttgcatgtatggagcatattgatctaacctttcacgggatagtccttggtcaagtgcaacatattaagagaatgccacttccgcaagtcaatactcatctttcacattttgccatttacatcatatgcttgctagtttcctgggcttccttttttgtacaatctggggcaaccgatttttctttgtcctcttcatccatcatgaactcatattcaatgttgcaggcatttcaagaatggaaatctgaacgcagggctgagctaactcagtttcaaaagcaagtcgaagaacagtacatgtctaatgttgagaggcagttggaaaggatgcagaatgcgcggaatgcacggaggggtaatggtccttcaaacatgcaagaaatggacaaggagctggacacgcacagggcggagcatggtccaaaaactcgacgagttcttgagggtggcaatgacgatgaggatgatatggacgatatggccgtggaagatgagctgatggatgaagtccttggcattaacgagccaatcagcgatgagcaaaccaagccgtctgaagaagctgctgatggtgttccggtgtctgaggaagtgcaataggtaatttgttttgtattgttgcgaggtaggcatctaggagttccacatttgatatccttcagctgccctcattttctgacgcttgttgtatgtctgttgacgcttgagattttccccgctgttatcaagccatatattgttgcgggatgtattgccgttgagcgatatactctgttaatcattgcatcctttgcgtttctagtataaatcgagcaatttactgatgaatgttggcttgcccagcgacaggggttatcaaactgtcttaagattaccatgatggttgacatacgaaagtttagaactattttctgaaaaaaaaaatcacagttgaactgaaattcgttggagcttaataagaagcttgccgactgtaaagtaattccaatgggggtatatgttaattctttacaagaagatctagatgtgtggccgcatcgctgctatttattgttcagtctcgctcagggaaagccttctccaagaaacttgcaatatctatttactgttcaatcttgctcggggaaaaccttctccaagaaacttataaatcgtctcgaatacaaatttggatcaacagctgatatcgaaagagggtcgaattttagtgatttgacagcatgctcaactcttttggacacattatactcttgtagtatgtcgatgataccaaggtataggacaacatcatactcttcaatggtgtccctgttttctacttctacgttcacgtcctcttgcactttccgagctcgagctggcatattcacccctagctgaacacggaacctgaaaataacgaacaaatgagtcagaaacagaatgcatctttgtgaaaacaaagtaccacgcagaccatagtttcagaaaaaaacattgacggcatgtaaaacgtgtgaatatgtggttgggattttctgcacttatgatatgcaactgcaccaacggtaagtttaagttagtatagcaggggcacaggtgcaaaaaagtgtaaaaccaccgccgtatgtgcactaaagaagacaggcaatgtatattactgatatttctttccaaatatatgaacacacacttgaccttgttttaccatgcacaaaaatgataattcttttgacacagcctattcaaatgcacgagctattatatgctctacatctatgaatgcttcgagaattcacacttaactatcaacttgcaaacgtagatgttgcattgaatagtcataaaattatcgtgttgtctggtggagctgccatggttcacccaacgttgagttgtattgtgaatgtttattttaaagctaaagggttgatataaaagttcaaaaaatcaaataatggatcaagtcaccaacaagttcgttgtactttgtactttagaacacactgatatactaagaaatctttcctgaagagtgtgatagctatactacgcaatttatattctttcttctatgcatgttcagattgtgcagcaacaaatatacccaatgctaagttgaactttgaaataattaagtacaagtcaatctaccttccagtgcctggcaaaacaagatcaacttcttcataaccaccttctgctgccctaaccatgcttcctcttatgtgcgaaccacgtactgctggacctggctcatcagcagcaactagtagaaatccctttgaagaaattgtctcctcatgatgcagtgcaacactacctgattaaggtgaaaaaaagactaagatattaccattaggcaacaaatggaagtcaaaagctgaagataggcaattggttgatgtaatgatataaagaatctggtgtagtcctgacttcagatttagtaaaaggacaaattttcagaggaatataataaagagaactcagatgtacttaaggtttagtacgtacattccgtttcagctgaaattccagtactttcaagagcgttctgacatgatgtgatacgcttcaggtgattgggagctcggaaatggattcccaatagcatgctatagtcaattatagattgggattccaggaacatacaatcaagagctatctgcctgaaaatagtacaactgttggctctcaagatatcatcgtcaaccatgttaagaaaaatagcacagcagaaatggagcagtaatatgcaaaactgaactagacagctggaattcaatctcttgtatgcatggtcggacactgcttaaaatctggtttgcctctttaatctagttgtttatatttaaaaaaatctatttattgctatagtataaataaaaattgtccatcttaagtattcttcagatctcaagaataggataagaatcaatatcaaaatagtagaaaataattttgatgtccaccaatcatgggactgaagcaggaatctgcacaagtcatttaaatctactgttctttttaattttccagaagggactacccagtgaacacaatctccagaagtaacatcataaacggtaagttatggaacctggacttcaagccaatatagacaaaaccatgaaagacgacagtaagatgttcagaaaaaagaggagcaagaaagtagcaatttgcctgaaaagtgcctccctccatggtttatccacgtgaaaaacatatgataggtcaaggtcctttagtgttgtgttctcatttatattttgcttctttgttgatcggccttgtgtagagccctttaagtcatacttacgatgaattcgcagttcagtacaaaacatatttcccatgacaacaaaacggacctattaacaccatacatagaattaatatagcaaatgtgtacaaatagacaacaacattcaacacaacagtatgatatgataatgtacctttcttccaggtttcagagtaatcctgtgcacgccaaagaattttgtaatgagcgtattatcataagctttgacatgattgtaatactttggaagcatcttcaatagtatctgcagcacgtattacatcaaaccaatctgcagtaggcatatcttatcacttaacaaggatatacacggtttttagcacaaatctttgttgttcttgtaaagctcagttttagtcatttttaattaacaaataacactattgttattgcaagaaaaaaattgagggtgggtcataccttcagctcagttttcctcaatgtttttataacaaaacgttcatcttgagaaagatagaaaatgctgccacttttcccaggtgaagaaagctcctttagactatcaccaccacatatagacatcatgtaatctgcagcatcgatatgaaacatttctcgaagattcctggtagagtaaattatgagctaataagatatggagaaaattacaagaacaattgacagaattgatcgaactttcaagtcgatgcatttctaaacaatgtctgtatcatcctgcagtgttatctgaaaatatgatagtgatagcatatatatacataagatcatggttgcaatttcctacagttaacaagggaggggtgaaccacagaggagcaaccacccatgttcagtacagaatgcgtgaaccacctatgtaatacaatcagatgatataataaaagaacagtatgaagtactagactatcgcacaatgagaagattggaaagagatataccggaagaccatcggacaatagtctttccaaaagaaatcgacagagtagtgcggaggggtatactgggatccctcacaagggaagtacatttttattcgtgctcgaggtccaaaatcatttgaacgaacttcacgcaaaggcacaggggtaattttacctacagtatacctgcatagaagtactgtatagtcaaatggggtaatcattaaaaagaacatcaactagttacatgtcgtgaggtaaacataaaaaataacataaaaaaaattatatttcatgaggtaatcgatgtttttcataaaatatggctattataccatccaatcactattatgataagacaaataacatgctagtaaaaaattaacagatggctcgtgactagatgcattatgacatactccctccatatcaaaatacaactacttatgtcatttttcaaaaagagaaggcactttttcccgaaagaagaaactacttttgttgtcactcatagtgagaacattctaactggtggttaatttttccccactgaaatgattattgattcttcagtcactaatttatgcttgaattgtcaaaaaagagtttgctttacacgtatgtatcgatctaaatggaaggtgcccttgtcctaaatggatatatccagaacaaaccagaaaatataataagcactgagtgtaaccctccaaagcttgtatagcaaacaatgatgcattcatacaatgaagcttacctgatgccaagttgcaagttaagcattagataatagctcctatggcccttgtaaatagtctccattggtcctttagcttgtttctcccagttattttcttgtgctataccgctctccgacattcttgaatcttcgttttttggttgttccatgataagcactccttgtacgtattcccgttcataaaccgaatctttatcaacttcactgtcttgtagacactgatcatcagctgaaaatgatttacttgatacatcttggcatagatggcttccagaattatcatcgaaaactggtgtggtaccatttgaaatacgtctgggccgatgaagaaacctacgcaacctccaattcttgcacagtttttgcaatagaaataacagtccaatagtgatcttttcattactagaacttgaagcacttgtaccatcatgacttgttagacagtcagaaacttcaaggttacaaggaattttgcttccaggttgataaaatgtaccatggccatcctttagtcctctatcccatgtaccaatgtagcaagccccagatgcatatttgcagtaacctttgccatgagccaggccattgagccaattacagtcaagagtatcaccatttatccactgcattaccccgctgccattcattttgcctgatttccatcttccaatgtatacgttgccatcagcccatgtgtatttaccaaattcatcaggtaaaccttcattccagaaaccttcataagtgtcggagttagagtaaaccattgtccccataccatgcttcttgttcatcctccaagaacctttgtaaactgagccatcaactcccttgaaagtgcctgctccatcaatgaaacctccacggaagtcaccttcataggatgcaccagaaggccactgaattagtcctctcccggtcattttactcttgtcccactcaccatcataaagagctccatctgtccacatatactttcccggtccatgagggactaacccatcgaagctccccacgtagatgtccccatttggaagggtattacccctagccagaataaaaaatatatatgagattcaaattacattgtgtggtgcttgcaaaactaaattgcccaatcgtaaagcaacgcaattagtgctggacagctggagagtgggggcagtggatgattgcaaactttgcgctgattttaatgtgcttttcaatatgtgggaagaacacgatgaagcacttgtaattcctaccaagaaaaaaaaatgaagaatacgcagagatagacacgagaattatcacacctctggatgctccccttgcttgtctctgctcgggccatgtcaagattttaccagaatagctcagaagccacaagatgcattccagaagatctgaaacaaggcagcaaaaactatgatccagtattcgagcataaccaattctgaccgaaaacaggtttaatctcccagatacatcgaaatacatcgcagacataacaactctaatgccttcagcaaagcagatttccgttaccacgtacaactgaaagcagttgcaaactttgcaatcacactagcccagctcaaagtgacaaaaagcaaatagagaaaactaaatatcctcttgtactgttcaagcaaaccggataaacgctgctcccagaagagcatcatctcgagctcgcatcaacaagacagatcaagctacccagaacgactcctggttacagcgcaagcggccttccagatcaccgcgccaatccaagcaagcaagaacgtacctcagctgcagcagtagcacaacgaggaaggagaccacgtggagccccggcatccgatccgcctccgccgcccccgagccgagctgagctaagctaagctagcaaatgggatcacggctcaagcagcagcgaggagggagaagaggagggcaatcaatcgaggaggaggaggaggaggggaaagggaaacagtgcgaggaggaggaggaggaggaggcgtctgggccccggggggaggcaagcaaatgggaatcgcctcaccaccacgttgcgggttcgcggggcctttgctggcgccgaccaaatccccccacatccagctccttccccccgcgccccctcagatatttttttctctactctctccactcctttcggcggcggcgctcgcggagagagagagagcgacgcgaacagaggcagagcagccaggttggcgcgcggcgaggggggggggggggggggggct

SEQ ID NO: 5804 - DNA, 8412 bp, Oryza sativa
tgcatgctccttagccaaggaaagccattcaaacaattagaatctttacctgaactttcaaataaaaattgtcatcgcttgcagttgggtgaaaatctggggttctgaattctcttaaagagtcagccttcacaacagaagctacaagtgtgatgtggccctcctttgtaaacttaacagcattgccagagatattcaaaatagtttgcattagcctcttttcatcaccgatggcacataatggcaagtctggtgccaacataactgacacagacagtctcttgatggctgcgattggcttgatgaaactcattacctgtaagagtaagacgaagtaaaatttcaggcaagtgcaatttgcatatttagtcattaaacaaccataaatgatgaagtttcagagttcagacctccttgaaaacagcatgaagattgaatgctttaatctccaattcaaggctaccatcctcaagtttggaaagatctaacacatcattgatgagtgttgctaaaagattgctgcttttcaagactgtttccaccatcaagcgctgctcaggagtaagttcggtttccaaaagtaaggacgaaagggctattattgcattcattggtgttctcatttcatgattcataacagccaggaaatcattacgagcacggatagccatttcagcctcacgtcgagctaaatccagagcaacattttgctccattagcagatcacgcgcacgcatggactcttcaagaatagctgcatgagaaagtgcaactgcaacctgaaataaaagagaaagatgattaaaaaaacttgcttacaacactgcctcattcatatttatgaatataactaaggtgataaaaaagtaaagagggcacttttagcttgcttgctgcttctcagtatcctttgttttcaaaaaaaaaaagggaaactcttggaataatataatgatatttgaaattttccatgaatcattgatcaacagatcatagttgtgaatatgtgttgttttaggttaattggtgactgttgtctatcgattgaaagatcatgagcacacagcttttgaaacatattaaatatcacgctctctctcctataaatacccatgttataagtaaccatagcaaaagaaacagcactaacctgatcagccacgacctcaacaagctccaactcatgcacatgccattttcttgcgctatcagatggaagcatcagaaccatgattgcatagctctttgctgaaagctctggccaatcatttatttgaaagtttgaaagatgtagaagaggaactcgcactgcagccacttctggtggaacatatctccctgcaagaggtcggatccgtgccaaaggagatgtgtggggtattataattgctctgttgctactgaacacttgattgacaacaggaagattaattgatacagttgacccaacagtaatctggtggcggagagtatgagaaagctgaagacttgaaccgcttcttgatggcatccatagggcacattcttccaggcccaaggtccctcctagctcaacaagtgtagtcttcaaaatcgtatgtctatcaagagtgcttctgatttcatgggtaagcatcctaacatgcctcccagtctcttcctgtgtcctaatcaagcccatctccctatcaagctgttcagctttattcttcagaaacaattcccttgttttcacgctcagcaagtcagggataatatgtacaagcatcaaagctgtcgcacaggacacaacagccgttgaaacctttgcgactgtcatgaccatagcaacagtctttgtgtgtgtggtgaaagtccacaggtttatgagatgagtcgctccacataggactataaatgcaccaaactggatcaaaacccatctgtatgggaagaaggatgacttcttcacgaaataaattagttccaacgggatcgagaaatatgcgagggctatgaagaagtccgagatgtactgatacttgatgaggagctcatcagttggccatagtggctcgatgcagtcacatccatccatacccaatgtttagaagttcatcagtcctcaccacactccctacagaagtacaaacatacatatgagctgtcctgtccgacccaatcaaacatatcactgaaagttcatgctgcagctcgttttaaaagaaacagaaagcatctaataattaggaaactgtagccgcatgacgatgaacacatttggcatactactagaccctgcagatcagctaagatgaagcgatcatcactccgattcccatttccaatccaccctcaacccccattcccaccatctaaagccaaggttgcaaccctctcatcccacagcagcatagcacacatccgaaatcactccccccatctcgaccaccgctctagcctcccgatcggtccaacaaactcggagaagacgggaaacctaaatcccagatctgaatagtccagcaaacgaaagaagagaagcacgagcatccgtagcgtacctcgcgcgtcgtcggcggcggcggcggggagcggcggtggccgagaggcggtggagctagagccctaggggaaaggagagagaggaggacgcggcgcagaaaagggaggtaagatagccagccagatgcgcagaggcaggcggcacggcagggaggcagccagtggggagccgtcaagtccgccaccaccagtccaccacccggaaaaggcaaaagcggaggaggagaaaaaaaaatccaaccgcacggcgggtgcttgctatagtagcctagtatactacaactagcgtggctttgcttgctgctgctgccggtgcgggtgccgggtgcgtcccccctggtctttcttttctctccccctcgcgtttgtctccacgctacagctagcgctttgcttttgactgcctgcgttcggtgtggcccacgggggccacacggcccacacacctcacggccggctgagcggtatggcatcggcggggggaggtggtcgactggtcgtgatgggtggtggtgtgcggtgcgagcagcggagagggtgtaggagcgaggtgcgctgtcgccgttgccggcggttcgccagtaagacgggtgtttccggctaaggggcaacgttgccgtttttaccttcgtgctcactgtagcatttttgttggttgagtagcagagacagtgtttgagatatatgaaacgaaaaaaaaatcagcgtatacaaaacgagaaagccattaacgtataattaattgagttttaatctctactgttataaaaattaaatatgtttttatcggtattttaatatgtcatccgtgtttgaatctgtttttaagttcgttcgtttttgaaaatacatatacgtgtttaagttggattttaaacttgtttgtttttggaaatacaaaaggagacgtatgacgtatatgaaatctctttaaaaaaactcacgtgctaacttgagatgaaaatcagactcctaattgcagctcatgattttctaaaaagaaacatccaagcgaattctcacagtaaattttaccctatctaaaccgtataacaataataagattttttagttattataaagtttaaaaaatatatttattttatattttaaaataacttctatataaaagttcttaaaagacgtaccgtttagcacttgaaaataagtgttaacgaaaactaaggtaaaatcatcatcttaattacctttcatgaagatgaagataaagactaagtgtttcaggtaaaactaggaggtaataacgtgtgattaattgagttttaattattacagacttgaaaaatagattaatcttatattttagaacaacttttacatagaaagttttcacacaaaacacaccgtttaacagtttgaaaagcgtttctcaagtatccaaaagtttattcaactttcgttgcagaaaagaacatgccaaaagtagcatggtaatgcttccaacctcactcacagctcctcacaccaaccgagcatctatgtatagtctaggcaaaaaaaaaatttcccttcatatttctgaccacgctaacggtttagccaaatctcaatgactaattcactagctaaattttttatattacaaataaaaaacacactccaacaagctagccaaatcccactcatcaaatcacaatggctaatttcatactccctccatcccataatataggagattttgatttttttgctaaatcccttatattatgggacggacggaggattacaattgattatgttaaattttgcaataataacattttttgtacatggggctgctcagttcttgatgtatagattttgagttgaattactgagttttgtgattgatatgatatgttcatcttgatttttgggctagttttgtggcccatgttgttgttttattgtttttggttttggtgcagtcgaaataattcctattggtatgtttttcttttcattggatctagatcaaagggctgaaaaaaatctgtttgatttttgtcaaaaaaaaagtcaatgaatagttagacaatcccaattagtttatcaacacacattataatccatcatatcctttttgttaatctggccatttcttattttcgtgtgaacaatgaagttttctaaagtactccctccgttttataatgtaagtcattctagcatttcccacattcatattgatgttagtgaatctagacatatatatttatatatatccattaacattaatatgaatgtaaaaaatgttagagtgacttatattgtgaaacggaggaagtaccacataatgtaactatgtctctttggtgatttaagttggatctacttgtccagtgatttgaggcgctatttgtccattggtggagaaaccatctttgctcggttgacccaaatccatagtagtcctggttccattaaaaaccgggagtaaaaacgatttttagtcccggtttataagaacaacaatactagatgatctttattcccggttggtgttaccaaccgggactaaagatcatctttagttctttagggaaccaaccgggactaaagatctaactttagtcccggttgttgttactaaccggaaataaaaatctaacacgtactatataatccctattacttatcttcttatatcgtccacacaacaaactctctctatctctttttttcctctctaactctcttcctctttcctgccttatctcattctttttggatagatcgagcgagagcgctgccttatctctatccagatcgagcgagagcgagagcgggtcggcgcggcggcgcggaggcgcggaggcggcgggctgcgcggcggcacggaggcgcagcggcgtggaggcgaggaggcggcgtgcggcgcggcagcgagcggcggcctgcgcggcgggcggcgcggcggtggccagcggcgtggcagcgagcggcggcatggcggtggccggccggcgtggagaggaggcggcaacggccggctggcgtctctgtgaatttttttttagaatttgtgatttattgcatgatcctgtaatgtattgatttgtgtgtgatgtatttgcgatgaattttgtagaacttgtgatgtaatttgatttgtgtgcaattttattttaggatttgtgatatatttgatttgtgtgtataagtaactttaaagatttgtgatatagatttgggatgttaccttgatttggtatttggggtttaatttggaatacgcatctcacttgatttgggagaaaataaaaaagaagaaaaagaaaaaaaaaggagggggcatctagactgctgttatctcatctttagtcccggttgttcccctatctttagtcccggttggtgttaacaaccgggactaaagatcgatctttagtcccggttatttcactcgggactgaagatagcaatctttagtcccaaatttatagtcccggttgaataaccgggactaaatgagggttacgaaccgggaggaaaaatggtttcttcaccagtggtccttgatgtacactaaagttgccaaagaacaagaggcttcttgttaattgccaaaaagatcaggtatgctaccacacttgatagaaaatgctaagcacatttgattggatatcagtgcctgtcatgttgctgatttttcttatgcataactctcgtggtacagggatcttcacccgtatcaccttgttctcttttgaaaaaaaaaaacaacgcatttgattggatgccggtactagtcgcgtcacatacatattactctcgcagcagaacgattatcacccgcatcacttatcttcgttgtcttctcttttttttttcaaagagtttctgtagtaatagatcatgtttttgtttcctgagttaaatggatccatgcattgtaactttttcgatgttgaaagataacattactattcatttattttgagacatgccgttataattgatcaaaatttaaaatataccactacataccccttcaatacaattataaaacattttagattagattactcttcctccttccttcaccccttcttccttctccctctcactaatctctgtcatctctcccaccatttgatctagtgatcctatccaacccaccggttggacactccctttgttctcaactctcatcattcatggtgccacaacacaagcgacacaagaaactctggttcctaccggccaccgaggactcactccgccgctagctccatcgccggtggtgtgacttcatctagatcccagataaaataagagagaggaagaaggaagagggggtgaaggtgaaggatttctacgagggatgatttggtccaggttattttataattgcattgaagagatacgtcgtggcatatctcaaactttaattaaattgtaatatcatatctcttaataagcgaataataacgattattttcaaagtcgaagatattacgatggcatggatccaattaaccctcgtttaattatgttctcaaagtgtgctgcatgtttcattctcaggggaactttgtagtgtgtagtttgtgttctttctaaaaagattattactactgttgttttcaccatagtagaccgtggctttcggatccagttcctaagcagtttttagtgtgactataacttaagtagtcgcactagagctgttggatacaaatcaggtccaaattcaatatgacacagtttatccagggcattcactatagaactgttatagtaatgctgcagtatcatttaatctaggtcttcaattgaaaatttggatggatgagattgtgtgcatttctagttaagggaccctttgaatcgcatgattgaaaaaaaatataggaatagataaaatgtaggattttaatagaaatgtaagtgtaaaacagatgatcacaaaacacagaaaacacaggaatgactagttgactgaaccgcaggaaaaacataggaattagatgagagagatagactgaaagaaaagttaccaagaggttgaagctcttgctaaatttcctctaaaatctttataggattatctattctataggaatttcaaaggatttgataggattcaatcatttatttcaaaggccttcataggaaattttcctatacgattaaaatcttctaaaattcctatgtttttcctctaattcaaagggccctaaaactgcactggatctcgatatgtggctttcatgttctactaaccacataaaacatgacaccacaatattctctccgtcctataaaaaatcaacctagtatcttatgtgacacatcttattacaacaaatttagatatacatatgtctaaatttatactataacatatcacttcccgttctagatttacctttttttttttatggagggagtaggccaatagcccagaaaaaactgcagtccaatgcactgtccccaaaagtagagccacgggcccactcaacccagccacccccaattttatccaaaattaacccatagtactatgcatgagtaaacttcaaaaactcaaattaagtcgttcaaaaaaactcaaattaaaacccagctaaaatacggttctgggagcctgggatgtccaatgtaaactcaaaactaaccgggaaatctttcaccgcgctcgcttctaaacggatccgcttcgcaacctcaacctgcccccgagatgagaatcagattcccccgtcgccatccgccgccggtaaaaccgcgcgctccatgcccacgaagcaaccgacgccaccaccaccaccaccgcaagggccccccgcccacgtgcgccgcgccccgcgccgcggctcgcacggcgcaccgcacctgcgcctgctaccgctgcggtgaaccgagcggaaggaacgccccccc

SEQ ID NO: 5805 - DNA, 2989 bp, Oryza sativa
  unsure (1)..(2989): unsure at all n locations
aaggagtgaaaaatgggggtaggtggacccctaaaccaagaacagccaagaatttcttctgtgagtttgtaagcttccatcgagtttagatactttgggactgctctaaaaaaaacgctccgccacagaagcctcgaaatgcaaatttaaaaggtgaagaagaagaagcttctccagacgtaaagttaaaggggacgtgagtcccgggcaaagtgaaactcattctcatagaatacacgaagagacctttctcttacatatattagagaaggtcacagcagttgtacacatatatacacttgataatgccctcgtgcatatccctatccaaataccgttggctcatcccgtcggattaattgttaaaagttttgaacagactttggcgcgccaaacaagtaaggtaaggacgccattctttggttggaccccggcaaccatgtaagancaggaccnggaaagngggannnnnnnnnncatcaacgccacataggatcctgaaggggttgtgacgatttgggacctagatgacacattatgacaagttctgggacttacatatgcattttaagagtttagggaactagatgacacacatctacaagtttaaggaccgcctgtacacttcactctagttttaaagaccgtaccaattttgatcgtactttatattatggaatagagggagtaattaattatgcgcttatcagttgggaaatggttccaacccttccaaactaacaaagccaagctcaaaaatttcttgattgggatttataatattttttaccatttgaattaaccggtagaggcgtgtcattctgacgcggacggccacttcagtttgatcttcttttcggaaatgtgaaagagagctggctagctagataggaagaacgaaacttgaaagctcaagctataaatatgtgtatatccaagctatagctaccaccatacacaccactgaccagtcgctacacatcaaagcaccagcaatggagacggtggaggcagccatggcggaggaggaggaggcgaagaagagcaagatgaggaagaagggtgggttcagaacgatgcccttcatcttcggtgagtaggaaatctcgatctgtttgaaacgctgtgagtttttgtttcaaattcgcatgagatttggcgtgtttttgcacgcacgcacgcacgcagcgaacgaggtggcggagaagctggccgtgctggggttcacgacgaacatgctcatgtacctgacgaggcagctgcacatgccgctcgccaaggccgccaccaccctcaccaacttcggcggcgtctccgccatgaccccgctcatcggcgccttcctcgccgactccctcgtcggccgcttctggaccatcgccgccgcctccctcatctaccaagtcgtacgtatacacatccacgcacgcacgcacgcaccacgcacgccgccgcggcgcgctgagctgaccggagcgttcgtgttcgcgtggcagggcatgctcctcctgacggtgtcggcggcgatgccggtgttccggccgccgccgtgcagcggcgccggcggcgcgggcgcgtgcgacgaggcggcgccgtggcagctggcggtgctgtacgcggcgctgctgctgaacgcgctgggcgccggcgggtacaggccgtgcgtggtggcgttcggcgccgaccagttcgacgagtcgaaggcggcggagcgggcgcgcacctggggcttcttcaactggtactacttctgcaacggcgcgtcgcagctggtcgccgtcacggcggtggtgtacgtgcaggacaacgtcggctggggctggggcctcggtgtgcccaccttctgcatggccgtctccgtcgtcgccttcgtcgccggctacccgctctaccggaggctccacccgtcggggagccccttcacgcggctcgcgcaggtggtcgtcgccgccgtcagaaagcggcgggtgccgacggacgccgacgacgccgcggcgctgtacgagaacgacgacatggacgcgcccatctcgctctacggcaagctcgtccacaccgaacaactcaggtaccagctgactgcgaccggttctgatcgagtgtggtttcgattaatttcagctgaattcggaccgaatttggttgttttcggtcttgccgtccccggcaccatcgaaattttgagtgtgtatatatatatatatatatatatatatatatatatatttcaatttttgaaaattggatgatttcctttttttgtggtgaaaattcaatctttgctccatttatagcatttttatcttctttttttgagaaaaaggaactctttacaatgcaaaaggtgaacaactatagtttcgacatgtgatcggttattacctggttaactggttttctcttacctatcaattattttgcactactatatcgaagcatccaaagactcacatatttacctttcttttactttcaaaaaaaggtgaaacaattaaataatgaaataaattaatataaaaaatgttatacttttatgaatttccaccaatatgaaaaaaaaactaatatatagatgaagcatgagaacacattagcataaaccaataaaaatataaaacagagcagattaattgatttagtaaagttacattaaagttgcgattttgtatagtaggaagcctacgtggtagacaaaacaaattttcaggcaactaatgcatagaaaaatattaagttttaatttacatttctcttcttgcaaaatatttaaacacgtttagtccataaggaaattaaaatcattgacaagtaacaccacctagcaactcttatttagagaactactactaactaccacattccaaaaccagaagagacatgatgagtctcttctggcatgggtcactgattcgtggacccgctgattatggggctatatagcaatcactcaaaaataatagaggaagtggtgtttctgaactctgaagaa

SEQ ID NO: 5806 - DNA, 761 bp, Oryza sativa
aaaatctctccatatcacctggaatgtgtcaactccaagatcaaatgtggttccacagaaactataataaggaaagaaatctttgatttatttcattacaagacattttgatgattaaaatattgtaccgttataagatgcaaagagctcaagggacatatttggaaagtcccatgacaaaatatttcagaaacatgctatttaccaaaagtagaatagcgaggcaaatcacatattaaaacttaaaagttaatgaaatactaaaaaaaaaatctgcggagggtgcataagggtcaatggaacagtcaaggtacataccgtcacaacaacagatttgtcctcattgtacaacggctggtctccggatgtgggatcaacaatagccaaccgctggtgtgcaagatagcaatcctgatagcagtgtataccactccaatcagggcctctatgacgtaacctatgaaaattggaaaacttgggttagtcagtgcataagcagttcaaaaaattctatcagaagatttattaaatctatgaaaactatgaattacataccgtcacaacaacctatgaaaaatgcagcatgccttgagtctacaacaagttggtactaattctatcagaagatttattaaatctacgttgaaaattatttgctctaatataaggacatacacaagaaactgtaaccattcagttcctaaagatcaagtggttgcagagtgcagactacagtgataaaaacatgccacattatacta

SEQ ID NO: 5807 - DNA, 2286 bp, Oryza sativa
ttagaaattcccatattaatcgaagaaaaagaaaaagatattaatcgttagattgtagaagatctctattttgatggtggagattaatacataatataatcttatttatagaaagtagaaaaaagatttatagatacagtccgtatgtagagtcatatcaagaaaagtaattaatcagatcgagtacattacatacagaagtttgaagagaaatcgtaaacggagaagataaaacaaattagaagtccccttccctcccgctttatgtatttgtagcattggtcgagaaagctaccgatagtgctaagtcatcccttcaccgttgacgttgtggtgcctggcactggcagcatggacaattggacgacaattctcaaggcataacagcacatgatgtggctggcgctcgaaaattacaaagctaaagtgctagcagcaatccaattgaaaatagcaccgttcgttgttcctcctaacattctgggtagggtatatatctacggtttggtgtattattttttaaaaaaaaatccactctttgcgtatacgtttggaaaagaaataatattagctcaccaaaatcatttgagtaattttgtatgagcgcaatcgcgcgggtttaatccaagaaaaagaaaagaagagccaaatcaaaatacgatttaaaaataactgaaattcaaaataaaaaataagagtccatgtaataacccaacacgagattaattaaaattcagaataaaaataaaataaaatccgaaattaagaaaaatagaataagagttcaagtagaaatacaatttaaaaataactaaaatttgaaattaaagtaagcaatattgaaagaagagtttatataaaaacccaatacaagattaactaatttataataaaaataaataaaataaaatccaaaattagaaaaataaaaaagagagttcacgtaggaatacaattttgaaacaactgaaatttgaaataaaaaaataatgaatattaaaaataatagtccatatagaatattaattaaaatttgaaacaaaaaataaactaaatcctgaaattagaaaaagaaaaataatatttcaattaggaatacattttataaataaataaaatttcatcataaaaaataaaggctattgaaaaatagaatcccaatgatgattaagaggagaaatgacgagcccgttaaacaacatagttatggcggttggcgggacttaaagaaagtaaaaaaaaaaagccaatgataaacatgttcggttttaaaaaatctcaatgataataaggatgggaggcagcggtagagccgtagaggactgtagtgacgaagctgctgacggtttggtgggactcttagaaagtaaaaaagaacacacacaataattatgttcggtttttaaaatcccaataacaataaagagatgaggcagcgaacgggtggtaaatgagtacattgacgacgtttgaccggacaatgaactctaaaatctacaaggtctaatttttaaagttgtaaagagaatgaatagaagtagtggtagatcgagtaagcaaataaaggggtgacaaaggagtgaggtgtagcgattgacatgacttttaaaaactataaaattagaaacataataatgatatttttaaataaaatcatatgtaaaaaatagataattttatagggtgctagccgtgcaattgcgcgggcacccaactaattcacattaattaagggtattgtgctattttgttttttccttgaaaactccttgggaagctagggtttgagttatttagggagagtattagtaacttaggcctagcttagttaccaattactccctccgtcctataaaaaaaatctaattctaataatgggcctaaacacacttttaaaaaacataacgtataatctttgaacacattcatatccttaagatgatactcatacgtacatgcgctctcagattctttcgtggaccaccgcggcacgggtctctggccattttgacgcaaagccctagttttgtgccttggggtgcaatctacgagggtgaggacagtgacgatcccgtccatctatccgtccagttactctactgtacctgtaggagtacagtacgtacttgtgcctagaggcacatactcctatactactttctgccatgcatagcctagctggctttctctctgtctctctaccacactcatcatctgcaggatcaggctggccctggccattgagcagcaggcagcagcatagcagcagcgcctggatcgtttatt

SEQ ID NO: 5808 - DNA, 17848 bp, Oryza sativa
  unsure (1)..(17848): unsure at all n locations
tggggtggaattganancctgatattcgagctcggtacccgatgtcgcgattccggtatttgcatagtatggggatcgttggtactaggatatacgctagactgagataaaagagatggggacaaggagttttatacagggtcgggcccctgaatggtcaagtaataaccctacatcctgttggccgaagccggtattgctcttattcaccataatcacaccagtacaatatttggggtagcctatataactgttgtcgacatggcggtctgaagatctaactcgtagtcaacaacaaagtagtcttcctcctcgaatccgtgcccggcgagatcagagataacgctttcgtctctcctgacagtatccggagacaccgtaggggactagccgtgcttatccctgaagtcgatatccgacgtcttgtcttggcgtatgttggcttgtatattgatcttctgtcttgatctatgttccgtgtcttctatggtggatgttgattgtgtcccctctcctcctaaggggccttttatttatacccatatgtgtccccttgtccaagtagaactagggaaaccaatatggatacaattcgagcagtctttgtcgtttccatgtagaactttggttgtctttccttatccggaactccctcgaggtcagtttccgtataagacatagtatgtggtgggccctaccgacatggtatgtggtttccataaccctgacaaggatgtagggttattacctgataattcaggggcccaaacctgtataaaaattctcgtctgtctcttttacctaagtctcgcgtatatcctagttccaacgatccccataccatacaaatacctcacgcgcgcgctcctttggtgtcggtatatcctaagtctcgcgtatatcctaagtcgtcgcgtcccgccacatcggcatttcgacaaacacctcacgcgcgcgcttctttggtgtcggtcgtctgcctcgcggcgggctgcaacgtcgtgacgcgctcctcctcctcctcctcctcctcccatggccggtgccagcggcgagcggccggcgagcaactgggactggtcggactgtgacgccgcattcaccgaggaggccgacggggcgatcgccgcgctgcaggacacaggcggagacgggctcgccaccaagcagctcctcgggaggtaccacaccatccttgcgcaatggtacttcgcgcgcgcggatcagcaaaaggcgacgaatcacctcaggagagcagcatggatggccccgtgctgcctgcacatcgcctttgcgctcgcctttgtgctcatcgagatgggctccttcgatgaggcagacatggtgtgtgcccacaacctcctcgtgccggatctcaccaaccctgcgcacaacttcatctccccgaaagagcaggttgatgccatcatcagctccaaagctccagagtatagattgggacgcggggcaatttaggcattttgaaaaaatactcgccactttcagccgggaaatgataaaataataagctcggtgtcctacggcaaatttcacaaaatttgtagtgtcctggagcagttaaacattttctcggtgtccctcagctaattacgcgttttttgagtgtcctgtagcaaattttgctataaaaatattaaaagaacactatacggtattaattaaaatttggaaaaaaaataaattctgaaattagaaaaagaaaaaagatttaattagaaatataatttataaataactaaaattggtgataaaaaataaatactattgaaagaaaagaccatgtaaaacacatgacgacataaattaagtaacagtcctataaaagaatagagaggtggtggttgatacgacatataaaaattgttaataatacaccaaatagaattataagtaattggcctataaaaatgtagagtggtggcggttgagaaaacatataaaagctgttcataaaacaccaaatagaatccaaatgacgattaaaaggagggacgacaggaaggccgtgaagcaaacgggcaatgcggttgccgggacttcttgaaagtagaaaaaataaaccccattgataatcatattcaattttaaaaatctcaatgacaataaaaaggagaagcagcgggcggggtgtataggagtatagttacatagccgtacagttggcgggacttctagaaaataaaaaatgaattccaacaatagttatgtttgatttttagaatcccaatgataataaagactaagaggcgaatgggtcgtataggagtatagtggcatcgtgtgacgatacttcaaaagttataaaaaaatgaaacccaacaagacaataaaccaatttttaaaggttcaaaacttctacaaagtgaaaaaaacgatgataatcatgttcgattttaaaatctcaatgataataagaagggaggcagcgagcgagtcatagaggagtacaatggcaaagctgtcgacggtttggtaggacttctagaaagtaaaaaaatgaacccgaacgataattatgttcgattttcaaaatcccaatgccaataaagagaaaagacaatggacgggtgtcggtgacatgggaccgggagtatcatgactcgaggcttgaggcagacacaatcgcccacgtggcctggcaccctcgggggacgtcgggcccgagggtgatgtgtgcgcccacctcttggtctccccgagggggggggtcggaccactccagcctcgcccccgagggccgaggcgccccgacccctcgcgttttctactccacgtgtatgggttaggtgagcacagcagggctcacctaaccgcatttattgcgcctcggctaagcgtgtcacgccgcacgaagtgcggtgcagtgcactcgattatccggtctgtgaccagtcacagaccggtcaaatcgcgggttaggtggcgacaggcggtcagacgcatgcttcgccccatcctgtcaagacgagagcttctaggcactcgttcccggctggagctagcgtgttacatcccagagatgacacgttagccccgatcgatatatgccaggcttcatcctaaccattacaagcaagatgttgtgtgaagaagggcaaacatgcacgttgctgagccgacgcttggtggacaagaatgaccgatttgtgaccggtctgacactgctcatgtcgtcagcacacagccaccttcccacgacgtgcccgcctcaggcagaagtggaggtaggtatgtgccgtcccgtcaggaggatgttcggaggacgaccgtgcaaatctccgtccatttatgaaaagaagaaaagtccagtttggaaagggaggggtgcatgtggtatccccttgaagtataaaaggaggaccttgcccatagagaaaggggttggttgattctttccagattcagagcctagaacgagggagaggtcggctcacactttgtagctcctccatacacagatccaccaaaacacaggagtagggtattacgcttctcagcggcccgaacctgtatacatcgcttgtgtttcatgttctcttgagaggtggcgatctttccgtcatctacagcgagagcttgagatctcaccctgagcccccggccgaaccggcaaaggggggcctgtgcggtctcccggtgaggggccacgagctccgtcatctggcgcgccaggtagggggctcagcgagtgttttctgagctctcgcacttttccgggtgcgtcaagtttttcttgatcagcctcatggctgagcaagcaaaggcacccgacctctctcccagtgtgagtggcgacgacggggagccgaatccacgccgtcgagctcgtactccaccgccccctcctcgccaaagtcctaagcagggggaggcgctcgaaagggtcgaaagatccgcggcttcaccgatcgcgggcgatggaggagaacggcgagatggggagcgtcgcctcctcgtctacggcgacggcagcacgccccagggcgcgctccaagctgcgggcgcgctcttacgccacccgcctgtcgtccctgacccggaatctccagcccaacgatggctggacgacgtggccaaattggtcatgacggcgcggcagcgcctagatgctggtgggcggtcctccgccaccaagacctctggtgctgctaccactggctccgcgtcgtcaagacgaagggcacgacgagcagcagccgctgttcgccgttcagtagccactccctcatcgactccttcgacccgagaagatctgcgtagggagcagggcgcccgcgccagcctcgagcgccggcgtaatgaccgaagtgctgcccacgcaatggaaggcgcttcctcgtctagagtgtcacctcgacacggacgtgggaatcagccctccgtgcccccggttggtggtgttggctgtagagccttcgtggtgagtcttcggaatgtccgttggcccccaaggttccggcccaccatcgccgaaaaatatgatggcagcgtcaaccccgccgagtttctccaggtctacacgaccgggattgaggccgccgggggtgacgacagggtcatggcgaatttctttcccatggccctgaaggggcaagcacggggttggctaatgaacttgccacccgcgtctgtccactcctgggaggatttgtgccagcagttcaccatgaacttccaaggcacgtatccgcgccccggtgaggaagcggacttgcacgctgtacagcgaagggacgatgagtcgcttcaatcgtacattcagcggttttgtcaagtccgcaataccataccatgcatccctgcacacgcagtaatctacgcgttcagggggggtgtgcggcacaaccgcatgctcgaaaagatcgcctccaaagagccccagactaccgcagagctttttcagctcgcggaccgagtggctcgcaaggaggaggcctggacttggaacccctccggttccggagtggcagcttcggccgcccccggatccgccgctcagtcagggcggcgtgacaggaggaggaagaagaggtcagtccgttccgactacgagggtcatgtcctcgccgtcgagggcgcttcacgggccacccgaaaggggaggcctgcgagcgacaaaaagaaggaggccagcgttcccagcagggagcgccctaccggcaagtggtgcaccgtccacaacacctccctccatgaccttgcggactgtcgcgcagtcaaaagcttggctgagcggacaaggaagtgggaggaggagaggaggcaggagcgccgggaaggcaagtccccggcggttccttccggccgtcggcgaagtgaggccaagcagaaggcccccgccgaggacatcgatgatggcgataatgacctaggtttccaagagcctggggctaccatagccactgtcgatggaggagcgtgtgcgcacgtttctcgccggagcctcaaggccatgaagcgagagcttctggccgctgcccctactcatgaggcgacgcgccgggcgcggtggtcggaagttgccctcacttttgaccagtccgaccgcccgccgtgcgttgcccggggagggcaaattgcgatggtggtttctcccaccgtttgcaacgtgaaacctacgaccttctgcttaggaaacagcctaagcagaagtcctcgctcctcaccgggagaccgcacaggcccccctttgccggttcggccgggggctcagggtgaaatctcaagctctctcggtatgtggaaagatcgtccgccaggaagaaacgcgagacacgggcgatgtatacaggttcgggccgctgagaagcgtaataccctactcctgtgttttggtggatctgtgtatgaaggagctacaaagtgtgagccgacctctccctcgttcaaggctctgaatttgggaagaatcaaccaacccctttctctatgggcaaggtcctccttttatacttcaaggggataccacatgcacccctccctttccaaactggacttttcttcttttcataaatggacggagatttgcacggtcgtcctccgaacatcctcctgacgggacggcacatacctacctccacttctgcctgaggcgggcacgtcgtgggaaggtggctgtgtgctgacgacatgagcagtgtcagaccggtcacaaatcggtcattcttgtccaccaagcgtcggctcagcaacgtgcatgtttgcccttcttcacacaacatcttgcttgtaatggttaggatgaagcctggcatatatcgatcggggctaacgtgtcatctctgggatgtaacacgctagctccagccgggaacgagtgcctagaagctctcgtcttgacaggatggggcgaagcatgcgtctgaccgcctgtcgccacctaacccgcgatttgaccggtctgtgactggtcacagaccggataatcgagtgcactgcaccgcacttcgtgcggcgtgacacgcttagccgaggcgcaataaatgcggttaggtgagccctgctgtgctcacctaacccatacacgtggagtagaaaacgcgaggggtcggggcgcctcggccctcgggggcgaggctggagtggtccgacccccccctcggggagaccaagaggtgggcgcacacatcaccctcgggcccgacgtcccccgagggtgccaggccacgtgggcgattgtgtctgcctcaagcctcgagtcatgatactcccggtcccatgtcaccgacagtagcccccggcgttatgccagggcgatcgcccttcttatgggaagcggccgggcgtgacgccactcctaaagcctggtgacaggtgggaccggtctccatggttgggcaaaaacccaacggtctcaaaccatgcacaccggtaatggtaatttggctgtcaataatgggcggtctcttcaagactgccacatcacctgagcggcgcacgaatctgggcgagccgatttgcctcgcctggagatacggtaatgtcgcttcggtcggcgagcgtaattaacgcgcgcacgatacgatctatctcgactgccgcaaccgcatatccatctcacgcgccgcaagcgggcgaatgggattagtggaagcgtgggcgcgagaaacgagggggcgaaataatgggcgcgagaaacgaggagccgggcacagcgttggcaagggtataaaggcactgaggatgagatttgtctccttcctttcgccatcatttcccttgccttcgccgcttgcgtcctaactccttcttccctgcgcccttctttcgccacacgcgctcgctctgaggatctggctgcgctcactgcatgtttgcaatgaggacaccgttggggcgtgtcctcattgatggaggagcagccctcaatatcctttcccccgcagcctttgatgccatcaaggccccggggatgatgctccggccgtcccagccaatcatcggcgtgacgccggggcacacttggccgctaggtcatatcgacctcccggtcacctttggtggacccgccaatttccgcacggagcgggtgaacttcgatgtggcggacctcagtctgccctacaatgcggtcctggggaggcccgcgttggtgaagttcatggcggctgtccactacgcctacctccagatgaagatgccgggccccgacggccccatctctgtccatggcgacctcaaagtcgcgcttgcttgtatggagcagcgtgcggaccgcctcgccgtcgtgtccaagcccgagggcggcgacgagaggcttgacacatccgcccccgccgccccgaagcagcggatagtcacgtccgatgaggtcccggtcaaggaggtcacactgggcgacggcccgtccaagaccacacggatcggtggtcttttggacggcaaataggaagacgcgctcgtctccttcctgcgggcaaacgctgacgtcttcgcatggagaccggcggatatgcccggggtccccagggaggtgattgagcaccgtctcgccgtgcggccgggcgcaaggccggtccggcagaaagtgcggcgccaggccccggaacgtcaagccttcatccgcgaggaggtggcgcgacttctggaggccggattcatccgcgaggtcatccacccggagtggctggcgaacccggtggtcgttcccaaggcgaacggcaagcttcggatgtgcatcgactacaccgaccttaacaaggcatgtcctaaggatccttaccccttgcctcgcatagatcagattgtcgactccacagcagggtgcgaccttttgtgttttctagatgcatattctggttaccatcagattcgcatggctagggaagatgaggaaaaaactgcgttcattactcccataggaacttattgttatacgacaatgccctttgggttaaagaatgcaggtcctacttttcaacgtactactcgaatttctttgggtagccaattaggacgtaatgttgaggcttatgtcgatgacttggttgtaaaaacgcgcaaccaggaaacgttgctttcagatttagcggaaacttttgagagcctccgctccgcccgcataaaactgaaccccgataagtgtgtgtttggtgtacctgcgggcaagcttctcgggttcttggtctctgcccgaggcatcgaggccaaccccgagaagatacgagctatagagcggatgcgcccccccagtaaacttagggatgtgcaatgtgtcaccggttgcatggccgccctaagtcggttcatatcgaaactgggagagaaggcgctacccttatttaagctcctcaagcgctccgggccgtttacttggacggaggaagctgaacgcgccctcactcagttgaaagcatatctcagctctcctccggttctagtcgccccggagccaaacgagcccctgctactctacttagcggcgaccccccaagtagttagtgcagcgttggttgtggagcgcgatgagggcaatcctcattccgcgcacccccaccctgtgctaacttggcccgggagcgagcagggaggagaggccccgagccgaacggtggcctaaggcccctggcgaccggagtcggccctctccccgctcgtcagatggtgctgggcgcccccgaccctcaggaaggccccgaggccactgcgggaaggctgcacctatcgccctctgaccccgaggctaaccctgtaccgattcgacccgggagggagcagggagaagaggcccccgagccgaacggtggcctaaggcccctgacgaccagggttggccctttgcccgcttgtccgacgacgccaggagcccccgacccccaggacggccccgaggccactgcgggaaggccgcccctgtcgtcctccgaccccgaggtcatcggcacagaagacgagtgcgccccgaggggccacttggacgaggagcgccccggggatatggcccttagcgaaggggatcggccccaccgaagggtgcagcggcctgtctactttgttagcgaggccctccgggacgccaagacccgataccctcaggcccagaagatgctttacgctattctgatggcctcgaggaaactgcgccattatttccaggcgcatcgggtcactgtggttacgtcttaccccctcggtcaaatcttgcataatcgagagggtacaggacgagtggtaaaatgggcaatcgagctttctgagttcgatctgcactttgaaccacgccacgctatcaagagccaggccctcgccgattttgtggcagagtggaccccggctccagagaccgtctcaatccccgaggccagcacggacccctctcagctgcctcacaccgcccactgggtgatgcagttcgacggttctctgtctctccagggcgccggtgcgggggtcatgttgacctctccgaacggagacgtcctcagatacttggtccgtctcgactttcgagcgaccaataatatggcagagtacgagggactccttgccggactcagagtggcagctggactggggatccgccgtctcttggtgttaggcgactcccagctagtcgttaaccaagtctgtaaggagtaccggtgctctgacccgcaaatggacgcttacgtacgccaagtgcggtgtatggagcgccattttgacgggatagagcttcggcatgtgcccagacgggataacatgattaccgacgaactctcacggctcgcgtcctcgcgagcccagaccccaccgggcacctttgaagaaaggcttacccagccgtcggcgcgacccgaccccctaggggagacggatgtgcctgaccggcccccgaggtccgtcggagtccaggcctcgggacccgaagggagcgctgcaagctcccttagattgattgcttggatctccgagatccaagcatacctcacagataagactctacctgaggaccgcgaagggagtgaacgcgtccaacgcatttccaaacgctacgtgctggtagaagggatcctctatcggcgcgcggctaatggaatcctcctgaagtgcattcctcaggaacaaggcgttgagcttcttgccgatatccatgaaggcgagtgcggagcccattccgcctcgcgcaccttggttggcaaggcctttcgtcaagggttctattggccgacagctctcaatgatgcagttgatctggtccggcgatgcagagcgtgtcagtttcacgccaagcaaatccatcagccggcccaggccctgcagatcataccactttcgtggccatttgctgtctgggggctcgatatcctgggaccgtttaagcgggccccgggcgggtttgagtatctgtatgtcgcgatcgacaagttcactaagtagcccgaggcttatccggtcgtcaagatcgataagcactctgcacttaaatttattaagggcatcacggcccgttttggagtgcctaaccgtattattacggataatggcacccaattcactagtgaactcttcggcgactactgcgaagacatgggcatcaagctctgcttcgcctcacctgcccaccccagaagcaatggccaagtggagcgcgccaatgcagaaatcctcaaaggccttaaaaccaagaccttcaatattctcaagaagcatggcgattcatggatcgaggagttaccagcggtgctctgggcgaaccgaaccacaccaagccgagcaaccggggaaacgcctttcttcctcgtctacggcgcggaagcggttctcccatccgagctcaccctgaggtctcctcgggctaccatgtactgcgaggttgatcaagatcagcttcgtagagatgacctcgactacttggaagaacgaaggcggcgtgcggccctccgagctgcacgctaccagcagagcctgcggcgttaccatcagcgccacgtccgggcccgatcactctgcgttgacgacctcgtcttacgccgcgttcaaacgcgtgctggattgagcaagctctcaccaatgtgggagggtccgtatcgagtgatcggtatcccccggccgggctccatacggctggccacgggcgacggcacagagttgcctaacccttggaacatcgagcaccttcgtcgcttctacccctgagggggggtcgggtgtcaggtttcgggctcgggtcaaccccgcaccccccctcgggtgtgcagggttgaccgggggctgccacacatgcacattctcatttctctcatttcagtatttcaataaaagcagtttcaatttcctaagggctgtatctgtgccgtttttttttcctttttgaagaattttgacttgaaataaggtcactcgtgctcaaccttgccctcgggggctcggttcggtcagctaaaatcgccaaacggggcccagaaccgagccgtgcccggggcgtggtgaactccgggggggaatcggcaaaaacccacaatcgggtcacccataaccctcggtcaccacgttcccggcctggccagtctcgacatgcggatctccccaggcactagtcccgacccgcgcttttcgaggactgggacttgggcacgggcccttaaatcaagctaagacacaaaaagaggatcacggcacagatcatcctcatctcattcgcatagcaaaataaaattaacacaaagaattttttcatcatttttgattgcagattgtaagttgatttatacaaaaaacaggcccgagggccttagaagaaagaaaaagaagaaaattgaagattggcgggggcctgggggctcaatccgatgcgcccgggtcgccggcctcgtcttccacgtcgtctgcaccgctggcatcgccctcctcgtcggagttgggggcgaacgcgagccgaggggccgacccctcgaaactgtggacgatgtggtcggcggcatcccggacccgcgcgcgcgcgtcgtcctcggtcccgggagggaactcttccagcgccatccatggagagaagttggggtccctggcctggtaactcgctagtacgagttcaaccgctccttgggcgaggtccctcgaggatgacttgatggtcttctcgagctcctcggggagttgttgaagagcccaggccatcttcgtgaggtgcggagcgaggccttccaggttggtggagtgcgtccttgtctggcctttccagaggcccgcttgctggccggcgcgatccagacgggagactgcatcccagagcatgccgggccctatctcgcccgccaagcggagggcctcggcttccccggcggatgagtctagcgcgcgctgcatgtccgcgacggtgtgttcggcatctgcgaggcgggcggctaagtcgctttcgcccgcagccgccccgccgatgcacgccctcgcgtccagctctttttcccgcgcctcgagatcggcagcccgctgctccagtgcggctctctcggcgcggacggattccaaattgcggcgggcctgctccgtcagcgctgcctcacggagggacagggagtccgccaaccgttgcgcttcggcctcggcctcttcgagagctcgctcccgctcggcaagcgcgtcttcgcggaggcggagtgcggactcctcttcggcgcaggcagactcgtgcgccgccagcgttgcctcccgggaggtgacggcggcctcgcggtccgccaggactttctccgcgacgcaggcgcgctcctccatcgccatggcgcgcgcctcgagggcctcttcacgccgccggagcgccgcttcggtctccgtcgctcgctgctctcgggcagcggcggcatcaagaaccccctgggcggcgtcgagctttttcttcagctccgcctcccagttcccatgctgaaggcggaggaaagtggtatcagagccatctcgactgtagggtaagccaagtggataaaacctaaggacatattttataaataaaactatttgcgaaagttcctctttttctccttcccctaatgctatttgcaaaaggtttactcttttcttccttcttcaaatttcaattagtactagttggtcagatttgtgaagaaaaagatatcgtcagttgtttgccgaagctccggaagactgcaggattcgctagcgaagtgtaggaagcagtgaagccagctgtgaagccgaagctaagatcttggagaacctgtcgctgaacctaagccaccctctagggtagagtcgttagtcgtgtgttccttgcttgtgtgtgtagtgcgtggtttgcatcggtgggttgtgatgtgaccatgctaggttgtttgtttaatcaacttgcagaataagcaaaacaaacaacacatcaacaaaaagagttagttcctttaaggtcttgtccctagctctggtctattctttccttgtatgcttcctctctcaacccctaccttgtgacagatggataacactggtaacaaaggctatgggaatgatggatccgatgactcaagaacccaagccaatgggaatgagaaaagcatcaacgaaacctcaccagagctaatccaaattgtggttaaccaaaccaacatgttggcaacagcctttcaactattacagaatcggaacaacccagcaggggcaaccaacgttcaagtacctacagtccagcaacagtgcaagttatcagaatttctcaaaacggggcctccaacctttgccatggccgtcgatcctatggaagccagtgattggttgcgcacagtcgagaagaagctagggttgattcagtgcaccgaccaggagcgggttggcttcgcaactcatcagttggttggaccggcttcagagtggtgggatagctacgaagcatcacggccagaaggacataccatcacctggaacgagttttcatctgaattcaggagatcacatgttcccgcaggaatgatcacactaagaaaacgagagtttcgctacctgaagcaaggagatttgaccgtcacagagtacctgcatgagttctatcgtttggctcactatgcaccagaagatgtggaaacggatgaagacaaacaagagaagtttctccaggggttaaaagatgagcttgcagtgcaactacttctagaggattatgaagattttgagaaacttgtggacaaagccatgcaactcgaaagtgagcataatcggatgacgaactgcaagagaaggattgtcaacatcccagtatttccaggtggtaaccaaagacagcgcactgagccacttcagatcaccggatcttctgttgtgcatcaagagttcctgccccaagaagatgaacacaatgcagacaacaacactagcaatactaatgatgatgataccaccaacaaccatggttcttgccccattagtgaccactcgaataaagcgtgcaatgtcagtagcattcaccaagatgtcaacgatagtatcaatgttggaacccagaatgacaaccttagcaatttcgacactgagaaagactccaatggtgatagcaactatggtaccactgatgccaatgttagcaaggattcccaaccaccaattccaactccaagtcaaaatgatcgtccccagatggacagctcagtaaagaagacgttgatttgttacaactgcaaagaaccaggtcatttctctagagattgtccacagccgaagcgtaacctgcgccatcactccggccattatgcaagaagaagacaagtcactcgccttgtggtcactggagcaaacgctgtacctgtgaggcctcatgttaattctaacccatagtagaaacaatgtaccgatgttaagcaccttccctttttgtttaagacagtgccttgtattcatgaaatatgggagaaatttgtaataaaaacaagttctaagaggattcttttggaagatgcggatatgtgatcatgtgtataattgtttactgacaaaggagacctagggtctcgtgccagaggaactatattctaacctcgagctaataaccaacctgaggatggaaaagaaaatcaagtgattaaccaaagagacatttgtttggactaagagtttcagatgtgtctttttcggatcgaaggcaatgacagtcagtatagcttttggcgaaacacttcaaggtttcactgaaaggtagcagaccaaaggaccacatcgtcaccagaagcatccacaactctcggagagaagagtacttggttggcaaagtttaaaaggtgattgatagaagataccagcaaaggtgtttattaccgggcaaggaagtaggtcgaaaggtgattgataagagaaatttgaaaagaacacatcagggttgaatgtgtaaaggaatactttgaatgctaaatgatgacaaacatggtatcctagtaatgacaagctagtgttgacgcatgacatgaagtggtaacttgtatgaggttgactccaaagatatgagttataagaagttctggaactgaagccccatcttccaatgccgcagcccagtcgaagtcagctagaggtgcaaccagggaaaagtcaggtgaagagaagattccatctgcaacaggagattgagccaagcagtccagagtggagaagttttgctaggcaagtttgttataaaagatgcgacggaagaagtcggacaagaagagaagaccgcccaacctatcttcttgctagcctcctcgaatctcggggacgagattcctgtaaggggggtggatttgtcacgtcctgataaattcattccaaaataaaattcattttctaaaaggaataatagaattaattaaaattcgaaaagaaattggcaaacactaaagtacgtataagaaaaattcgaatgtggcccggagaatttttgttaaattctccttggtctaaaaggagccctcaaattttacttgaattttcagagcaccggaaataattattaagcaacaaaaacaattatcaaagtttactaaaaaggaaaacctaaaaaaataaatcctcttcctcctttgggccaagcccagcccaaagtcttcctctcctccctctctttctctccctctccttctctccctcctcttgggccccttcccctcggcccagtccctccctttctctctcttcccccgcgtcccatcggctactccccgcgcgcgcgccgctgacaggcgggcccgcccgccgccctcgctgacgggtggggcccacctgttattcccaaccccgcgccgcgcccgccgnncgccgtgccctagcgccgccgccgccgccgaatccgccgcattccgccttcctcgcgcgccataaagaggggcgaatcactccccgtgattccctctcccgtttccccctcttttccctctctctctccctcggattcgttcggaatcactcccgcaatctccgccggcgcatatatggagcccgaaaactccgaggagggtttccttcctatccggccgctttccctctctccggacgctataaaatcaacccccgagctccgctcctccgtttccgccgttcgcggctggctctcccggtaggattcgtgctcgcgccgctttcctctctctccgccgtcgccgacgagttccggttcgccgccgccgtcgctccggacttcctccccactcggcgtcacctccatcgggttcgccgtgttcccgtcgacctcgtccgcgccttcgcttcgcccgccgaccgccggagctccgtcgtcctcgccgtcccgaaccgcgccgccgccttcttccgcttcggccgccgttcccgtcgtcgccgtcgaccggggtgagccgaagaccgttccgttcgcttcccccttccctcctctctctcgggtgccgctccgccgccccggtggtcgccggcggtgaccatcggggcgcgggcgcgttcccctcccgtcggccgtgccggcgagaccgctttcgggcgcgccctcgcggctgccaagtgggcccggccgtcagccgcccgcgcccgcgggtgcggctgacgcgtgggacccacggcgccgaccgccgcaagacgcgtgctcccggtccaccgtggaccgagaggctgacgcgtgggccccactcccgtggacccggtccgcgcgccctctccctcggctgacgcaataaatgcgtttttaattaaaatttaaatgaagaaattcgtaaatatccatttaaagagcatataaacttcaaatggccatatcttggccatttgaactcggaattggaccgttcaagtctctaatttttccttaagaagtcaagaacccatttttgtgctttgtttctcctgttatgtgcagtttattagagtaaaagccttttcttttcagtggggaatccagggctgctaacgccac

SEQ ID NO: 5809 - DNA, 1750 bp, Oryza sativa
ccaggggtcctttaaaaaaaaaaatcaagccacatttttattttattttattctgggtcaaaatggactttttaagcaattgcatcaatctgtattagaaagtattaagagcattccccaggtatcacacagtgccaaaaacttcttgtgatagaagttgcaaggggttgccatgatgacccctattgtttgagtttccctaatataatggcaactagtttcagcaaaatatgaaatggtcaaacaatcagttttgatcttaactagaaactagtacctttaacatagcatacgaactacaaatattcaatggatgtttagcaaccatgacatttgaagacccagttgcatttcttacttcttcgccgctccattggtacttcagtgaactgcgaggaaggagatgagtattgagtagagaaaaagactatttgacaggtcaaccgttgtatcacgagaaaggttctgacctacaaagatcatataaagcaaactcagagctatcaagtccagacaactgccttctatcatgcaaagaaatgtcaagctggtgacacaaaaacacaatatatgcaatgtcaatttaattataattggatgtgatttcagctttgaaaaggcctaagaaatattttaaggcattattccaccttcattgttgacaagaacttgtagatggcactctgctcccaaaaaagaaagagaagtgtcagcgctttaacaaaaggtacccaagttcttcaaatcagacaaatctacttcataacttaagatggactaaatgtgacactatcaatctagagcatgatgagtagaaagtattgacatgtttacatttcagttctggtaaccaaaaactttaagtaattagtttaccctagatatttaagaaatctaaacatgccaagaaacaactaatacatacatcaggtgtgctgttgaaatcaccagcaagcacgataggaattccaccccatttttcagcaagagcatttgccttctccagtagcatgcggatctgaacggacagataattggaaacgaaaactgcttagcaaacaattagtcgagtaaaaagtataatatgttgaatagacatagataaagttgaggtatagtttcaatggtgcatcttaattgcagtaaaaatatagtgcgttgaatatacatagataaggttgaggtatagtacatatggtgcatcctatttacatcagcatatatgagcattatgcagtacatcagtgattaacatgaaaaaggtccagtttttgtccctcagtactttacaccctaaccttcagtaatttctaaaagatgtcattcaacaaataaaaaaccatgcacatcacatcctggtgatagttttgaaggaggtttatatggatcctacatggtgtgtgcccgtgtgctagtgaggtaatgtggcttcataatttagaaaaggaaattagttggaccattttccagaggacgagtggataccatgcgtcaaaataaaatgatggtgcagaaaccacataatcctatgcacaaaacccaaataaaaaaaaagaaacataaacagctttggatgcaatttgctccagttttaacatttaagggaaaaactaaaagttattgaaaaacatggtgaaaacaactaaattaggctccagtaatagttgaaggaccaaaagtggacatttacaatgaatattttgtgcaggcgattttaggacatgatagagaactggacgaatgatatacg

SEQ ID NO: 5810 - DNA, 5836 bp, Oryza sativa
  unsure (1)..(5836): unsure at all n locations
attgcagtaaaatatagtgtttgaatatacatagataaggttggggtatagtacatatggtgcatcctatttcatcagcatatatgagcattatgcagtacatcagtgattaacatgaaaaaggtccagtttttgtccctcagtactttacaccctaacttcaagtaatttctaaaagatgtcattcaacaaataaaaaaccatgcacatcacatcctggtgatagttttgaaggaggtttatatggatcctacatggtgtgtgcccgtgtgctagtgaggtaatgtggcttcataatttagaaaaggaaattagttggaccattttccagaggacgagtggataccatgcgtcaaaataaaatgatggtgcagaaaccacataatcctatgcacaaaacccaaataaaaaaaaagaaacataaacagctttggatgcaatttgctccagttttaacatttaagggaaaaactaaaagttattgaaaaacatggtgaaaacaactaaattaggctccagtaatagttgaaggaccaaaagtggacattttacaatgaatattttgtgcaggcgattttaggacatgatagagaactggacgaatgatatacgggaaatggatgatgctgaagttaactgatatatatacctggcccagttttacatctcccctctttggattaaaaaggacatgaatattcccaactactaacttttgtgctctattaagctgaaacgaaaacaggtaaggaaaaagacaataattagtgcacccaatgtattagcattaaaacagtagttacttaattgtaatgcaaggacatctgaaaacaaataccagattaaacagatggtgctaatttggaaattattttggacacaatatttggtctggaaactaattttaatgcataatatgagctaatactaaaatactatgttaaacttagacaagtgtaggtccttctaataaagataaggctcgtagatagtgtccggaattggggatgggaagaaaccgacagagaagtatctaagtcatcccttctctctagtttcctttagttttacccagcaacagggctcaggacaatattaaataggaaagcaccatttctggaacacatgcagtgattatacactaggtgctgccaggatgtaagtgatatactctccttattttatcctttgaacaaactgctttattgtaaaccaaagtacctcaaaaacaaatatttgagcaacattattacgtaggttgtattcactaaaatcaatactgtcttcctcaagcagatgtaacctacatttggaaataaagaaagaatatgaaaatgcgacttggtttaaaccaatgaaggtaacaaaggataaaatccattcaccatacccttttgacttccaaaaggtagcacatccatctttagcatcaccagttcggccctaaggatgtcaccagacttgcttcagcatgatgtacatgaaggttgaaaggtggcattctgacaaaaatgttataccttaaatctactttgataacccctgttctccatttctgtagcaatgtctcggaatctatccacctcctaatttcggaatcacaaaatgttataggagtacggtcgcacaagtggtataaacatcatgcagattgagttctgacctgtagacacactaggtcaggatcccagtgtctaatttcacgaataataagcctcctccgcgaatcccacctcattgcatcccaagggacatccaaataaaggtcaggatggtaatgtgcattgttatccgccaagatgttgtatgacatgattgtgcacgcatctgacaaaagctttattactcttagtattacactaacaaagccagaatggcatcatcccagagtaatacagctccatcaacccaaacagatgcaagtcaaacaaaaaggacgaacaaaaatcacaactttaggggtgaaattggcactggttggggcgaagcttcatacttgcactagctgggtcaactgatttctcactatttactctagcaaaactagcaaagagaaaaaaaaaagaagcaaaagtgcaatcttcactcagacattggcacaaacagatggtgagcaaaggcaacaaaatttcaccaacgatacatccagcataatacctccgtcggaggtcgaggcttcctccgcaaggacccacctccgggagggcaccccgtactgctgcgcgcggtgccgctgataaacgcgaccaggcgagcccgcggcagggctctgccagcggcggcggtggtcgcgcggcgcgccgtttccggaggacgagcaacgcaccagcgagcccgaggccgggggagagcgcgcgcgcttcctgtgggggtgcatggccggcgtcggcggcgtgagccgcgatcgcggggcggcggacgccatcgccgccggcgagatgtggcggtggggagacagggaaggaggacttcgggttttcccttcctttttttttctctctctctgatgaactctgttattcgggtttctcccatctagggtgtatcgaaaaatctggaccgtgcatccgctgatggacgatacaaatgcactgcgagatgtgtcgcaaatttgcaattcgtttgaaaagataaagtaatttttttttgtttttttggtgttgaaatcaagaaatttgttctgtcatgtactcctccatttgatattttcattttttttccttttttctttacaaattaaacataatttactaatattattgagaaaaaattggttatatagcatcgaaagttcacgtttttggttttatatgtatttatatcaagggaggtataaactgtataaataacccaatcacatttaggaaagagaaaaataaagagaaaaggccaacatgcaatatgacatgactagcattggtcattaggcttgtattcagtgaactatttgagctactgtcttcctaggaacatcagggtttatgtttcgagggaagaatatcaggatttggtgcatccataaagtaaaaccacatatattgtaatttgttttaaaagaattttaggttttaagagtttggggggggtttataaaatacaactaaaaagattatgatttgtttaaaggaactctaggcctgttcactttgatgccattttcaaccttaccaaattttgccaaattttggtaaagttaccaaaaaaaagtagctacatttagtttgctaccaaattttggcaattatataagaaatcctgccaaaattttggcaagttactaaaattttggcaactttgccaaaatttggtaaggttttttttggcatcaaagtgaacaggccctatgttttaaaagaaaaaaaatgttccgacaaactctatatataaacttataccatcgatttacctacatatttatctataatattattaaaaaaaaattaaaatacaacggtatcaataataggaaccggtgttctcttaaaaaaaatttcaagtgtatgcaactacaaacaccatcatttagtttatttaaggaataagtcaaacagcatatttacaaataaaaaataatttgtgaataaaacttttttatatacgtatacttagcgatctaaaaacaaaaactgaaaaataaactacgatgaaaaaaactcaaaatcaactccaaatttaagattgaaaaaataaattttaacttataagtataaacataagcgaaaagatgaggatgtacacttttattcaataacttaaagaacgcggacataagccaccattaaagaatacatttacagtttcacacacttgacaaaggcctacggtatatccatgaaattagggaaaaaagaactcctgtagcaaatcacacgtaagttgcttcccagttaccatcgcccgtaacttcatttcagatgcacttacacggttacaccccaacaatacgcatactgcataacatcttccgattcccagcagaacatcaagattagaactattgcaaaccaaaagcaacttgaggatatcagtcgcggttattcatatttacaatgttctgatcagtccacgaccaaacagtttgcatattggaaaagaaaagaaaacatacacgatgacaagcatacagtaactaacaagccaggaaaagcacgcatctccattacatgtttgaagaaactaacgacatctgaaagaagctgggattgaaccaagaacaacaaactacggagttttatgcgacgatagaaagttaaacggcagtggctgaagcaacggttttgaccatgctttccccaagggctggaccaaagccgttatccaagacaggattggcagaggcaggagatttttgtagagtatcttcatatgcagcatcatgaacaccaagagcagcacgaccagatggatcaaggtttttggaccaggctgcgtcccattcaacagctttagcagtgctgcacgcgacgctaggacctccaggtactgtcaacctagcagcattctgcataaaaccgaaagttaattagctagggcatagctcagcatagtatgagaacagcaaaagttgatagtatcttccatgccttgggaaagaatttctcgaatattgtcctataatagtacgcttcttttgtaactggagtgttttctgggtaaacaaagctagcgttcatcatcatggaatctgatacctgaaaatgaacagaaaaatatgtgaattccagcttaggtcagaagaaatcaaacaaactgtaggctaaaaaatgaaaaccgctaagttgtcaatagttttaaaacagagaagacagtatacatgttcatttgcatgatccttcaatccatcaatccaactgtacccaacaccatcactgaattgctccttttgcctgtatagaatgtgctgtgcaagacgaataaattataagtttaagcacatatggaagtttatgtacattataggtcaaatacgactcaaaaagtttaactttttgcaaccttaggtaaatagggcttctcctcatcatcaaatgcattccggagaacccatttctcaatacggccaagatcacgttttatctaaaatttacaggataataagtgttagaaagtgacagtactggttacaatataagaaaaataactgcaataaaagttgatgtccggtgtacataccattttccattcaggatcaatgtccatagctacattgatgaagtttttgtcaaggaacggaacacgggcctcaacaccccatgcagaagttgatttgttcgctctcaagcaatcatataaatgaagggcttttatctaaaggtcaagaaaaataattcttgtaagtagaccagctactgtaatgtgcataaacaccaaccaaatactagttaagtagttaaactaaaagtgcaatagtatactactgaaaatgcttcaagaatacatttagctgccttgggcagaagaagattaatcatgaaaatattctccttaattaccttccgacatgtttcctcatggaattccttcttgtttnnnnnnnnnnnnnnnnnnnnnnnnnnnnnnnnnnnnnnnnnnnnnnnnnnnnnnnnnnnnnnnnnnnnnnnnnnnnnnnnnnnnnnnnnnnnnnnnnnnnnnnnnnnnnnnnnnnnnnnnnnnnnnnnnnnnnnnnnnnnnnnnnnnnnnnnnnnnnngacttcctncagtgcatcaatgccttcctggtttcattttttttttacaatatngaatcagagcttcaaaagaatttttttctcactttgccaaaaaaacagagaacagatcagaacctgcactgtgaagtggagttcgtgatgaacaa

SEQ ID NO: 5811 - DNA, 6696 bp, Oryza sativa
ggtcctcccctcccccgccgaccccgtcgaccccgccgagggcttcaccccgcaagcccaccgcctgaggaggaagacgacgtactgcttcttcttgtttgatgatgcgataaaataatcttcacctctaatccttacgagtttcactgggagtgtttgtttctcgatcgatgagcgatttgatcatacgatgtttagaaatttgttcagatgttgataatggcggtgtgccactttgcggttactatatgcgctgtttgtgtcttcagaaactgttagcatgacacaacttttaaactgtgtgcttctgttctgttaagaatgaaagtttattagcagatgatggtgatctcacccaaaggttaacatcgctgacttctctattgctcattgttgttgtgttgttgcgtttggtttggtgtgctcttaaaatattgctcattagattggtcgaaaccggttatcgagcagggtgttaaaaatcacgcaaacacacgagaccgagaccgatcttaaagaaaaagggatttttgatcccgttgacgctctagtatgtttcttctcgtggttactcttgcctccgccaaaatccatttttagagaagaaattttacgatttctagaatgtctcgaggtaactaaattttaccttacaaattttgatacctcgaagtattaagtaccagaggtatcaaaatttacgctggaattaccctacaaattttagtacctcgatgttagcactaaaggtactaaatttgtattagaaaatattgtatttttcggtactttattaattgccccttattaaaagtgataaaactaacttattgggccggccggtttgcaagtagctcgagaggcccagcaagcagcagcgtccaccacactccagattcctctttgcaggacacgtctcctctgccgccgcctcgggctcgccatggccacgccggcggccgacgccacgtcctcctcgcccacgccatcgccgccgccgcaggagacaccggcgcgcaaggcggtgcgggtggtggtgaaagggcgggtgcagggggtggggttccgcgactggacggcggagacggcggagtccctcggcctcgccgggtgggtccgcaaccgccgcgacggcaccgtggaggccctcctctccggcgaccccgccaaggtcgacgagatggtctcccgccacctccccgtcggctcccccgcctccgccgtcaccgccgtcgtcccctcccccgccgaccccatccacccctccctcggcttcgagatcaacttcaccgtctgatcttcgccgccgccgccacgtcatcaggtacaatcaatcacgaataaagatcaagaaaacctgatttgtttatccatgttaggttgtgatgctaatactagtagtaccatgtatgctagtgtttcttcatcaataatagtccatctctatgttgagttgtgaattgtgaattgtgggctatgccaatatcaaatcttctctggaattggcacaccagttacatctcattggccactggaatgatctgcataatccagcttgcctgaataatctgcatcaaactagagatgttctagccttccaggttcctgtattatctcaattcgagtgatgcattcctctctggtttgttcctgatgtacatacaaatccatacatatagtgatatatacctcaaagttgatcaacctacctacttgattctagctagacctgcatctcagatacatcaatgctcttcactggcccaatgactgaaaggtgaagcctttttcttgcactttcactggctcaatgactcaaaggtgaagccttttcttgcagctcaatttggggcttggcatcatcgtccacctcacggagctgcaagggcttgaacaagtagcacctagcgcaaatggcgtagtatgccaggttgagcacctggagcagcgcgacgatccagtagaagtagtcgagcctgccgcggttgatgttgtcggggagccagttggacccgtcggcgccggcgctccatcgatgcacggcggagatgagcatcgtgctgacgtagctccccagcgagatggacagccagaacagcgccgtcgccatgctccgcatgctctctggcgactggtcgtacatgaactcgaggtgacccacggagttgaatgcctccgccatgccgtggagcgcgtactgcggcaccagccagtacgccgacagcggcgacgtccccgcgtcggtggtgcccgcggcggcagcggactccctccggtggcgctccacgaacccggccacgagggtagccgccacggagatggcgaacccaacgcccatccggtggaggtaggagattccacggtccagtcccgtgacgcggcgcgctagcgggacgagcacacggtcgtaggcaaggagcgtggtgagcatggcgagcagggtgaacacggtcatggagcctgctgggatctggaacgacgacagccccggcgcgaggcggcggtccatggtgctcgcctgctgcagggcgaaggtgtgctgctgcgagtacgccgtgatcaccaggatgcccgctgcccagatcgggcccatgcggagcagcgacttgagctcctcgacgcggtgcaccgtgctcagccgccacggcttggggatgggagacaacgacggcttgccgttggaggtgtccgtcgtcaggtcgccgtcggtgacgatggccgctcggtcaaaaaagctgtaccaccggagtcaagaaacatcacaatcagtgcaaaaataacagaaaaaaaatcaaattgatcataattgttgcacgatcagttaacacttttggacaattggatcgaagtcgaaatcattgcacaaaacacattcatatcagaagaaaccaaatggcaagagtttgcaatttgcaatggacattctagcactcaaccttaggctgtgctgctattagtgtacgttttctttttgttgaaagacctttataacaatttgttgagactacgaaagctttggaaatttgaatataattttaggttctgacagagctttacatcattctgggacttacggtttctttcactaagtactaaagggtacctcctatctgccattacaaaacttattgcatttctaaaggatttctccaagagcataaagtagcaaatctagagaggttttcagaaaacacagtacccctctaaaccctgaaatatattgtaaagtttggccttagtttgttacttgttactcctatccaaaccgtgctcaaagttgcatgacatagctagccttcggaagcaaagcagagactcgttttgagtttgaacagagttaccaagttcctcatgaaaacaattgaataaatttcacaaaacgccaggtttttttttgatattaaaaaacgccaggttttaggcacccatttccagatattactatttgttctgaataatcctaggttttatgacaaaatgtttaaagaaacctcatgtttaagcttatattgtcattttttgctaatatttttttgcacaataattgttagaaaaacataactaatttttagcttactagttatggtttatttactagttaagctcaatcatctttgttctctcatccaaaaaagtaaataaaccataactaattatctattgaccagaacatatcttgacagacatatgattgatgctgcaatcacgagtcactcgtagtcatagttatatctcttaatcaatcatggacccatgaattcccatattttctttggtccagtcaaattatcaaaagccagagaccacaagtccacaagagatagattatccagcggctgctgtcgtttcagtactgtgctgcagcagtgcagcgtggaaaaagctgttctaagtttcggcgccattggccgacatctcctcctaatctgcttatccatgtcttcttgttcatcaatggtttttggcttcgaccccccggctttgctggttgcatgatagtgagtaccaaatctctttttccctcaaactttgggtttgtttaggtcactccaaaattaaaagttcggttgaaattggaatgatgcgacggaaaagttgaaagtctgtgtgtaggaaagttttaatgtgatggaaaagttaaaagtttaaagaaaaattttagaactaaactcggcctttggtttatttaccagctacacgtctcttcagagttcagaaacaccacctcctctattatttttgagtgattgctatatagccccataatcagcgggtccacgaatcagtgacccatgccagaagagactcatcatgtctcttctggttttggaatgtggtagttagtagtagttctctaaataagagttgctaggtggtgttacttgtcaatgattttaatttccttatggactaaacgtgtttaaatattttgcaagaagagaaatgtaaattaaaacttaatatttttctatgcattagttgcctgaaaatttgttttgtctaccacgtaggcttcctactatacaaaatcgcaactttaatgtaactttactaaatcaattaatctgctctgttttatatttttattggtttatgctaatgtgttctcatgcttcatctatatattagtttttttttcatattggtggaaattcataaaagtataacattttttatattaatttatttcattatttaattgtttcacctttttttgaaagtaaaagaaaggtaaatatgtgagtctttggatgcttcgatatagtagtgcaaaataattgataggtaagagaaaaccagttaaccaggtaataaccgatcacatgtcgaaactatagttgttcaccttttgcattgtaaagagttcctttttctcaaaaaaagaagataaaaatgctataaatggagcaaagattgaattttcaccacaaaaaaaggaaatcatccaattttcaaaaattgaaatatatatatatatatacacactcaaaatttcgatggtgccggggacggcaagaccgaaaacaaccaaattcggtccgaattcagctgaaattaatcgaaaccacactcgatcagaaccggtcgcagtcagctggtacctgagttgttcggtgtggacgagcttgccgtagagcgagatgggcgcgtccatgtcgtcgttctcgtacagcgccgcggcgtcgtcggcgtccgtcggcacccgccgcttcctgacggcggcgacgaccacctgcgcgagccgcgtgaaggggctccccgacgggtggagcctccggtagagcgggtagccggcgacgaaggcgacgacggagacggccatgcagaaggtgggcacaccgaggccccagccccagccgacgttgtcctgcacgtacaccaccgccgtgacggcgaccagctgcgacgcgccgttgcagaagtagtaccagttgaagaagccccaggtgcgcgcccgctccgccgcctccgactcgtcgaactggtcggcgccgaacgccaccacgcacggcctgtacccgccggcgcccagcgcgttcagcagcagcgccgcgtacagcaccgccagctgccacggcgccgcctcgtcgcacgcgcccgcgccgccggcgccgctgcacggcggcggccggaacaccggcatcgccgccgacaccgtcaggaggagcatgccctgccacgcgaacacgaacgctccggtcagctcagcgcgccgcggcggcgtgcgtggtgcgtgcgtgcgtgcgtggatgtgtatacgtacgacttggtagatgagggaggcggcggcgatggtccagaagcggccgacgagggagtcggcgaggaaggcgccgatgagcggggtcatggcggagacgccgccgaagttggtgagggtggtggcggccttggcgagcggcatgtgcagctgcctcgtcaggtacatgagcatgttcgtcgtgaaccccagcacggccagcttctccgccacctcgttcgctgcgtgcgtgcgtgcgtgcaaaaacacgccaaatctcatgcgaatttgaaacaaaaactcacagcgtttcaaacagatcgagatttcctactcaccgaagatgaagggcatcgttctgaacccacccttcttcctcatcttgctcttcttcgcctcctcctcctccgccatggctgcctccaccgtctccattgctggtgctttgatgtgtagcgactggtcagtggtgtgtatggtggtagctatagcttggatatacacatatttatagcttgagctttcaagtttcgttcttcctatctagctagccagctctctttcacatttccgaaaagaagatcaaactgaagtggccgtccgcgtcagaatgacacgcctctaccggttaattcaaatggtaaaaaatattataaatcccaatcaagaaatttttgagcttggctttgttagtttggaagggttggaaccatttcccaactgataagcgcataattaattactccctctattccataatataaagtacgatcaaaattggtacggtctttaaaactagagtgaagtgtacaggcggtccttaaacttgtagatgtgtgtcatctagttccctaaactcttaaaatgcatatgtaagtcccagaacttgtcataatgtgtcatctaggtcccaaatcgtcacaaccccttcaggatcctatgtggcgttgatgtgg

SEQ ID NO: 5812 - DNA, 15768 bp, Oryza sativa
  unsure (1)..(15768): unsure at all n locations
tttaacttgccattggtgtctttgcaacagggatagtacttgtttgatgtgatccaaatgggactcaagatcaggactatagattaatatatcatcaaagaacactagagcaaacttcctgagcacagattgcaatgtggcattcattgctccttgaaatgtagcaggagccccagtgagaccaaaggacattaccttatactcatagtgtccagtgtgggtttggaatgctgttttatactcttcacctgccttcatcctgatttggtgataaccagctctcaagtcaagcttggagaaccattttgctcctgataactcatccaatagttcatcaatgactggcattgggtatgtgctcttgactgtaatggcatttagttgtcggtagtcaatcactaacctccaagttccatccttctttcgtactagcaaggctggcgaagagaaggcactctgactgtgctgtattacccctgactgtagcatttcggccacttgggcttcaatctcatccttcaatgcagggttgtatctataaggcctcagattcactggcttagcatcaggaattagaggaatgctgtggtcacaggctcttttgggaggtaagccctttggttcttcaaagacagatgaaaattcctgaatgatttgctgtactgatgccggaattggatcagtggtagtctgtaaaactgaagctaattgcactaagcaaagtattgagccacatttagccattccttccaactggtcagaggtaataggacaacaggttgttgtatgtggagtaatgccaaataatctcacaattttaccagatagttcaacatccatccatttgttaacccagtctacttgcatggggctgaatctttctaaccaatccatacccaaaatcacatcataacttcccaattgcaatagtttgaaagtgtttttaaaattgtgtccttgcatccaccagctgcaatcaacgatttcatgtgtacaactcatggttcccccatctgcaaccttaacagtgaccggcttaggcaaaggagagattcctggcaacttctttcccacacctagatcaataaaagaatgtgaacttcctgaatctattagcataagcagttcagctccctgcacccatccccttaacctgactgatctattggattcagttccccataaggcttgctgagaaatagccattagcatactagggtccccttcatctgtccctgttgtgtcactgactggttcaggctcatgctagtgtaatgcttcaatcaattcctgcacaatatgtaattgaacagaagttgcacatttatgatctctgccccacctttccccacaaacaaaacagagtcccttggatctacgataagctttcaatgaagccaatctgtcatccttggccttggatgcatcgattgcccttttatcttctgtcataaccacagtaggagtcctaggactatgattcactggactgaattgattagttctaggaacctgcctgatgctagaagaagattcagttcttttgctgctcacagtcttgataccctccaatatttcctcttgtaacaaagctatagaacaagctgagtctaaatcttggggcctttgcaacattactgctcccctgatctcatcccttaacccttcaatgaacttttggacaaagtatacaggagttaaggcactgtcataagccataagttggtgcattatgctgtcaaatttttccacatattctgagactgaactggattgttgtgcatgaaaccactgacggattagagcttcctgtctatcacgggtaaatctagcacacaccaattcacagagagtctgccaggtaatccccacaatttgttgcctaattgactgcaaccagaacgatgcattgcccccaaaattgagcgtagctaccttaacccagtgtataggatgaataccatatatgtcaaaatactgctcacaattgctcttccacatctggggattctctccctcaaatctagggcaggacatagggggcagatttgtgctcaaatcaacatactcagtggaagaattcggggaagttacagcatggtcaccatcagaattagcaggggaaaagagattcgggtcgcgcttaccagcaagccactgtgtaccatcgctggtctgagcagtcttggatagagtgtgctctatgtgctccaccttgacgctgagatctcccaccgcgcttcccaactcttcaaccttcttctctaccaccggcaatctagtctcgatcgtcttcctcagctccgcgaaatctccacgaacacgttcttctgcttccaccctcttcttctcattctccgctatggtcttcaagagcagatccagtttgttgtcttgagccatggttcctcaagcttccttcaacactaggatattctgctcagatctctctcacccacgctccgaactcgattaaccaggagaaggcaagttgccttttcgcgggattcaattccgaagaatagatcccaatccttccctggaattttacaaccaagccaagagaattttggggcgaaagggctctgataccagaaattgtcagcgtcaccagatggactcaacacaactaaggaaaatgaaaaggaaaagtggaagaactcgaacaactcaggaagaacagagatgtgtttaggcaatcttttactaggataatcttgctccaacccaacagggttgagccgccgccgccattcgccaccagattgccaaaagtcccttacaatttagaaacctcagttcttatactctctctcgctaccaactcccttccttcccctctcacaagacagatgccagctcatgccagcgatacaggttacatggcccattccggcccaacatatttacgattaggcctaatgactctggccggcctcaagtcttcttctcctccttcctgctcaccatccggcacaggcttcatcttcagcttggcgcttgcactcggctcctcctcgcctgacgccttgacactcacatcgcaaagctaattaggttattgatcaaacgaatgtatcagccaaaaaaatagagaaaaacattcactcctgaattcacgctagaatttcaaaatcaccgtccatgatccatgtgaatttctagcacgttgcacaagctgaattcaaaacaatttggtcctgtttgctgcatatgcaagggttattctgatttcatctgtatgactgtatggggcttcttttagatagtgaaaagaattccggcatttgctttaaagatgctatagccacttattacataattcacagcttataaaaaccaagaaatgactagacaataactaatgataccaacacaagacatttattcaagtctgtttgtaaatcttcattcgaagttggcaaatatctacatgatcgttgtctctaggttccggcacacagtatgtactgtcctcattacacctttatatttgtgctcagaactgaagccagtatgttacctgaatagtatctgcatataagatttcattggggatttgtcaaagaccatatcatttatgcatacaagatacacacagtggtgctcgggagggttatgatgggttagagctgagggagaaggatcccgaggtagtggcgaaggataggctcggggagctgatgcagatggggctgcatgagtataatcagcggcggcatgcagagaatttggaggagaaaaggagaaaggaggagaggtgagattgagataaaggaggaggacgacgatgaggaagcagcgcggttggatagtgctaagaatagggaagagggaagagagaagttttacaaggtgttgtttagtgatgaattagggatggaaatttcggttcacaattttggaaatttgaaccgaaatttcgggaatttcgtcccccatccggcaagcaattattttaagtgaaattttcagttttttttttcaaatatttgtgaatttgatcataatttcttcaaatttagtaaatatgtgctaaaatttcgtttgaaatatccgaaatttcggaatttcattgcccaccaaaattaccttactttttgaaagggaaaaccctagtgatgataaccgctgataagtttgtgtggagttttgtttgtgatccatttcatcttattgaatttattcatttgaagagtattcaacacttttgcacttcataatcaatcaaattgattactgatggatgtgatgggagttgcattgctacaaaggcattaggcatctgtctgcatgggaagatggtcctattgagttcatgacctgcaaatgttcaaggatatttgattcaataactgcttggatgccaccagatagtttggtattggcagattataaccatcaaacctttatgcggatacttctagcataatgactacatgaaattctagtgtgaaaggattgctgcaaagacttgacaaaagaaattagtgatgtaatgcatatgatcaaaataaattctatgagttctacaggtgagatgctgatgcagagttggggtttagtcaccatggcatggagaaaggaattcagaacccatatgaactgttgagaagatgcaattgcaggtctcaaagtaagcacatcaagactgttgatctttcaaccttttgtggtgtttgttatgtttagcagacatcttccgattgagaattggaacatcacagagggtggactaaagtcagagattaactacaaagcaatttacaatgcaacctgtggtgcccaattcacaatcacagaatatgtgttgcctgctgatcttggaacataaatggaactccaaataggatgtgtttcggtacaactagtaaggtttatgaatcttcaagcgaagtatttgacatttggttggggaaaatctatgttaatcccccaaaataaatgaaatgaaatcttttaattctgatatccagtttattttgtattttatgtatacatatttagtagtagctagtactaatcgcatcccctgacgataatggacgcatgctaaagcaaagctcgaaattcatggagtaatgaaatgtatatgaaatttaacagtctgagaaccaaatatctagcaaaggtcatgaatgtgccttttttttcccttgttgaatggcatggcaactttgggaattttgggaaatgatgatagaaagccactgaaaagaaagtgccaatcttcactaacataaaattctttattttccttttttgtagaacttgggaaacattggtaaatgaatattaatagaaagcaattgaagaaaaagtgctcatagttgcacaaagcaaatgttggagctatacatgtcctaaaatcacattctttgctttcgtggtggtttcatgccttgtacacacccaaccatcttgttgctaccttcccatcctgtaaaaatataatgatcaagatcatgattagtcatgaacatctgtctttgtgaacatccacttcttttttcttccctgtttttgtgttctttcagtaagaattgggagggagcaagaagacctttggacatgttgaagccgcgtttttcgagctccttgtattcttggcatagcgcacaactatcgcagaagaagtggacgcagcagtccaagcagggcgactgttgcaagttgtactgtgcccgcattgaggatcgtttggtacaagcatacagccattggcagcctattgtcgccagcaaaacatacaaggtcccgtgcatgcagcacgctggaaacagggagagtcagcatacaagattgatggttttctgtgcttgaaccaaagcgcgaagtgataagttaatatgcctacatgttgagcctttgtccacaatctcagcaatgcgaccgaacgtaatgcaggggcaccagcaagtcaagcagcctgtgtagttacaaaagaaatgaaatcatacatgaagaattggaaacccatgtataagaggtgcaagaacaactgagaaacagctttgcatacaggttccgctatctccaaagcagtcgaagagcttaactgaccactccccagacatgctgttagtattgctgattgagaatctgtgatataaggtaggaggattgactgagatctgtgtctcaaggtaatatacaagcgttatacctgtgtagtttgagcagttggtacctttgatcctgctgctatttatatggctgtggcattgcagtgccttgatgtagaacatgtcaaattcagagccagcagtttatgttattttgctggttttcgctttcctatcacacggggtgatgtacgcttagtgttgtgtttgtatgtgtctttgaactggtatttctgagaatccaacgttcaattggcatgttctgctttgaatcgttctatctgagaacactatgctcgatcagcatctggcagcatttggaccttccatggcttgttagtctttgatttcttgtctatcatatatattgggtggatgtgaaaaatggaagctgttcagtgttcacctttcctgacagcctgtgttttcacattggaaaagtctggaacaaaaccttcacaaagatgttgtctcgtgatatataccctttgatgaaaggggcaaaattgttcgtcaatcttctttacgtccaaattcaaagtgagtaggatgatcaccgcacaaagcacctgatgtaatcccaattaatagtagtatggaagatgcactgacaaagtttagcttaaaaaccacaaattgcccaagtaaaagtcaacgtctagtagaatctgttatagtctccgttaggtagaattaacaatactccaccatttttgggctgcagctaaacacccaaaccttcttgggaaccaaacaggactaaagtaaaaggatttttttttttcactcagttttttcacatgaatccacctgaggtttactcatgacatgacatctcatcacacaagctagtactctctctgtttcaccgtttcagattataagtcgttttgactttgatcaaaatcaaactattttaaatttaattaagtttgtagaaaaaaaactgtaatatttttaacccaaaataaatatattaagaaaatatacttaattattgatctaataaaactaatttggttttataaatattactatatttgtctacaaacttagttaaatttaaagtagtttgattttgattaaagtcaaaacgacttataatctaaaacggacgtagtagcagctgctactctactcataaccaaaagcaaaccacacaccacacaccacatcaccactggtcaaaaccctgtttggaaaacgcaggaacagaacagagcaaaggattcccgcggaaaaccacgatatcaaccatttcaacctgggacgtgcaggggacacacacacacagagctgatcagatcatcagagagccagtacagtacaagaagcagagagccttgacggcgagcttcatgccggcgtcgcagtggcccggcatgccgcagatgaagtagttgttccctcgccggagcgtcacctggtcgtacccggtccgcagcaccgccgtgtccttgttcctcggcaccttgcaccgccggtaccccttgccgccgaccaccgccacgtcgtggtactccttgttgtacttgaacactgcatagccatgagtcagtcatgtaccctatttcgttgagtttaaaattgagaaataactaattggttgtcagtttctaagaacttgtaaaggttgtgaaacctaacttctagttactaattccttttccgaattctgtattggataaaaaagagatttgcttcggtccaataaaaagtatatcgaggtaccgatacctcacggtattaaatcgtttctgatcgttgcatctagctgggtaggatgggtattgttagatccaacgatcggaaatgatttggttccgtgagatatcggtacctcgagatactttttattggaccggagcaagtcacggataaaaaactactctatatatttaggagagtttttaattctgaaagaagatgcaactatcagaagcttctcgaaacatacgtacaatcacacaccaatggatctatgcatgaagctttgacattaacttgtgcacttaccgagcacgtcgccggcgtagaaggtcttgccggcgagccaccagtcgaggttgcggccccacccggcggcgtcgcccacgtagtacgtcttgccgccggcctcggcggcggggacggcctccatcagcagcgccgccgccacaaggcacaggagcaccacgccgccgccgccgcttgcactgcctcttccccggcgagccgccgccaccgccattttctcgctcgctcaaatcaaacgagattacaaaggagatcaccagtttagcttttagcacagttttgcacggtgtgtgtgtgtcttctgactcgtgtggtggcgtatatatagcccgcgaaatcgacgcagtgcagcacgtgctggcacgtcgagagcacgcatagcggcagcagagatgaagcttcttccgtggaagcaggactcttcgatcccggaatacaagaatattaatcctgggaaaccaaaatttcaaacaaaaagaaacacagaaaatatttttaaaaaataaaaagagaaaacatttccgtgaatcaaaataaattttgaattgaaattgagcccagtgtgaaagtatggaaaactgaagatccgtttgaaacacagaattttacagggaacggctgaaatgttgtaaactgctcccttcgtctcagaataaagcaacctacaatcagatgggacatatcctagtatcgtcctataataccaaaaacgtgaactttcgatgctatataaccaattttgccaataataaatgagaaatggatatatttttcacaaggccctgggactaggagggaatttggccggcgacaacatcgatctgcttgtaatttaaatcatttttctcggagaatttgacttccataaaagcgtgaaaaattgatagtactctcgatcgcctcgccacgccaccgacgatcgaaggtgcgtgctcaagtcagacctgatttagtcctggatcaagttagtcgctgtcattagatttcttgtcagcgtctacgtgtttggcgccaatacactcgcggggtgttcagttgaccacgggatgcagtgatgatatgcctcgaatcgcgcgcgaaaaattgcaatttgttccgatcttggcgggaagttaggccattcacattagcttcttcttaggcgtgtgatcgaattagtacttcctccgtattttaatgtacgacggcgttgactttttaaccaacgtttgaccatttgtcttatttaatttttttatgcaaatataaaaatacttatatcatgcttaaagaacatttgatgataaatcaaatcacaataaaataaatgataattacataaatttttttaaataaaacgaaaggtcaaacgtttgttaaaaaatcaacggcgtcatacattaaaatacggagagagtactagttaatcgtcaagccgacccgatccgtagtcgacggtatagccagcgcccaaccgctgacaattggtagatacagatagataaacaaggagagatgtgttgctcctgcctgccatttcgtcgctgctggtgacatgtgggtggcacgtttgagtatatagctaggttatgtatttaaaaccaccatgaattaatatatagacctagcagtagcacaatggggattggatttaaataaccaattcaaaggtcttacgatgtaaatatatttattctccccaccgcaagtcgtttctataaatgatttttgtgggggtatggatcaattgttgtataagggaagcattttgtaaaaaaaaaaaagagtgcaaacgtttcgcttatatttattcgttcagcttattagcaaaaaaaaataatattcgtgaataaactgttatattggtgtctttaacgatttattaaaaataagtgctataaaattaagtcccagaaattaaattttgacatataaatataagataaggctggaatctcattttcccacggtgattggagcagatacattcaccattcgtgcaagtgcatcatgccctcagatgtgccaagtcctcttcaattctattatatcatcagtaggataagtggcaaagccaggaatttaagcctgtggggtcaattactagtggtttgtatttaagtgaggtcatgtatctaaattcttttggattcatacatgaaaattaaggtttataggattttttttttcaaaaagctatgggtcagccaaccccacagaagaggcctaaatccgccactgaggcagatctaattgctagcagatttaactatttgccgtttaatttgatgtttaactacatgtgtcaataatttatgagccttcatatacctacaatatatagattcagtggtaaatagttatttgctacatccacgacgggcgaatagtctcatatttaaatatatcctaattgcttgcgatatcgactgcctggatgataagatttgaggaaagagaataaaagagagataaaactgggacacatacgaccaatgttgtcagtatcccgatcgtaaaatggtatcttatggtaatttttttttacacgggatgaagatgaattgaggggaaaaaaggagatgaactaaaagtattgagaaaatcagcatatgtctcttttgttgagaggaagagtagggaagtaaagcagagtttggttctagattttcgatgggctcagttcacctactatccctctactttacgttgagtctgtctaacatcccttatgtccaatactagaaatccccccccccccactatacgaaaccgtgtagaataggttctatggcagtataaataaatggttccgttgacgtgacatcctaatcagtaaagaggaaataaaaaaattatggggcccacatgtcatcctcactccttccacttctctctatcttctctctcgcatgccatgagcagggcaagcggggcggtgtcgctgtgtcgagcgaagcagcggcgcacaaagctggcaggcggcgggcggagcgctgtggcgggggtggagtgtagaggacggcagcgaacgccatagaggaggatggcgcagcggacggaaacgcaatgggtgaagtaggctggaagaggacaacgacaacgcgcttggggtttcactgggagacgatgacaacgactccccctccttctctcccactctcccgctggcctcatttcccccttctcccgccggcgcgacaggtagcctctcccccttctctcgccagcacgggcggtgggctctcccttctctcaccggcgcggccagggcagtcggtgtcacgcccagaaatttagcccaaatttccagactattttgtgtattaaatccctgtccaggaccagccagggtacacaaaacgacaagtaataaacagttccaaacgtaaataaagcgtaaaatacttacaaaagaggcacttagtcctcacaccgaaacaaaagcagcagcagcggaaaaaaggcgatcctagcggggcttcagctccactccacaggcaaaactcaactggggtctgagccttggtcttctaacttcgtcttcagctcagaaacactacacttctgaaaagggggaataatagcaaggctgagtacaaccaccgtactcagcaagccacaccaatgatgcagacgtgcaaagggatacaaggacggtttgtggctatttgcataaaggcggttgtaaaacattttattgagcaaaacagtaaaactgttgagtaattaaagtaacattaaatctccactgatcaacgctacaccacgttgaacaggcccaaccaacccacctaaactacagtgtattaggtcgatttattaagtgtgagactaatcacggtgaatctggtcgaccgcccataaccgcgggcacggctattcgaatagttttactctgatcagaggtgtacaactgtacccacaagacacagccccacgacacgtttccgtgcgccgacatgccaccacgacataccggaaagaggccgtgacaggacccttcgcataaccccctctagccaagcacaccacacctcaggtttcacccccgtccccagcgggcaacgggtagtcccctctcgtgcctaggtgaatccggaagcgacagaggccgtcgcagggcccgccccgctccatcacgcccacccttgcctggatgcgtcgactagaggaaagctacactacaagcccagccgttgcccacgctggcttgtggtaagtacgataagttcttccagggcatcccgcgaaccggtccttaactgccatgggtgcgaccagcaaaaccatgcacccacagcccaccattcagtcgcattttagttggataattacgaccatgaagcatggccaggtgtctcgagcacgcagctcactctgatactaaaaaggtctaatactgcagttatcccatcaactgagctagtggtaattaagcatggctaagcatatagttctagctaggtcacataagtaacatgagctagtcgattcattacccaaggttgacaaagaacagatatcaagtaaacatggcacaagcgagcagataggtaaaaccctgatcccgtgtaattagcaaaacatgcatatttatttgcaaacagtaaaacatttgtaaattaggatcaacatgctcaaggggaatgtgtgacttgccttgcttcctcactttgatcttccgaactcttttcctcgcgaccgcggacttccgaaacgacggattctacacgctggcacgcaaaacgaggaaaaactctaataaagaccaaggaaacagtacataaaaactaaacaaacatgtagacctcaattttagatgaattttgcaagttgaatggctcaattcggagttcgaatgaattagatatgaattttagaagttttgagccatttaaatgaatttctataattatttacgaattattgcgcaattattatttatttttacaaaggaaatggatctcgctgacgtcagcaaggggcgccggcgccgacacgcgggccccacacgtcagtgagcaaaggggacaggcgcacggtggacacggtccaccgcagcctcgggcgcacgtccaccatttggacggcccagatcggcccgagctgatcgggcggccgaggggagcggcggccaggggcactggcgcgacacaaagccggcccggccgagccaaggcgcggcggcggcatgcagccaccggcggcagcagccggcgacgcggaacgacggcgggcagccggaggacagcggcccgcacaggggacggcgatgcacctcaagaggcggcagccggcaagaaagggtgacgggaaaaaaaaaggggagggaggagaggtcctcaccgaaaacggcggccgacgcggaggaagatgacgacgacgacgattgcccgatggcggctggcgaggacggagggcgaacgaggtcgcccttgacctgcggaaggagaagagggagttaggttggggagaaccgatgcggggtgactagaaatgaaggccgatggcgacgacgagaggtggggctcaccggcgaacttagaggatgagttggagcggcggaagacgacgaccaagcagcggacgaggtgagggcgagcactgcgaacgcgccagaggcagcagcacggccgggcgaggtccccctcaccggcaaggagcggctggagcgctgtggaagcggaggtagctcggctccgcggtgggagggggttccggtggtgaatgggagggatgaggcggcggccaggcttgcccttgtggcgtcgaagccggcggtggatgcggcgcagcacggcagcggcgggaccggcggtagcgcgcggctggagggcaccgacggtggtggagctcggggtcgacggtggaagcagtgctcgggctaccaaataaaggggtggtgcggcggccgaggcgtggcactacgcggtgcagcttttggtggcggtggcgcagcgcggttgcgacaggaacagcggtggcgggcggctggagttcgccggggagcggcggagagagggagcacggtggggaggtggctagaaggcgcggggtgctcggggagaggggaaaacggatgaggggaggcacgtgagtcgtttatataggtcccggagggggagaacgtggccgggagaggcggatttgaagggggaaaaggcgccggcgacgtgggcgagtggcggagcaaaccggcgccggtttttgggggaaatgggggaggagagtggaggaggtggaggggatgcggttgctctcagttcggatgcgagcgcgtgaacgggaggacgcgaaaacggcggcatcgtgggcggcaatggcggccacgagcggctgctggctgggatggagggaggttggggatgacaggcggggcccatgggtcccacacgtcggctggagagagaggagggaaactggggaggcaaagcagacttccctcaaggcctgagccggcctagagatggaggaggcgcgcggcccgggaagggggaggggattttgggccaagcccgaagggaggagagggaaattatttggttttctttttatttaattgattaaatgatcttcgtgactttaaactatttctcgagctccgaaaattcacggaaaattatggagagtacattagggcacaaagaatattacaaaatattcccggccaataatttttaaaggaaattttaatttcctctattaattcacttgaataaattgcttaactttttatttaatttctaggaaatgcattatcaaatgatttttaatcccgaacgaaaatcggggcgttacagtcggcctcctatcccccttctcctgccggcgcggccggcggcctctcccatttctccagtcgatgcggccggccgcctctcctcctattctcacaggcgcggncagcgcggccggcctcctctattccttctcccgccggcacggccggcgacctctcccctttctcccgctgatgcggccggctgcctctcccgccgacgcccccctctcctgccagctgtcccgggctggaagaaaagaaagacgattggctgacatgcggaccccacatttttcttctatcacttacatatggacccccacaatttttttattccctctttgcggattaggatgccacgttagtaaaaccatctattatactgccataggacctattctacatgatttcgtatagtttagggggggagatttctggtattggacataagggatgttttacagactcgacataaagttgagggacggtaggtgaacttattcctcgtaggaatcgtgcaagctgggaataagttcactttgtgaccctcaaaagtgattgaaatctaatccgtgaccctaaaacacaaaaccggatatcttgacccccaaactatgaaaaccggtgcaatttgactccctcagcggttttggagggcggtttcgctgacgtggcggtattgaccaggtcttctttacacgtggcgttgatgtggcgccaccccggcatttcaattaaaaagttatacgtgggactcatttgtcattcacacacaattgtggggcccactaacatgtgggcgccgcggatcctctagagaagncntgcaggcgtgcaagcatgaggtgtatccatcaacacgct

SEQ ID NO: 5813 - DNA, 10390 bp, Oryza sativa
  unsure (1)..(10390): unsure at all n locations
attcacttgtctttaaaaaccaaaagggcttacctcccaaaaagagcctgtgaccacagcattcctctaattcctgatgctaagccagtgaatctgaggcctttatagatacaacccctgcattgaaggatgagattgaagcccaagtggccgaaatgctacagtcaggggtaatacagcacagtcagagtgccttctcttcgccagccttgctagtacgaaagaaggatggaacttggaggttagtgattgactaccgacaactaactgccattacagtcaagagcacatacccaatgccagtcattgatgaactattggatgagttatcaggagcaaaatggttctccaagcttgacttgagagctggttatcaccaaatcaggatgaaggcaggtgaagagtataaaacagcattccaaacccacactggacactatgagtataaggtaatgtcctttggtctcactggggctcctgctacatttcaaggagcaatgaatgccacattgcaatctgtgctcaggaagtttgctctagtgttctttgatgatatattaatctatagtcctgatcttgagtcccatttggatcacatcaaacaagtactatccctgttgcaaagacaccaatggcaagttaaattgtccaaatgctcatttgctcaacagcaattaacctacttgggtcatataattagtggagcaggagtatcaactgatcccagtaaggttcaggaggtggtggattgggccattcctactactcctaaaaagctcagagggttccttggattggctggctattacagaaagtttgttaaggggtttggcattatcagtaaaccacttactcaactattaaggaagggggttccctacaaatggtctgccgagactgacaaggcattccagacacttaaacaagcactggtaacagctccagtgttagcccttcctgatttcaatcagccgtttacagtagaaacagatgcaagtgattcaggcattggagctgtactgtcacaagggggacacccaattgcttttattagcaaggctttgggtcctcgtaccaaagactttcaacttatgagaaggaatgcttagcaatattgatggcagtagaacactggagatcttatttgcagattggggagttcactattcttactgaccacaacagccttatgcatctttcagatcaaaggttacatactccatggcaacacaaagcttttaccaaactgcttggattgtcatataagatatgttacagaaaagggagtactaatgcagctgctgatgcactttccaggaaattccaagatgaatctgagttaaacttggtttccagttgtactccaacctggttgttggatgttgctaagggttatgagactgatcaattttcattagatttgctcactgctctagctcttaaaccagatgcaaagcctgggtacaccttgcagtcaggaattataaagtacaagggacgaatctggattggtcagaacagcactatgcaaaatgcgttacttgcagcattccatgccagtcctattggagggcactcaggattcccggttacttatagcaaattgaagaaactttttgcatggcctggaatgaagcaacagactaaacaatttgttcaaacctgccaaatctgtctgcaagctaaaccagacagggcaaaataccctgggttactgcagcccttacctgtgccagaagggtcgtggcaagtggtgacactagattttattgaagggttgccaagatcttcatcttacaattgtatactggtggtggtggataaattttcaaaatatggccatttcttgcccttatcccaccctttcacagcaatagatgtggcaaaaacttttatgctgaacatttataaactacatggtcttccccagactataatctcagacagagataagatctttacaagccaattgtgggagcagctgtttactagatcaggaacacaactgcatctgagcactgcttatcaccctcagtcggatggccagactgagagggttaatcagtgcctggagatttatctcagatgttttacacatgcaactccttctaagtgggcagtgtggcttcatttagctgaattctggtataatactgcattccactcagcactgaatacatctccctttgaagttctatatggccacccacccaggtattttggaattcattcagaggattgtgctattcctgaactacaagtttggctcaaggagcgtagactgatgcattcattgattcagcagcaccttaaccgagcccagcaacacatgaaaaatatggctgacaagaaacgcagtttcagatcttttgaattgggtgactgggtttatattaagttacagccctatgttcagtcttctgtcgcagctagggctaatcataagcttgcattcagatattttggccctttccaagttattcagaagtttggctctgtggcatacaagctccaacttcccactactagttctatccaccctgtgttccatgtgtcccagcttaaggcagccaagggtttccaaggagcattgcactccactctgccttcttctgatgatgctttccagtatcctatcatgctcctggataaccggctgattaagaaaggtaacaccaccgtttcccaggttttaatacagtggtctgatactgcagttgaagatgccacctgggaggaccttgaggatctccgggcgcgttttcctgaagctttggcttgggggcaagccactttccaaggggaagggattgtcaaggcgtcaggcgaggaggagccgagtgcaagcgccaagctgaagatgaagcctgtgccggatggtgagcaggaaggaggagaagaagacttgaggccggccagagtcattaggcctaatcgtaaatatgttgggccggaatgggccatgtaacctgtatcgctggcatgagctggcatctgtcttgtgagaggggaaggaagggagttggtagcgagagagagtataagaactgaggtttctaaattgtaagggacttttggcaatctggtggcgaatggcggcggcggctcaaccctgttgggttggagcaagattatcctagtaaaagattgcctaaacacatctctgttcttcctgagttgttcgagttcttccacttttccttttcattttccttagttgtgttgagtccatctggtgacgctgacagtgagcaacatgtgtgatagcatgtcgttccaggcgtcaatggcgccgggaacacaccagtgcacgcagtcattgaagatggtgaagtactctttcatccattccttacgacgcgtccatcccctgtacctgctcgggtgcgcgtccgcccgccgtatcatcgcctccgtcgtgtccatcagcatcatcctcaccccgccggcgctcgccgcccttttgccgcctcgaactcctccacctacgaagctcagaacacacgtttactagaaagaacaagataattgatcactagatcaatggagaaaaatcaagaaattaacctgcagcgtgtggaagtcgagctcgaagccctgcagcgtcttctcgccacgccggtacggccgcgtccggacgcagttgccgtccttgttccactccccgccctcgtactgcgacggcgacacggtccgcagcacggcggtgacgccgccgccgtcgctgctcaccacggcgcggagcgcggcgcgggtggccatgcggagcgcgtaccgcagcgtgaggtcggtgacgttggggaggaggcagtggtggcacccgacgagccggccggcctcgtacagcatcgacgggcggtagaaccagctcgacgccgacacgacggcgtagtcgaacgccgggacgtgcggcgcccacacggcggcgggctcgtcgaggtagaggttccacaggcccgtgtgcgccggcccgtcggcgtcgacgagctcgctccggaccaggaacggcgcccagaagttgaggacggtgaagttgtagccgccgccgtagtggtacaccgtgtgctcgctgctcggccagctcgtcgttggcttggcaacctgcaggccggccaataaaacgtcacaccctttgctgctggcccatttctgaccgtccgatcaagcgatcaatgattcagatcgaagctagtactgtagcaaatccggcacgttttttactttttaccctggtcaggagacagatgagggagttcatgtggttcttggcaagggaatccccaatgaaggccaaggtcttgcccctcatggcagagaggaagcgcaacgggtcgagacgggggagatcacaaccgtcgggacgccaccgccactgcacgaagccaaggtccagcttgccgtacttcatacagtcatagtgctcgtgaatgaacaagcaggtgtcgttggtgtagtagggtgcatcagggtctggcacccattcgcctctaaatatgtcgcaggcctcgccgtcagccttccggccaccggaggaggtggagaaggaagagtaggacagccaggcggacagtgttcacggcataaccaccgggaaagggaagtatgtgtcggagacggcgatgacagcgacgagtaggaggatagagatggcgggaatcaagcacctgccgttgtagtactgcgtcttgacaagaaaattgcagagattattaagaagcgccatcgatcggcactaggagaaaactaagaatctatatttatgtgagaattgggtgtgaaacaccggtggagttaattcaggtgtatatataagaaggtgttcataatctcaatgtatcggaattttggttttttgggggtccactgctactggcctagtaatataatctccgcagcacacacagtctgtacgtagtatggcgtcgcacctcatggcaccgcgagtctctgttggcatccatgttacttcctcgcagcaaagctcacagatgattaaattgttggtaagttatgggatccgagggtctcgagcatgagcaaattctctcggcgcgcacatggacacatcacacatggttggtgtcctctacagaaagacccattttgtcttctatcgaaagacccattttcactttatgtctgtattgggtagaatctcccacttgttagggcgaagctaccatgaagctaagagctagcagaacgaagaaactgactatgttggtcatctaggcatatgacttcaacactcataaaaaagtgctcacatgtactccatccgtcccataatataagagattttggtgggatgtgacacattttagtactacgaatctggacagagagcttgttcagattcttaatactaggatatgtccacaaaaatcccttatattataggacagagtgagtaattatgtaaattattatcctttcccctcccacccgaaaccctcactgcctcttccccttgccatgccacctgagctactgacatcccgtagctgctaggacagcggaggcgaggcttgtgcatcagtaccaggtgaaggagtggtgcggcgacgtaggcaggtggcaacactggtttcggctggtgggcggcgcattggtggaggcgcaaagaatgtgcttttaggacatgtatagctccagcatttgctttctgcaatgattggcactttttcttcaatggctatctattagtcttcatttatcaatgttttccaagttctgcaacaaggaaaataaagaattttatgtttgcaaagattagcactctcttttcaatggctttgtggcaatcctcatttcccacagttgccatgccattcaacaaggaaaataaaggcgcattcatgaccttcactactcatttggttctcaaactgtaaaatttcctttacatatctattactccatgtatttcaagctttgcttgagcatatgtccattatgaacgctaaatatcacaaagggatatgattaatattagctactgataaatatgtactaacacaaaaaaatatcaaactgggtatattctaatttcatttattttgggtggttaacatggatattctgtaaccaaatgtcaactagttcgcttaggactcacaaattttactaaaaatgttgtaccgaaacagcatcctattctcgagttccatttatgttccaagattaacaggcatcacgggttgtaaattgcattgcggtcaatctatggacacgactgatcatgcgctggtacactagcatatgcaaataaaaccttacgaatggcaaagtatccaaataaatgatcaaaatgttgctttgagaatattgaacgacacagcatgacagtttaaaaactgtcatgctaataaacagaacaattcaaggtgaaagaggtacaagcaagagaaactgaccttagtccaccctctgtgctgttccaattctcaatcggaagatgtctgctatacgtaacagacaccataaaaggttgaaaagatcaacaaccttgatgtgcttacgttgaggtctgcaattgaaacttctcaacagttcatgggtcatgaattcctttgtccatggtgacaaaacaccaactctacatcagcatctcacctgaagaactcatagattttcttttgatcatatacattacatcactaatttcttttatcaagcctttgcagcagtcctttcacactagaattccatgtagtcattatgctagaagtatccgcataaaggtttgatggttataatctgacaaaatacaaactatctggtggcatccaagcagttattcaaccaaatatccttaaacatttgcaggtcatgaactcaataggtcaatcttcccttgcagacagatgcctaatgcctctgtagacatgtaagtatgcaacccccaggccccatcacatccaccagtaatcgctttgatcgattgtgaaacacagaggtgctgaatactcttcaaatgaatcaattcaataagcatatcttgcaaccaaggagatgaatagagtcacaaacaaaactctgcacaaacttatcagcggttatcatcattaaacagcaccttgtaaaacttcctcctctcctccctcttctcagcactatccaaccgcgctgcttcctcatcgtcctcctcctcttcctcctttatctcaatctctcctctcctcctcttcttctccaaattatccgaacgccgccgctgattatactcatgcagcccctcctgcatcagctccccgagcctatccttcgccgctaccaccggatccttctccctaagctccgacccctcgtaaccctcccggagcaccaccgtgtgtatcttgtacctgtttgagacgtagaagaggcacggatgccgatgcagcatcctcgccgtgtcctccggcaacccgaactccctcctgaaatgctccagcttcagaaccgacatctttttccacaatgtgagcgagaggagctcgtgcaccaccgccaccgctcgcttctcggcgtcggcgtccgtgcctatcgccgcccatctctccgagtacggcgagatgtacggcgtggaattgaattcctccatcttggcatgagacttggcccaggagggcggcagcgagcaggtgaaccgcggggcggaggagtcggcggcggaggcggccgccgcctcgacggaggagacggcgagggaagggacccaccggagaagctccagctcggcggcgttgcggcggtgcgggtaagggttgacgaggcggaagaggtcggtgcgggctgggaggagacggaggaggtagtcgtcggggagtccgagcgggccccgcagcgcggcgagcttggacacctggaggcggcggccgcgggcgagcatgagcacccgcgcgaggcggtcggccatcgccggctcggacgccgcgacggccgcctcctcggcgtcgaccagcaccgccatccgcttggtgaacccgaagcaggcctcctccccgccatcgccatcgccgccggcgccgccgtggaagaggtcgaagcaggaagggtacttgcggagccagttggcggctcggccgaggaggtcgagcgtcttgaagcgggactgaagaaggcggacggggccggtgcgggacggnaaacgagaaggaggcgcttgatctggttgttcacgatccagcggcggttgcggcggagcgcggcctccagcgccgggtccttcggggaggaccaccgtgccatgcggcggcgctccggcgacggcggcggcggcgggagggaaggggtgtgagagtgtggtgaaccgcgtcggagtgttggacggctgagattggcttgcgataatgggctgtaggattgtaaaaatgggccttgcatatttctttaatgggcctgtttgttggcaattggaataggttcactttagattcctcttcttgacgtcgagtttaaatcacgccctgaaccgcaataccagaaatcatgactcccaacttgcatcccgggttaaattaggtcctctagcagcatagatttgatttggtagatgaaagttataaatttgtactagtactaataattatctcaaccgtttaatttggtagatggaagttataaaaaatttagatgcattcatagcatgacatgtcagtgttagtactaagaatttacgtaaccatcgtttctcttattcgcgaaataagcaaaacggtatattcgcaaatgaaaagtaatttgtgaataaaacttttatatatgtgttcttaacgatctaaaagcaaatgctgaaaattaaacttcaatgaaaaaaaccttaaattcaactccaaatttatggttgaaaatttaaattttggctgataagtataaatataagtgaaaagttgagacccttagttagaaaaagttactccatgtttatatatatttttcctatttttttaggttatagttgacttgtagtattaagggggtgttcgggagagtttagtcccttttgatagggattaaagttttggtgggagagagatagtccctctctcccaaacagcccctaaacttgctcttatggaaagaggtagtacgtactgtacgaaccaagtgcaagtttgaagtttcccaacacgatggcaacatcaggcacggcgatgcgaggtggcgctaacgtccaccgtgccgaccggtttggagcctcctccccgcttgcaacgcaggggacgaggagttaggctctgttcgttctgggggacagaggagattgtgtcccgtcttccaagcgcacatttttcaaactattaaacggtgtattttttttaaaataaaattctatatgaaagttgatttaaaaaatcatattaatccatttttaaaatttaaaatagttaatactcaattaatcatgagctaatggcttacctcgttttgtgtatactcccaatctccttaatccccttctgctcaaacacacccttaggccaccagctacatgcaagaactgcaagctgcagttattaggggtatgtttagtttcaaagttttttttaaaactttcaactttccatcacatcaaatcttttatatatatagtaatttttcagtcacatcgtctctaattttaattaaattttaaactttggttgaaactaaacacactctagatgatgatgcgatgaattctgaaccgggggcctactaccgtctaccactagtctggtccttcccctcgagtaataaacgatccaggcgctgctgctatgctgctgcctgctgctcaatggccagggccagcctgatcctgcagatgatgagtgtggtagagagacagagagaaagccagctaggctatgcatggcagaaagtagtataggagtatgtgcctctaggcacaagtacgtactgtactcctacaggtacagtagagtaactggacggatagatggacgggatcgtcactgtcctcaccctcgtagattgcaccccaaggcacaaaactagggctttgcgtcaaaatggccagagacccgtgccgcggtggtccacgaaagaatctgagagcgcatgtacgtatgagtatcatcttaaggatatgaatgtgttcaaagattatacgttatgttttttaaaagtgtgtttaggcccattattagaattagattttttttataggacggagggagtaattggtaactaagctaggcttaagttactaatactctccctaaataactcaaaccctagcttcccaaggagttttcaaggaaaaaacaaaatagcacaatacccttaattaatgtgaattagttgggtgcccgcgcaattgcacggctagcaccctataaaattatctattttttacatatgattttatgggtaccgagctcgatncaacaaanncacatca

SEQ ID NO: 5814 - DNA, 7962 bp, Oryza sativa
  unsure (1)..(7962): unsure at all n locations
atgggaagcgaagtgcataaaaatgacacatgctcgtcatgatcgtgagacagcagttctcttgtatttatacagcgccgtatccttcagtctgcacacaaggaattttgcagaaaccattagttggtgaggcgttctgccaatgcctcactctgcaagtgcggaggagctgaaccctcaatactcgcaggcaatactaagttagcatttaatggatactagctagtgctgaacaaaataagaaaagaaacttactagcatttaatggatgtatttgttcttgcatcactagagcaaagcaagaacttgttgactaactattgttaactgttatgctgtggtatgatggcttgtacattgcgtactggatggaatcattccagaaatattactggcttatttgacattgttgattgaaaatttaccaggagataacaaaacattttacccctattgaacagtgatggcttatgattatgacctggaagtataactgtttctggtaaaatggaaacatggtactgtatagtgtacagtatgcctcctaaccgaaaaagtacacccagatagctgtactgccagaattcagagaaaccaaagctgtactgccagaattcagagaagcaaaagcagcaagaagtaccaaagtgtggaccttgcattctccatcatctacaaatcaaatgccgggaatgagaggccatccagggatttccaagatagggagccaaccaatcacagaccagcatcctgccacgtgtcagccagaggcagcacaccatcctgccacgtggctacccaccatgcgaggccgaggtcccgagctgtggtgcaagggtgcaccgttaatttcgtttcgctagtagatagcgtgacagtgtgagatcgagctgaaaaaaaaagagaggccacgaagagagctcagctgctgcctctagcttacttggtgataaggaggaggaggaggaggagggcaccgacatggccgcagccacggcgtacaccgtggcgctcctcggcgccaccggcgcgcgcgtccccgccgctccacgctccgccgcgcttctgccgcgccgcggcggcgtgctccaaccgctgcgcctccaggacgcgccgcgactgtccctgctccgcgtcagggccgcctccgacgacacctccacctcggccagcggcgacgagctcgtcgccgacctcaaggcaaaggtgagttcgtgcatatgtttgcatccatccatggtcccatggaacatctcgtcttaatttgacatatggttggatgcagtgggaggcgatcgaggacaagccgacgttcctcctctttttaaaaaaaaaaaatctacgggggcgggggcccaaccctgtcgtcgccttctggctcaccaccgtcgtcgtcggcgccatcaactccgtgccgctggtacgtaccatcgaattaatcaatcacttgcagctttgtctgaactgtgactgatgacgagttggccgacgtgctcttctcttgcagctccccaagatcctggagctcgtcggcctcggctacaccggctggttcgtctaccgctacctcctcttcaaggtaactaagaaatcaatcgtccatgcagatgcatccatcggtattaattaacatgggaattaaccgaatcttgtccaattcatgcactgaaaagtttggattttcaagtcgaataatcgtcctgaacttctctatcagtttacttcaatttgaattggaatctgaatttctgtgaatgttttttttttcgtgtgatataaacaacaggagagcaggaaagagttggcgaccgacatcgagaccttgaagaagaagatcgctggaacggagtaattaagcagctgcatttgtccggggaagttttggggggtgactctctagagtgcttgctgctgcttcctctgtgtgatgtttgtatatctctacgagaatatgttctgctcccatgtgcagtaacagcgtagtgcaaaaactgtatcaaacctactatcagttgtttcttcgaaattcaaaacaatttcttcgctttcttgttgcgtggaagtgttcatataatctggcgtatgacaatgagaatatatatctcggagaatggttgatcgactcattagaaaagaattgcaaatgagttgatgataaacatctctgaaatgcatcccctcatggccattaacgatcctgctgatttatgaagaagcaattatcccgtttaccatgactcctcccttcagatcttcataagtgcaattatctcctacaacaaataacgccagaaaatattgattctataacaattcgggaggtagtgaaacaaccaaaataatatgcaaaacacaaggaacatgacaccgcagaaagtcaatttacagaaatgcttattcacagcgagaccggtcacagaatgtggcccatattgaagcgacggtgttcccgcatacaagggttgaaatgcaatggaccaaccgtaggaatttttcatatttgtccttaaaaaaattatttcctctgtttaaaaataaagaatttttatgttgtttagcaaatattaaggataggttaaaatatttctttttaatcactttgtttttgttaatttttaaattttcagttgtttagatcaactaggaaggtagcccgcgcatatgcgcggacatcatatttaattgtgttagaaatttgattaggaatatttatgattaatctattgtaaatatctttaattttttaataatttgtgtggtgtttctctgaatgctagtaaccatcgccgacgtataaattgtaaactaaaattactcaaaacaatgcagttttggttttataagaaaaaatatatatgaaactatatatcatttgtacataacgcgtttcttttttttaatatttagcataacttaattttgtactttctaaactctaagtaacaattttcttttgtataatatatatgtctttatgaattttaggatatattaattgaagatattttctattaaaaatatgcctaatatgactacatataattatgagctgaatatgttgaaatattgatttatttgtgtgtatatagtattgcagtatgaaactacagtttagcatttatttgtgtgtatatagtattgcagtatgaaactacagtttagcggtaaatgtttttctcaatgagaaaatatattagaaaataagacttttatcgctcccaagttgtagtttagggttgtatactttgaactgaaattatgttagattttgtttccaacataatacagaaaaattcaaattttctattatattttatttaaaattttagttattttcattatttcagtactccaaaaatattaaaacattgctatttaggatgggtatcaatttttttaagaaaatgttaaatttagaaaaaaaaaagttcagtcttcaattatttttatcatgttatttttttatagatttccattccatcaagcatctcttaaatgttttgatctctgccatctagaatggtaatataagtgagttaaggctatacaacttggcatgagataaaggtatcccttaaatgttttcaatgtgttgtgtatgataaatagatcctagacggggtacacgttatgacatgaaataatgatataattaaaagttttttctctaatctattagtgacatcagatatcatatgtataatttagatattatcatcatcttaggaacgtttatttatccctaaaaagatcatttatttataaaagtgtatctacttatgatcaagtaaatagcccccctatatgcatgttaagataaattaactacttccactgttgaggaaaaatatatcaatatttacaacaccaaattatttttattgaattcaaaattgaatatgtttttataatatgattgttttgtgttgaaaatattactatattttttataaactaattcaagtaatttcacattgacaaaatttaaaatgacttataatctgaaatagaaggagttggaaaaaggtgattagatgtctagcatggtataaataatgggttgaccgtttattaaaaacataagtggtatattttaactttttaatgagaaattttagtattctattttatttattggaggcttaaaggtggatagatgtggtccacaatgtaagtcaatacaaatattaaattattgatttaattgaaaattacaatagtgtagaaatatcataaatgaatatacgatttaaaattttatgagtattttaaagtctaatttacgttgtttttataagtgctagcttgaggagaaagagaagaaaagcacttgacacaggggaaactggctagacttgttatgcggagtccatttgtgggagtttgtttttatcacaaagataatgttggatttagttactatggagataaaaaaaagaacagagaaggaatggtagggagagaggaatcggaggaatgggaggaacaggagggggttttgggattttctttttaaagatagatctaaccatataaaatagtggatccatcgatttaagtggaaagcgatggttagatgttttattttcatttgtcatacttatagatttttctaatttattagagtgttacgtggcgagatcaacttagaagtgtttatgggcgtaccattaggccctaacatttgtagttagaacggcagcacgatctattttttaataacaaaatatgagtaatatggattttgaattttatatttaattataaataacacaacaactgataaaaactgagtataaaattataacttgagagtcgtgatcatttagatgtccgaattattttttgatatattgagtgttaatgagaaaataggataagttagctcgaaaataggagaggatgggagattcggaggatggaaggagtacgtactacctttttttaccttatgtacgtaaggtgttggtggtggggataccaaatttattttctttgcgttggagatctaattgttaaaattaacgggtccaccattttaaaagaaaatcgacggtgtgattatagaataccacgtggtgatttatgagcgtttgtagaaggccatatgacggcttgagagtatttattgaaagtttaattaacttttagtatataagtcctttaaactttttagaaacgctattaagctgtcacgtgacactcatataaaagcttgtaggtcaccacatgtcatatctctcaattaaaagaattattaaaaattataagaaaaagaaaaaaaatctaactgtggattttcacttaaatcggtaagatgtgattttatatatctattaacactacctcctaaactcccctagtgtacgtacgatgtgcgtagtagtagtactgttttcagaacgtgtaaaggaaaagtacttttgcaaaagaaaggaaaaaaaacaatactaacgtggagtatgtatgtatgccgccggaaaaaaaaggaaaaaaaataatactaacgtttcctgcccgatccagactttttctatatattagttagagtaaacatggtaatttttttaaaaaaaaagtagggacaccagatttattttttagatggagatctaatggttaaaattaatgggtccaccgattttaaaaaaaaaatcgacggtgagattttagaatgccacatgacgacataagagcatttgtagaaggccacatggcggcttgagagtgtttgtaggaagttttatggacttttagtatataatagatagattacaattaagtatgtgattggctttgaacccataaaaaattaatgataggaaccaatacataaatgcttatattgtggtacaacatttaaatcctaaaatacttatattttaaaatggatgaagtattttacaaatatatcctcctcaagcacactaggcacttatatatgacagctcggtaccatgtttgtagatgtggccgagggtcaacacaaacctcgttcatgccaaggggtttgaggcttatggactccaagtcttgttcattttatttctatctttaatccaatctcattggcatgggccttatagactttgaggcttgtttattttattgttgcctttaatcctatcaatttttggtaagataatgaatttaagatagtcttactaatgctatcataccagaatttggtagctctaggaatttcctctcataaaaacaacaccagcataacaaaggtattaaactagacacatccaacgctgccaaattttagtgacacaaaaacgtgctaaaatttggctgaattttggtaatgttgattttagcaataaaatgaataagccattagtaccaaatagtccttggttgcagagtgaacacttgaagggttcggtcttcgttgccaaattctttagttgtaggcttctacgcttcattgccaaggaagcaaaccctctgacttaactgcacatgcagttgagtcactgacatgtggatcctactttgctatagctcacatgccagtaaatccctttcatctcgccaattatgtattgacaacttggtacgaggtccaacatgaactcttgtatctcaaagccaaatgctatggcaatacatatcatttcacatattttagctttagatctgtagcactattatttatttaaagttacaaaagttgtaatttattaataaaattgatgttcaatatatagttttgtgatacaattccttagatctatcgttttgtaaaaataattgacactaaatctatagtttgtaatacacattcttataagtttgtagttttacgacagtttccttagatctatcgttttgtaaaaaaaattgacactaaatctatagtttgtaatacacatccttataagtttgtagttttacgacagtttgttttaaatatcaatagttttgtaaaatttattttatttttattttctttttactagcggatgtctggttgatagattgcaatgaaaatgagaaagctgagggagcatatatttacataggtttttcaaattgttttattacgagttcagtgaggggtctattagagcaggtacaatagcgggctattagccagctataagcatattttaatgagataaaagatgagagaggagtagcgggctacagatctgtagccagctgcagcacggactccagaatacaatatgtgtatggtaggtgggaccatgtgttaatagtatagtaagcaactattatacgaattggctattagatcggttattatagataaattggagttagtagtgggctatactatttaacttgctcttaaattgacgaaaacacacagaaatctacacgggcacacacattgcgtgtagtgtgaagcatgcatgaaccgtccgatccaaatccaatggtgcagttaacgtgctagatggcaccgcagtttcccatctatgggccgacgcttcgaagctccagaaaccctctctctctctctctctctctctctctctctctctccccttccttccccgtgtcttccagaatgttccctttcgccaccgtcgccacgcctcgccctcaccccgcgctccgttgccgccgcccgccgcgccatggtctacgccgccaccccgtagccaagcccgcccagccccaaggcggtgcgggttgtggtgaagggccgggtgcagggggtctttttccgcgactggacggtggagacggcgcgcgcgctgggcctcgccggctgggtccgcaaccgccgcgacggaaccgtggaggcccttctttccggcgaccccgccagggtcgacgagatggtgttccgccacctccccgtnggccccccgcgccgccgacgttaccggccgaacttccctgcctcggcgaccccgttaaacccggcgggggctttacccacaagctcaccggttggagaagaagacaacgtcctttttt

SEQ ID NO: 5815 - DNA, 6712 bp, Oryza sativa
aatcataccttagataaactgttgaagtataacgaaatagttcataattaaattaattgccaattcttgtgcagctacatatatagaatgaaaattgttgcaataacaaattagttctccaagttgccattagtggaacaaaggcggaaataaatcgtgtctagtcctcaactgattaaatagcttcctttatttgatgatataattcaatctcaagaagaatttttcttcttgcttatagcattgacatagatagtatgaaattgatttccttgcagaaaaaataaaacaaatgtagatcagtatgagaaacatagagtggcgacaacgtttggcgtgtcattgcttaggagaactttccttgtgcagaaatgcttgttgacagactcctctgttggctcgaggccttctgcttccgcactgaagctcttcttacctaggttgatgaggataaggcttgggagttttgggtacaatatggaggtcatatgggctttgatgtaaaaaaaagatacaaaaataaaagcaagtctgatgacaagatcacatcctgcagatatgtatgttcaaatgagggtcgacgaacagaggacaaaagagatcatctcactaggtatcctagagctgaaactagaactgactgtaaagtacgcatgggtctcataataaatcgagaggtaggaaattatcaagtgtcggatctagttcttgagcataatcacatccttcatttgccagaaaccatccacttgatggcatcacaaagaaaaatttcagaaattcaagcctttgaaattgaagcggctggtaattcagggattaggccaaaagctgcaatgagttggcatgttaagaagttactggaccgcataatcttggctacacacgctgcttgtacccagtgcaatacttttgtttttttttcaattctactgttttagtcacaatagccacgccttgtagtgttctccaaactcagctgttgatttgcaatgcatgaatgatgctagttgaaacttaggtcttattttgaattattctaaatgatagcagttttatgcttcagtagttttggttctcttgttcttgttgtagacttgacagccttgtcctctgcgagactgagtccttgcatgtagtagcaggcaacagggtcattgtgacctgatggcctagccgatggccacagaaatcgaactgggccgcacaatatgcagttcgaaggagggaagatggatgtgtgccgttggatgcagtggtcagcagggatgaaaccaactgcaacaccgtgactttccacccaatgtcagaggatctgtttccctcctcctcctgtgatccacgctcaccctaaccccagatcatggccggccgacagcggtgcgaggcgggagcgaccgcgatggagacggcagcgactccggcgtcgggccaaaccgttccgattgctcgcgggagggcatggctcgcaacagacgcgtgattctaggactgatgtacgggtactacgaggaggcgctcgacgcgctgtcgctggaccgtgtgctagtgctcgccgcacgctattgatgctaaaaacacacactagcctgtaagatctgcttaacttcagtgcaggtccaaaatcttgcttttaggttcgtgagcgtgccagttgatttgatcatgcaatcaataagaaagaaagataagaaaaaccgcggttaaatctataaacgatagccgatcggctagttgccgatgacatatcatttatctttgagccgatgtcatgttggaatcgatcgacagttatgaataaataagataaagctaaatctactcgatcggctgtagatattaacgatatataatgctttcttcgatgtatatttaaactacgtgattgggatagatcggtcgccatgccgagatagtataaatcactaaagtcgaagtatacactaaagtaatgattatatatacgtttatagcatagccgatcaggtagatctagcatgtatcggctaatactccgataccactttatactaagatattaaaacaggcaaaatatatcaaacaaaaagtctaatatactttaatgcaataagatctcactctaaagggtagatctagcctatcaatcaagcatatgagatgtaaagtagctaaatcaggtaagatcggctgaaaccccgatgctatctctcttgataatcataaaacaagccagatatcataattaattatagatattacttaatagatcgaattcaaccgatgtagcattaagcataaagacaagtataagatctaggcaagaggatgaaaacctctaagagatggtagatacattatataatctagattaataacaaaacataactctatcgtttacttcctaatagtaagaaccagccgatgacaagtcatatagcgcaactaacagagattacagagtgtatatgataactcgacgaattacataaacaggattagagtgtcataaagatggacacactaatccggagaacgcaaaccgccatgacaagtttcatctagttgaagatcgaaaccgatgcagttcaacccaaaagtaggaactcgtcgaaatagaacgaaagtaaaagggtggcgatgcaccgaaagtattattgaactgttgttttttattacattgggttcagccgttcaggtcatatttatacctgagatacaaaatatgtccttgccggacacaactcttatctctaacaaactctaagataccataagtctttgcggcagacttttgcccaaacatatctctaaagagaattacacgaaatatcctaattaatatatataattgtctttctgagagatttatctccatcgtggcaatccttgtgaagcacgttgattgattctagaaacagcctcggagccatccccatcggaatcggttgtattgactctaccggctgtatccgttgttctctatccgatccatctcaaacgatgcagactccagccgatgccttcgcagccgatgcatactctgttcttcgaatctaactctttgccgaatctgcttcgattccaatgccgaacctggttcatatcttaccaaatttggtcgttaacacacgcctcctcaacgcaggcgtctacttcggcttcgccgaccctgtcaacaacatcatcgccaacaccctccgcgtcgtccccagcgaactccccgactccgacggtgccatgattccgaagcgggagaccaccatggcctcacggtcgcgggtggcaagagcaagtggggagatggtcctctctaagatcgtcaccggcggcgacgtcccctcccctccagaggcgcacaccgtcgcggagcgctcgctggaaggcctgatcaccttgacatcgtactaccactatctccccacctaggatgcgctccgctacctccgcctatccatggcggatctccttctcgccgtccgcctcatcgaggttgaccgccaccatcatcgtcacaaggacagattccaattccgctcacatgctgccaaggctgctcttagatgcgccgcgttgtccacgaggctgcctgatgttgatgctgatgctttcctcattggattgtccgcgccagtgtctcacctcgcccactctttgtctgcagagaattccggcccgtcgtcgcctcctctcgattcaagatgtgaccaggttaaccagattgatgcagaagccgctggatctgaagaatttgaacaatcctatggatcttgctgctatgagatgccataaattcgaaatgaaggttcagcctacattgacactgtcactccggggcatttttctggacagaatccatggtgtgtacctcagggcaatttctcggatccctatggaagatttccgcggccgttatcaccacggccttctcaaggccggctattgttacgggccactcaatccaatgtttcctgcaccggatcaagctctcaaatttttatatgtatcgagtctcaatctttggatggtctcatcaatgtgttggttgcccgtgtttctggcctctctgaacatgatgccatggtttatttgctcaaaagtaatctagatcttactcaagcaatctagacagcgggacaaaatgatataagacatcaagttgggatgttactgcttacatagctacaacatatgcatcgtctcatccgaaacctgaggcttatctgcattttgccatggaattgctacctatggtgcggtctgttgtcatggaactgttggcacatactctctcttccagccacattcttcaagaactgttggcacatactctctcttccagccacattcttcaagaactgttggcacatactctctcttccaaccatattcttcacctgccagagttgttatcatattcaaggagttacccttcacctctcagagttgttatcatatacaaggagttacccttataattcattgcagccaactgatgagctaacacaggacgccttgaaaatggcctaaagctacaaatcaaactttttctctcaacagaacattgttcgcaaaaaggtggaacatacattgtgaaactatgatcaaaataaggttagttctggtcctacaactttagctttcgtgtaatttatgccctccacatcttacagtttaatgtgcatgccccggttgtaaaatcagttgtttagttgcccattattcctttttgtgatttttaggatgggcacatgcgaggctctttggtccagcaaaaagtacctggaggtatcggtagctcatgataccaaatcgttttcgatcgttggatatagttgggcatgacgagtattgttagatccaatggtcagaaatgatttggtaccgtgaggtactggtacgtcgaggtacttttttattggacggagcaaatctcatatttttgacacttgtgactatagggacaatatgaactacgtttcatttgcaccatgagtgtgtgggcagcaaaagcttcagggacttgaagtatgttgagaatataggcatataatgatttaatatattccataaataaatcatgacattacagatgtatactagcattaacgcatcattagatctacatatgtaaactaagcagtaaaacatgaacaaatcaaatatgcgcaacatgtcgaacacgtaccgaggtggcggaaagaccggttgctcggcaggaactactcgcggttgcgagcgtcgatgaaggcgcgcagcacgcgagcagagaggaaggcgagccatcgcggatgaacaaggagcagcgcgcgaagcgcttcccaaaaaccttattgccgccttctcccggtgcaggacgtcgaaggcagaggttcgggatacctgctctcccgatcgccggtgcacgctggcgagcgggatggagtagtccacgagcgacggcacaacacagaggaggaggcaatccctagattgatttcgtgtgttttgcgtgaaggcggcggctcggtttatatagagataaacccgcgtaaccgaaccggataaggcgacggttgcttgctcagtgcacccgcacgatctccactccacgtaaccgaaccggataagtcgcgcgtaacttatccggactccacgccgttttcacgcaccgaaccggattttccggactccaaaacaaaacaaatctgaattttcctgcagcaaaacaaaactgcaaaaggaggctgcatctgcgcaaaggtgaggagccaattttgcggaccattcgacgcgtacgtcgtgcacgcgcgccgcctgccaggctaggcgaggcgagcgagcgcgcgcgtgtgttccccctcttctctccaccacacatgcctcaagtggctaggagggcatcctccattttaaggaggtccccctctcctagaataagcaaggtggtactaaactccacatgcatgccatcctatgaggtgggcttttgtgattttccaaagaattaatcttcgaatgggccttagcccatctattaattccaacaatccccaaccaaatctcagaatcccactgagatttgtcttttccaatgtattgtttatataccagcggttcgatggagaccgatcaaggttgaacatccacctagatctccaagctacacttactcacaacttgaacaatggactacgccttgaattgacagtcttgtgcaagcaagtttcactcagagtcttatctggtactagaccgtctgtagtttacccctcgggtagagcatataagtcatactcctaggtctttagtaagcttcctagaagattcacccaaaatcttcatagactgcgaccaacagtcaagcttacaaaggtgagttctttcaagaatgctctgcaggacagcatcttcgctatataaagccaacagaactcattaaggcatagccaacctgccttgtagctcacgagagtacatgcatcttcacttagagagggtatagattggtactctcctctagtttactaatggtttgttcttcccaggttctaattcacaggatctccgatcacatagactgggttaccaccatagtataactcacatgggtctcaaacccatctccttcgatgcattatctatcacatttcgtgatagtcccttcgtgaaaggatctgccaggtttctagctgtttggatgtaatccaacgttataactccggagtttctcaatttcctaacagacttcaat

SEQ ID NO: 5816 - DNA, 9121 bp, Oryza sativa
  unsure (1)..(9121): unsure at all n locations
caggtttagcttaaggaacccaagtgaaatggtttcttttggtcctctgttcggggaccctcattttaaaaatcaatatttgaagaatgtgattttgtcatcagactgcatttaattttggaactttttttacataaaagccaatatgacctccatattgtacccaaaactcccaaagccttatcttcatcaacttaggtaagaagagcttcagtgcggaagcagaaggcctcgagccaaaagagaagtctgtcaacaagcattttgcacaaggaaagttctcctaagcaatgacacgccaaacgttgtcgccactctatgtttctcatactgatctacatttgttttattttttctgcaaggaaatcaatttcatactatctatgtcaatgctataagcaagaagaaaaattcttcttgagattgaattatatcatcaaataaaggaagctatttaatcagttgaggactagacacgatttatttccgcctttgttccactaatggcaacttggagaactaatttgttattgcaacaattttcattctatatatgtagctgcacaagaattggcaattaatttaattatgaactatttcgttattacttcaacagtttatctaaggtatgattcacaccccctcaaacccctctattctaagaaaataaaaatcaagaaaatatttgtttttcgatctatgtgttggaaaattattgggattttatgtgttggaagaaaattattgtacatattatcttttaattaatgagtagatgatagggttaaaattagagctagtagtcacatttactataaaacttgctctaaggcaagtagcacattccaacgaagttcaatcaaaagaagccaaaccatcgcgccaccgctagtgatgactagaatgacccgtcacaacatgtgcacaatctccgtggtacaatctcaactccagtagtactccagtgctctctggaacctcctagcttgcccgagacagagaaaaaaaagcctcttctctggcccctcttcctccttgattccggtggctcgccgccggtgacgggagggagaggggtcaggctcaatcgcgtctccttcgtatagtagtttagtcgggttagtctcgtagtcgagttagtctcattctgtgtccttcctattcttcgtctttggtcctctatgaagagtccagtgttcccttcttcagatctgaaatcttgtgggtggatcagccagggaggtcagtcttcgcggtgccagacctcgatttcgtcggccctagcgacgcctgattgtggaaaattcagctacagtgccggtggccgaaagtcttcaagctttgactctttgaggtcgctagccatagtttgcggtggatctggatggcttcaaccgattttcgcggcccctttgtccatctgatccttggcgatgtgcccttcctcagcgatgtgctcagccgcgtcgtgtccggtgagggtgggctcacacacacccagatcgtcgtcgtatttggtgggtttggaggtgcagagttagctgagttgttgaagcagttcgtgcttgctgattcctcccatgcgagcatcaagaacattgtctcgaccgacagcatctccatcaatttgctgctgtgcctaaatcagttatccaagcagtagcacaagtcatgggccagcaaggagcacgccatgaatcccctgcatcatacaggcaaccaacaagctacacaacaaggcaaagctggtcccggcaattctgtgcatgctggcaacgaggtctccttctcaatcctcacccatgggatacatcttaagttcgtaagactttatcatcgccaccatctagcttctctaaagcttaaggtcagctgggttttgggtgcatcttccatttcattcctttgcagcagtatccatgtcgagattatcgttcgggttgagcaccgactatctgttagactttggtcggcagggatgttgttagtgttcctcagatttgacgatgactttcatggcaatcattggttgagtccggtgaagccaccaacatatctacgactcaactccaaacctcaattagtgccaaatccgtggaggcagccggagggatcgctggcaggtcaagcgggaagcacgtttgaagaggcccttgggtgcaatcgtcgcggcaatgccgcggatctccaacgattgtattcactactgatgtattagatgatctggaggtttgctttcatcattcaatctttaccttctttcaggaaaatggtccttaacgtttgttgtcaattttttgcaaggcgatgtttcagggaatgttgttcccttccaatgtactctgtttaatatgcaataaaactttatgagtttcaaaaaaaaaaacaacatgtgcacattgtttaagggctgtttggatagctctcatacttgtaaagtgtagcatgacacactttgtgttgccaagaattttttgtcacaattgtgatagtccatggtaaaaaagtagctctatgataagtaggtcagcttatttgtgtctagctatgcgacaagtagactatggtaaaatatggcataacctatttgtggcttaaatcaaacacaaaactttagtcttagtagatcaaacttagtgtctataaggttggcaactaaatttgctacgctttaacttaggtaagccacaattttagtaggtagtgtttggttcatgccacaaatctactttgcctaacccttaggacctgtttggtacagcttcaactcctgaatttagctccatgagttgagtctggagtggagttgtggagctgcctaaacctagctccacaactctagtacattttgagagagctccacccaactccactcccagttttggtggagctgaaactgtttggctgagctccagctccaggagctggagctgtgccaaacaggcccttagtcacctgggccacatgttgtacactatattttcttgtctaactttgtctaaacttagtttgtcattttatttgccacaaaaatgtggcaagactcaatttagtaaccttagtcaaaaaatgtgtgacataattagtcctcaaccaaacaaacccttaattaccaaaaaaaatgcttaagtttgacactcaaccaaatagtcccttaggccttattcggtgcagcagtttggagatagatttttattacacgtaaaacgagaaatcttattagcacatgattaattaagtattaactattatgaaagctttttctgtcaaaaacacactatttaatagtttgaaaaacgtgctaactaaaaacgagcttgaagtttggagttgaggaaatggaaacaaacttcattccatcagtgctaactcttctgagccatacacgagccacatatcatatcagctggacgatatcgctaacgttatccttacatccacgagggaaatgccgcacgtacccagaagcgtactaaagagaatcagaccaacaaaaaggttggcagaagaaaaaaaaaaaaagccattgcagcccacagcccagagcccactggctcggcatggcccacaactcccggaatccgcctcacgtggacggccagaatccccgcgcggtcgcggtccaagattctgaccccccccccccaaaccctccacaatacccacgcgtctccactctaccctctcccactgcaatcgggacccacgtcgcactctaccccacatgtcacccgcactagacaaccacccccaccctttcggcgcgagccggattagacagccgccctcgtgccgcgtgcgccaccgatgacgcagtcactcggctaacacgcgaatccgacggccgggacgcgattagcggctcgcaaagccctaattagatcccctctcctccctcctaaacccatccgtgacgcgaggcagtgcggtgcggattccattctcctcttggcatcacgaggcggcgccgcttggtctagctagtagccacagggagaggtggtagccgcagccgccgccgacgagacctcgccgccggggggagggcaccatgtgtggcatcctcgccgtgctcggcgtcgcagacgtctccctcgccaagcgctcccgcatcatcgagctatcccgccggtagcatgccgccctcgtccccttcccctctctctctctttctctctctctgtctctcgctgtatatctggtccgcgcacgttcgtgtgttcgttctgaatcgagggatggagattttggccgtggatctggaagggttggactcgtcgccgccgtgagatggttgtgctctaggtggcgtcctgtttattcgactatcaaatagctccgttaaaatagttcgtcggaattttgatgattcaacgtggtcgaaaagttcgtcggaatgtttgggggggggggggggtaaatccaacgttgtttttgtttttggttatcaatatgggagcgagctgtggtgcatcattaatgacgggttgttcgatggatggtgactttactggttaggagtgtttatgtcgtgtaagcttgtaaagagataagaatatagatggattatggaaatggagacatggagttctatgtagtgtagctaccgttttggtgagtctaattcctcagagttttcattcggaaatgataacgtatcaacaagttttatttgcacgagatgcctctggcgtgtgctcttgcatggtaatgccgttaaatgatgttgattccaatttgattaaaatgtagtattatatacgtcaactgtaacatgtaacacatgcctccgtgatgtgccccttgtgcttgctgtgacaagtacggggttctgatttaaaattacgacaatggcgatataatgggcttaataatctgtaaaatacggtcagctttgttttgcctggaattctattgttgtgggaagtgtgggcctgctaactcagagttatgctatggattgccaatatgtagaaaatgcatctttctattctactgtagtataatgtggcatgtttttatcactgtagtctgcactctgcaaccacttgatctttaggaactgaatggttacagtttcttgtgtatgtccttatattagagcaaataattttcaacgtagatttaataaatcttctgatagaattagtaccaacttgttgtagactcaaggcatgctgcatttttcataggttgttgtgacggtatgtaattcatagttttcatagatttaataaatcttctgatagaattttttgaactgcttatgcactgactaacccaagttttccaattttcataggttacgtcatagaggccctgattggagtggtatacactgctatcaggattgctatcttgcacaccagcggttggctattgttgatcccacatccggagaccagccgttgtacaatgaggacaaatctgttgttgtgacggtatgtaccttgactgttccattgacccttatgcaccctccgcagattttttttttagtatttcattaacttttaagttttaatatgtgatttgcctcgctattctacttttggtaaatagcatgtttctgaaatattttgtcatgggactttccaaatatgtcccttgagctctttgcatcttataacggtacaatattttaatcatcaaaatgtcttgtaatgaaataaatcaaagatttctttccttattatagtttctgtggaaccacatctgatcttgtagttgacacatccaggtgaatggagagatctataaccatgaagaattgaaagctaacctgaaatctcataaattccaaactgctagcgattgtgaagttattgctcatctggtaagttacatgttctctttgttgcaccttgttattgctcaaatttcatctaagcatcgcctggtatacacttactattccttcgtattgacactttcatattgatctttttcacagtatgaggaatatggggaggaatttgtggatatgttggatgggatgttcgcttttgttcttcttgacacacgtgataaaagcttcattgcagcccgtgatgctattggcatttgtcctttatacatgggctggggtcttgatggtatgtgcactcctgcagtgaatctgttcaccacttcatctagttattgatccttgtgctggaaaccaggaggtttgattccttatttttctacaaaaaattgtggtggtcacaattttccattggtttgtttggttataccactgtttcagtggctagtcagtgcttcaaggctagggttcacattgattcttgctggaaccatttttctctgtttgatcaatgaggagaaaaaacagtgccggatcatttaccatcaattgcctattgtgttgcaaattaaattaaaatggaaaggaccaaacaaaatttgcaaacaacctggcatatgcatagttttagcacaggataatttggaactgtaaccgtctgtccgtgtggattgcatcacttcgagtgagtctgagaaaatgaataatttgtggcattcagtatttcttgcaattttcaatatatctgttgggaatgttgttgattgatattctgtatatgtgcaagcatttacattttgaaaagttaaatgtgatagtcagttgatggaaatcttgatacttgctattcaacaagcaatcgccagctctctcttacttatgttgttgacggtcataggctttaagcctactttatgcgtgtaagaaagaaattaaattgtttggcatgtcctaatctcttggactgtcagataaatataagatactccctccgtcccataatataagggattttgagttttgcttgtaatatttgaccattcgtcttattcaaaaaattttgaaattattaattattttatttgtgacttactttattatctacagtattttaagcacaactttttgtttttaatatttgcaaaaaaaatttgaataagacgagtggtcaaacgttgcaagcaaaaactgaaaatcccttatattgtgggacggagggagtagttcacttaatagttacctattttcttgacaaggttatcaaatctgcccttttagcttgcaaatagaactatagagatcctggtttgatgcctgttgcttcaaagaacattaaggtttttgctactcaccatgatggaacattattccttttggatccgaatatctgatattgggacccttcaagacttttgttgcccaagcccataaaaacacaaaacaagggcaatataatatgtttgaagatgcactttttttctttggtatgtttggttaccaaatctccacgtttagtttgcaggataaaaattctggttttgatatatgttccttctaagaaatttaaggttttcgtcactggtcatgaagtaggattctttttcgatgtaatatcagggtccttgttcaaggtctttgttgcccaagctcataatacagaatgacaatataatatacttgcagagggcaagaggcaccgtttccttccatatgtctggaaatataatttctccttgtcttcgaatcttggctagtgcgatgttagtttagcattattgcctttgtgatttttattagggtatacttggtgtttatttgtaggtgtattgtgttttcaggttcggtttggttttcgtcagagatgaaggcattaagtgatgattgcgagcgattcatatccttcccccctgggcacttgtactccagcaaaacaggtgtgctatttcgcatttgtgacatactgacagtatcgtctaacagttgatgttagaaacactgtttttaggcccagaagacgaaaaaaagaggaaggcagaaatgatcaaaactattataatattgcaaatatcattttgttttgtctatgattactgacttgtcttctaatatccaacctaggtggcctaaggagatggtacaacccaccatggttttctgaaagcattccctccaccccgtacaatcctcttcttctccgacagagctttgagaaggcacgtcccattcccatatctcttacgctgcacaaaatctcttctaaacttttgatatgttgtgtttatgccgctgattaggaaaagcttgttcaaacctcagatggtttttcatacaatagattattttagcatgatatattatactgctctcagattgaccaatgatggttcaccatgttgacctctgtattaatattcaaatagatggcataacatttctgaatggtctatgcatgtttatggtagcataagcaaatgattatatcttacataagatgcaaattctgcaggctattattaagaggctaatgacagatgtgccatttggtgttctcttgtctggtggactggactcttctttggttgcatctgttgtttcgcggcacttggcagaggcaaaagttgccgcacagtggggaaacaaactgcatacattttgcattggtttgaaagtaagtttcttaagcattgagtcctattattgcgaagatttgtgttagcctgtagggtatctttccaatttttacctgttctcctggtgttctgagtattttgaaagaaaatggatttttttttaaaaaaaaggagtgatatgcttagatattgggcacatgatgatctagttcttcaatgttccccttttttgtagggttctcctgatcttagagctgctaaggaagttgcagactaccttggtactgttcatcacgaactccacttcacagtgcaggttctgtatctgttctctgttttttttgcatagtgagaaaaaaaatcttttgaagctctgattcaatattgtaaaaaaaaaatgaaaacaggaaggcattgatgcactggaggaagtcnnnnnnnnnnnnnnnnnnnnnnnnnnnnnnnnnnnnnnnnnnnnnnnnnnnnnnnnnnnnnnnnnnnnnnnnnnnnnnnnnnnnnnnnnnnnnnnnnnnnnnnnnnnnnnnnnnnnnnnnnnnnnnnnnnnnnnnnnnnnnnnnnnnnnnnnnnnnnnaaacaagaaggaattccatgaggaaacatgtcggaaggtaattaaggagaatattttcatgattaatcttcttctgcccaaggcagctaaatg

SEQ ID NO: 5817 - DNA, 19849 bp, Oryza sativa
ccatgtggcatgccacatcagcgccacgtaggatactagatgggatgtgtcgatttgggacctagatgatacactttgacaagttctggaacccagatatgcattttgagagtttaagagtttagagacctatatgacataaccctataagtttaaggaccaccaatgcactttactcttaaaactaatctttagcttataatttctcatatagtataaggtttgtagcaacaagggtgtgttttcaactacaccttttcatcttttatttcatcttttccatgcacaagtttcctaaactaataaatggtatgtttttaaaaatatttttatataaatttgctttaaaacatcatattaattcatttttaaatatttagctaattcttactccctccatcccataatataagacgcgtacacattgtaagattcaacatttaaaacatttgaccaaaacctagtataatatgaaatgaattttatttgctaaaaattatgtcattaaattgagatttaaatttactttcatacggagcaatgtacaggaaaaataacagaaggagacacgtacggccgagagagagttggattgtacaggtacaactgtgcatgtaactagatagcaacaggttataaaatacattcttgtttgcataatggaaattcagaaatcaagcaatattgacagatgatcgaccgagatcgggccgggaggcatgaaaagagcagaatcgatcatgtgcgctctgcagatttcattggaatgaagggtcagcgtcaatgtgtcattggagccgtggcccgtagagttgatgcctacaatacgatccacgtacacacgcatgcaacctagtaataaaagcactgatggcgaagactagcttacccgttgcctttcttcctctgttttattagttgatgcatccgtactgcataaaagtctattggtgctggtcggaaatctagacccactccaatgacggcactgatgtggagattcaaaggtaaacggcatcaaatgcatcgagccaatgctttcagccaacaactgaatctcagaaacaacaattccacaattccataggtgaagaaatcaagaacatccacaactgtagagcaaattaagaaaatccacaagtcaggaagaaatcaagaacactgccgctgccgccaaaagtgaggggggcccgctgccaagaaagctcagagatgacgaggtcgtcgttgctttcaccgccgagaagaatgagggaaagaggttcggtggtggaggtggggccaaccactaggaagggtggagtagccgtcgccactgccgccatgctagggagggtggagtagccgccgccgccgtcgccggggagcagcaggcatcacgttggggaggagggagcaattgttgatgccaccatgcctgggaagagggagctaccccaaccagatccccatgcgtgagccgatatcaccagatccgtgcgcgcgagcggccgaagccgctggatccgcacgcgcaagtaaccgtcgtcatcgaggtggaacaagagaggaagcaagaaaacgagagcaaaagagagagtgagaaaggacggacgaaaaggagggagtggataaggtggggggacggagccacggagggaaaaaataggattgactgactcagctcagtcggctcggcacataggtccagttttgaaactataattataggtgctcttttttttaagaaaatcgacacctatagtataagtgccggtttttcttcagaaccgatgcctatagttgcttaatggtgttggttttttgtgtttttagcccgcagaggtgggaaaagatctataggtatcagttttagtatttccggtatctaaagtgccaacatctatgtgccttttgtagtagtgcatgtgtgcgatcagcctacataatagtgcgatatttcatattaatatagtaaaagattacaagagtatagttatgagagaccatgattaagaaaaaaaaatagacagtaagccatgccacatgcctacaatagaatacctcgttgttgagaaaataattacaagagtatagttatgagagaccatgattgagaaaaaaatagacattaagccatgccacacgcctacaatagaataccccgttgttgagaaaacaaatagaagcaccatatcccaactgtgccctcacagagggatacaagtctttttctgcacactttgttctcactcgtacgcactcgggaagaattttccgatcatcggcatccagaaaagaagttgcaacttgttgtatgagtattctattaatcctattaagccctgggccaggatgtcacatcctcaccccccttaagagatcgacgtccttgtcggtcaaccccatacgtcccgcctctgccaggtcgggacctcttacatctggcagcttttataggtcatcgactgtcctcacagaccaacacaagtcttttttgcacactttgtcctcattcgggaagaatttaccaatcggttcacccatcccaaaattgctccaggccaagcacgcttaacctcagagttctttggagatcagtatccagataaaaagctgtaacttgtggtatgagtattctattaatcctattaagctctgggtcgggatatcacaaaataggccttcaaccactcatccaagatgcttgagatgccaaggactttgccatgcccatcctggaaaatcaagatgtggttttcaactgaagaactccaccaaagacatgaggagagataccacaactacgcccctagggggttaatggtgctcttagggcacccacaatggttatctataggctctctataagagatccatgtcagcatattttcctacttggaagagattaaatgaagatagagagcaaagctatctactaacctggagatagtctatagagaaaaacgaggcaatgtattaaagagctatagatacccatgtagacatactattaagttggtttactattaatctagtctattgctgagatgtacatgttttatagatagcaccttactttactattacgggtgctcttaagcgtcgccacgaccggccttgaatagggttagcctttcgcgtggaaatcttgctcccctctcttgtcactgcatccacattgtcaccatcatccaccaccatatgaacggattaggatcgtctgccttcacagcacaggcgtgcagtcagtcctcatccaccgtccaagtcatccgatggctcacggctcgcatggcatgacgcttaatggaaccacctagtggcagcatacgcacctggctacaatggtgttcgccatcgcctgtgtatgcgccgccaccagccaccgacagcgccgagagccacggcttccccaatcccattccctaccaccactttcgtcagggaaaaaacccgtcgcacacatcgacctcctctcgcgtcgctaccgctgaaggccgcgttgaggcccacgctcgctgaagtcgctgcctgggcgccaataagatagtcacctgactgcctgcgaggtcgtcaagcgacatgatttgttcagttgtttcatttacctattttgacagtgaggtggagacgtggagtcaagctaggctatcaattcaacatatatcagcagccttgatcaaaccagctaactaatctgctgctaatctagtgttttgatcgtattatatatgttacagttcatctccttccagaaccagcaacaggggaaatcaacaaccaactaaacctagctagcggtcgtcaagctccacgccggccggccatgtggtgtggttaatccatccatcggcggcctccgacttcgcagcggcaagcctacatagcctcccgcagatggcaagccaaggttttcctccacctcgtcgacgcaccgcgggtcacggcagacacaacattgtgactagtgacaacggtagtgacatgatttgctcgatctaccggtccctgtgggagatgacgccggtgacaaggcaaggaaagattgttggctgggctagacgtcggtgacagaaaggcaaggaagatgatggtttggctgggctagctctcttcaacgcatacaccacgcaaaacgttagatggcatggacagtggatgatggtcaactgcacgcccgtgccttcatcccgtgaaggcagacgatctgaatcccatatgaacaccatcagcacgcggccatcgcaccagtgccccaccactagctggccatcaggaaggaggccctttcctaagaaggaaatggtgtcccatgcgccgcagaactccaacatgccattggcaaagcggccgctagcatcttcatgtaccacccgcgtcgttgctccatgccctcctatcacctcgggtcatttgcctgtgtcgtatcctgcatgctgcctcacactgcagccacctcataggccctgagtgaaaattttggcctcaatgagtccagccaccgcctcacattgcctcactcatctggagtacttcagccattccttgcatcttaggtggctctgatatgactggacggcagaagggaaaccttggcagggctccatcctaccatgcgatgaaacagacaaacaactcttcagggtttcaatgatcattactttaggcaatgggggtaaggcaaaattctggcacgacagatggcttgatggccaattccccaaagagataactctttccctttataagctggtgacgaggaaaaacaaaacagtggcccaagaactaaaaaatcataggtggttaaggccattacggaggatgagctcgacaaccgaagttcgagaattcattctcctatggcatttgatacaacaggtacaaattgatgaggagagggaagacgacctaacatagaaatggattgcaaatggaatctactcagtcaattggatctacagaatccaattcactggaagcatacaggacaatagatctaacttcatttggcgagcaaaaacagaaaacaaatgcaaattctttggatggctcatggttcaaaagaaaatcttgacgtctgacaagctacaacttctaggttgggacaacagcccgacatgctccctctgtgggacaaaatcagaaacaacggtacatctcttcatggactgccccttcgcgaaacaggtatggacaaaaatttggatgaaactaggcttcaacatgcttgcgtcttcttctttcaatggagacataatgggttggtgggaagcatgccggagagaaatgatcaaagaacagagaaggaactttgatggcctattcatctacacgatatgggtatttggcttcaaaggaatgcaagaatttttaatgacgattatggtacggtgtcacatgtggttgattccatcatcaacatgggcaaagtttttgatgaggcgcaaaatggatagatgatagaacgccgacttttgatgttaatggccttgcactgtctcaaagtgttttaatttcctcctgttttcaaacaatagacacctcttggaggtgctcctgtacgtgaccttcttcttctccttttatgaataggctaggcagagctcctgccattatccctaaaaaaaaagaattataatggtatggtttcaactaattggatagcaattttaatttttttaataggacgaatttgtagttgcatggatcaaatttaacttaatatttatgagcacctatatatattatacccatgactccaccattataccaccagcgttttctttctatattgcttattctctactgcagagcattgtttccattattgtgcttggattccgcacgtacgtgaacaggtgtgtacggaaattatctaaattgttaattggttatgaatttttaaagaaaacataatatatattattgaattttatattgctctagagatattagtgagaaattcaatctacagaagtttagataatagattgattaagtccagcctctatatcaaccagagatgtacatagccaatttaccgatagagaaataaaacaacaaatgtaatccaatttactcagctggatgtataggccgggtaaaaaaaatacacatatctaaaaaacaaatgtaactttgatatgtccatatacctttttagttcgatttttttctagatatgtaaatctaaatttgctgcacgtatgtgttctaataccataatttatctatgatgttctatataaaaatataatcacatttatgaaagcagagcacatattttcaaggtctcttaaagtactttgatatccagcagttccaaagcacctccatatattatctttatgtcttgctcagatctgccttacaggtataaaaacgaccacttttatgagcagagaccgcgacgtacgtacgccaccagggaaatcgatcgccggccaggtcccgtgatcccgacgcactacaaatcattgagccccctgctatgtctagcgaaagcaacagtcgacaacaagttgatgcgtgattgaaccaaccatcttcctgtaggagtaagtaggacacagcttcctttcttctaactcgggaaatatgtaaaatatatagtgaaaatcacatgtattgtgaaaatctggatactaccatcagatcaaaaatgaacgtctaaaaattattcacgtcagcaaaagtaaaaaaaaaacttatagatttacctagaaactaccattggattaaaaaaatagacgtatgagatttatccaaatcattagattaaaatttttacgtacagtaaaaaatttgcaagtaaaatttatactcttggtgacgtgataaatctcaaacagtacccaagtttttactatatatgtggcttacaccacatattttcctcttctaactccctgttcttttctgcttctttatcacatcattatcataaattatttgcttcacgtatcaaaaacatgtttttttaaaaagaaatcatacatggcttcggttgtgttctagtgtccagctcccaacttctattccctcgtttttcacgcgcacactttctaaattgctaaatggtgttttttaaaaaaatttctaaaaaagggttgatgtaaaaaaaatcatattaattccatttttcaagttgtctagataatacttaatcatacgcacggaatatgagagagtataattaaattaggaaagatgagtacagaacaattgtttaaagttatttgttaatttatgtcttcaaaatattttatttatccctataatcaattagttcattcctagcaataatccgatttataatatggttcaaacatgcaaaaggagaccacatactagagaatccctctcacaaagatgacgaatttccctgccaccatagaaactgcattaataatgaagactcattaagaatgggtaccgataagtcacacgattttttttttaaaaaaagagctggcccggtttgattcgagccaatgcttggattaaagaaaaaggataaaaataatctcaaattattttccatcaatcaaaatttgttcttcaacatcacattttacgaaatcgagtcacaaattttgacacaaacaaacaattgaatcactgcaatcaaaatctattacacatatcatttgcatgcattagaagagaatagaagaagatgaacaaagaaaaaaacatgtaacaggttatcgtctctaccatagtgaaagaatagatcaccctccctgtctccgttgcagccaaccttgtggaggctagatcagggtgatggtgacgtagaagtgccccgctctccatcattggagcaacctgcactcgccatcctggataagtccatccgccttccatgtcaaacgggcccctacgcacagttctggccaccccaagctcgtggtggctggatatccaccctacctccacatttccctcccttctcctcaacggcgtgtaagagatagtgacgctatggtcagctccaacaacccaagcttaggggaggaggaagagacggcgactacatagcggtgcaatgtcaataaggaggacgtggtgtagcattgctagcagaggaggaagagatgttagcgacacagctaggaaggagacacgtcggtggcggtgaggaggaagcaatggcacagccaagaaggaggtacgatggcggaggaaagagggagtgtgtgagctgggagagagggtttcaaggcgcttaaaataaccgatgacttagtgaatgttcagctctgctctcttgatccatcctattggtgttgctttagttaaaaaaaacggtaccgatattattagtgtccaactttttaaaaagataatcaccgatgagccgttaccagttttatatttaaggctccgcttaagagctgagacatacaagaagaaaccagcatatatgagttatccccgcctattaggagttatgtagtaccctacgtatagagtgtgttcctctcatgtggcctagaggtagcttgctaggtcggtgggaccgtgaaatggacgtgagctaacctttggcagtgcctcggttttgttcattctctcgcactcacggattgtgctggggaagtaaaatgcagggaagagacaaagggcaagagacagctgataggcatgcaggtaggcaggcggtgaaggcaaatccgtcgtgactcgtgaatgcatcgatcctactgttcgatcgggaagaggaagagcgaatacctatgtgtgcctgtgtggtagtgttagcttgcgcctctttcatttttgctttcacatattgaaagatgcatatgaagaatcgatcgaagacatccaagagtctgaatgtctgagtctcgtcttttgggttcagataattgaagttgcatgccacacccttttcgatcatggaaatggaagttgcagcatatgacactcagttcctatatatgacactcaagctgatcggtgacaactgacaagcgaggcagcctgccaagtaatccatcattccacaggctcatgcataagcctcctttgaaaaaaaaaagaattttaggggacttttgaacgattgaattcctatgaaaaaaaatcttatatggtgttatgtttttcctagctattgctgtgtttaaatcctgcatttcaaaggagtccacatagctttcttactttgttgtttctactgctttccatttgtgaaaagagtaaataaaacatgggccatcttggtgacttggagtgatatctgtagtatcgaaatgcaagtggcaccatgcccgtatcagtcacggtcttgagctgatctctgcatgggaaagcatctacagtcatgcaacgacaattgcctattgccacagccatgaaacttcagtcgtcctaacttatcctgtcagaggcagatgcgtccgttaaccctatcaaatcaatatcaaaagcatggactagtcatgggtagtattcctacgtagaagcaaccacaccttgtttattatcagcaagctcatgactgcaagataggattaggcagaaacagaggtgctcgatctaagtaagttgtactatctaacacagtgactgaacatcgtggattgcatgttagccctgagctagaaaaaaagcatttgagtatgacaaatccggtgtcatatggtggtcaaatgatcaactactccctccaatcacaagtgacattttaaaatacgtgtaatcaagaccatagatattattttgagtatttcaaattcaactgttaaaaatggtacggttagatctatcttaaaaatagtttaaaatattataactttgctatttttccaaatctttatactagaaaattcataatcaaacaagtgtcctgatgaccatgtcgatatgtccaaaactgtcacttattagttatttgtttctggggattcttcaccttgtcctgcagctcctcagctttgctagtctcagtgagaaagcatctagtgtgttacttgcactgcttcacatcctctctgttctctgcatagagacaattctgtcatttcaagttacttccaaatctcttgtgccatgtctgcaccgggacatttgctcaaagctgccacccttgtctattgtcctgatctaccagtagagacatgcatgcatgacacgacccaataatttgatatgctgagacatatcctgtctagcaaacgatgacaaaaagatgccaaaatggttagttcaatctgaattccagcagagattaaattgaaggattgtctcaaaaaaaatttgaaggatcttttttgcgctaggaacaggagaaatatatatatacgcacagggaaatctgtgtaagatctgcatgaagagtaagcgaaggtagacgatgaaatcagcatggtcacgactgacgatgagcagaaatcttgggaggaagaattaatgttaggtgacgctgaagagtaatcgagaagaagttcccgatttcgtggttgtggggcttagatgtttgcagtgtagcaacaaaagattgcgtccttcacctcactcgtttgtcgcgcagaagtcgtagcaaaactttagacaattaatccgacgtgatgagccaacggtatctggatagggatatgcacgagggcatcatcaagtatatatatgtctacaactgctgtgacctcctctaatatatgtaagagaaatgtctcttacgtgtattctatgagaatgagtttcacttgtccgggactcacgtccctctaactttacgtctgagaagctccttctctacaactataaatctgcatttcgaggcttctgtggcggagcgtttttttagagcagtccaaagtatctaaactcgatggaggctcacaaactcacagaagaaatttttgcatgttcttgtttcaggggtctcacctacacccactcttccactcctacacttggcggctcaagccatactgccatcagcctatatatatatttagaaaaagtctgttttgaatctcatgactatggtccaagtctaattcatatggctcaaccataaaaccagttatggagactccgttaactattaaaatcaattcattttaaggaggacagtgcggaggaaaggagtgaggacgagagttgagaggtagcttgtggcggtgaggaaatggttgaggaggacccaggtgaggtggcctagaagggtgatgtcaatggcagaatttgtcttggtgccgttagtgtcgacgtgtgatagtaaggagtggaggtggcagcaacaggcagagggatcagagtaagcaacagccatcaggcatctagcgccgacacgataactacaatgctggctaacgggggcgatgaagggaacactagtgagtatagtgagtatggcccatgagaaacgcaacgccgatgaccggtcaaggcggctgagcggtgagtaggggatgaaatagtgccacactcaatattggtggagcggagcggagttgagtcatggtaactatcttttatatagatggatataactttttccttattctgccccatattttcatattttcctttctttcccaactaacttcgttcattaaaaaacagataacttcttcccttcaagcattttcttttcagtttaaaagttaatttattcatattttctcatattttcatatggattcggatgcgcactcggatagtgccacctagaacaaaatctctgttaaaaccattttgggaggaaaaaactagtagagggagccttcagatctgtttttgtagtggagggataaatcaaacttggaaactagttgacgaagggatgagtcattctgcattgaacccagtagaaccgtggactgggtcacattagcaaccttaaagaattggcgacgcatgttgtgcttgcttggtactccggcttacgtaataatgatataataaccgcgctgaattaacgaatctcaaatctcaatcccacgcatcacaacagccaaagtgaccccatcaacgtgagaacgattctagcatacggaacacgtaacacagacgagccctcgtaaaactaattagctgcgcatttttcctaatgcaacagaacttgcacacaaggccaacatgcaacttttatacacagtataatatgtgaatatgaaattaatatgtactttaaaagcattcccaagacacaggaaattaaaacatagtcagcggcattgcacacacggccaggtatctctcagcagtcagaaataataacgatactgaactgcactgcttctgcctcgatttcattttttttttggggtctcccagccacgatgagaccaaactaacaacacctattgttgatcctcaaactcatggccatgatccaaaagatagttggcagccagctcttcatccttgttgcatgcgaagaagacctccaaaacgagctcacggttgaaccccattgcctccagctgtcaagaaagtatacatgaaagtttacaaggaaactcgaaaaccatgctgatgattaaatcaatgaaaaagctgttatttaaggatgccattgtctcaacaaaagaactaataatagaacaggctcatgttaaaagaacagccctaactggttataaaatttaaaatatccattcaatggttataaaacaaaagttcaaatttagaactttcaaaaaggactaatgggtattttgggtaagtttcttgatgtaaatcacaaattggacataagtgtcaacatttggaaactgaggtgtgaaaatttcagaagcagcgaattgtctttcattagaaaatccaaaatagcatataaagcaaacatacccgctgaatggcctcccgttcctctggagtaactgtaagtgcctgtggcatagcggctgctagttgacctagtatgtttctgatttaccagagcgtataaaatgtaatgtaaatattgtatgtgtatcaattagaatataatacatgttttgtagttctcttggttcttaccccccagcagcgccgctatcaggagattcattcaccagacggagaaattcagcctgattttcctgaatcaaccgcaagatttgcggattctgcttcccaagctcttgaagcattggctgtgaatcaacagaattgctcaagtcacataaaatagcatatgcactggcattttaatgtctacaaagaaaaagaaaagcaacaagaagcttatgagttgatttatattagcacctgcaagatttggggattagcctggaccaatgcaagcagcgcttggaactgagcagaaacaagtaaatagctgttagggcaatgcattattttaacaagtataaaagttacaccaacatataataatacctgtggaagttgtcgcaatgcatcaagggcaccagcaccggcaccggcaccagcagcagcaccaggatttgacccagcacttggaatgccctaaacatattttaaaaatcatgttttcaaaacaaacacaatagcaagcaaatagaaacaaaattccaggaaatacagcagtttctgtgaaaccactggtttaataaagcaaaagcaactttgcttttgttccacacagactttaactcaaaacatccaagcaacatataggaaaactacaaatatgggtgacagttactggtaatatcagctctaccaacacccatgaggaatacgcgtaaccagctaaccagaatttgaacccagaatatggatacattggactatgcattgtcaaaagtcaaaacaggtgctgaactgcttgtatgtatatgtgccagtgcaaaataccatggatgtatggaactaacaattcaaaagcatataatacgatgccggatgtcctgaaattgtcttacccaagaacatcagtgctaatgttttcaagaatattcttgacaaactgatgatgacagcttcctaataagatgttaactggtctgcctcgatccttagacttacaagcagtccagaagttggaaacattttggtttcttataaaactaacctccaaatataaaggtagcaatttacatttacacatacctgggggaataggtttagaggattcgcattaggtcctgaggcaccaccagctggctgcacaggcggtggaggtgcagcctgagcctgagatggaacctgtggatttccctgttgaacagcagcaggtgctcgagccacaggttgtgggggctccacattctcaggaattccctaacagatgaaccagagtacaacatcaatagttgaattttatgcacagtaaaattaacattggattataatttggttacaaacaatgtaagaaaattggattgaactctcttgttctatataaattttaaaactgctgggcgttgcccttgctgaattctctttaaaaacataagttctttaaatgagttttccaattccccatcagcatagaaatgtgcatttgtgaaaagaaattatcaaacgtggaacttacagaatacagatagtcaatagctctctcagggttgttatatgcagcacgcaaagcacggacaaccatgtcacgttcccaggtgccaccacccatgtcaagaatttgttggattgtctgttctaggttgctacctgaaacaagatttgatgcagcctgactgtagacatccgcatcacttctgtttatcataacaataaaagggaaacattaatatgacattaaaagaggaatcatcacagtggacgtgaaacaaaaccaaatccaggagctttgtaagtttcaagattacagatgaatcgagcaagctgagcaccatatgtgtttatgccaaatatacacaactacgtagtcttaactttaattcataaatcttaccaacaaaaaataatatggacagtaccaaaacgttctggttataaacaaatcagttgtgttctatttttttgaccaggacaatcagtcatgtgatgttctaaacatgatacctatacaatgtgaattgctgaatctttaaaattccataaatacacttgtaaaactattctactgtttagtatagtgttatctattatagttgcagtgcaagttacaaatatgtagtaaagacaaatacgggcttgtttggtttgaaaccctaccaaaatattggtagtaccaaaccttgggcacattttggcactaccaaattttttatagtacagatttggctccactctattgatttggcaaaatttggctccaatccaaaatgctaacatgtactattcaaaactaccaaagaattggtagggaaagaattggcaccaaaccaaaatggccctacattaaatgcctacagaagtcaaagccacagtccagaaacattgtgtatagtgtatgactgtaccacacactagcttatggtatgcctaatttttttagcattctttaattgtctattagtttacaacatgctggagaaacatttcaggatgccacattgaaactcatcgagtgataaatttctacaccatggagttacaggaacattaatggaactattcctaaaactggatcattgtttatagaaactaatctagacatgacaacagatgatgtggaagaaaatagaatgcagcagttaacagaatcctgttccatatacatctttgcacaagtgaagtacaaaatataagttcattcaaggccagaatcgaattgtctcgtgcaaaattcctatcaaatttattgtgttccaaacaaacacagggacctaataaaaaattgaaataatggatccaaaagggagcttacgatgcggtcacagcagcagctggagtggcagcagcagctggagtggcagaagcaactggaggctgtgcacttggaggtgccctacgaatgacatgataataaataaggaaaacaatatttgacattatacaaattagaggaatagatataactcacggttcaggtgtaacaacaggtgcttgtggaggtggtgttcttgcaactgaggcaactggagttgctggttgagactagtgcaaataaacagtaaggaattttcaggtcatgaacgaaacaaagacactcaaaagttatgcagaaataacaaaattacatgatgaacatattcaattgcttttgaacctaaaatcagctaaagctaaaacaaaaacaaaatgacaaattatacctttccataatcagaaaataagattactttctttacagctctctaagctcttgttggttctagtcattaatcacatgaattggagatgtgcaacaatttacgaattaacaaatggaaaaattaccaggaaaataacaaattttcaaacaagagatgaaggtgcataacagaacagaatatatttatcccaaatactggataccaaaaaaaaaagagaggagtgcaggttgaatccctaactaattagataaaactttttcatatgaacagagacacgcagagattattgacagaattatatatgccaataaaattacctggctcacaggtgcctttgaagcagttgaagctccacttgatgatgctttggcctgaaattttatacatattcaacaagtgattaatattcacagaaaaatgaataattaaaagagcttcaaactacacttccaccgttaatttcagcagaatttaaaatgttaacataagatcatcagaggtcaaaggctcaaagagcagtcgagatatcatttagaactcaggcaaatcatggaatgttcttcacctaaacatgttaattttagcctcctggacataacacaaacggctgttaaaactaaaaaaaaaaaggtaattacttcctgtaattagagggtgtatttaacagcaataaatatcatgcaaagcttgcacccgtattttgcatatcaatgatttgttcgggtttgatgacacaacacaaagtttgggctctgattttggctatcggatgggaagaataccccaatcacacaaaagtttgcatcccatacatttagcaattcattcagttataacattacaatttaaagaaatatctagtatgaaactgcagcattaaccaaaaaaaatacatatattcactaataatgtacacataatagcacgattataaaaagctacaaggcccagcttaagggaaacaaagccacagtattcaaaatatggcatgattttactgcaaattatcaagaatactctggtctgcaaatacccttattgtctagctgtaaataataatttagaagggtagttactgctaaacaatcaaatgccattaaacaagatcatcacataccttagacagcattataacaaggaagctgttctcagcaactttgttgccttccaaagttgtatcatccttgagaattttcccttggtgtatgagcatctgctgatccgccgggtacacattctgcccctgagtactctcaatgattctcttcacctcagccacctgcaaaacagagctagctgtaagtataaggcacaaatagtcccatatccaagcatacacacattaaacattgcagcatcaaccacattgacaacagccaggttctaatttccaaaaccatctcctacagatgccgagttcgaatttctaccaaaaaaacatctacacatgtaacttaaaccgatcagttcacaacaagccgaattagtagcacacgactcagattacaaccctaataacaaactccgagcgcccaaaaaaaaaaccgatccgaagctccgcatcgcgtcgtctactactctactctaaaccctagattcagatcaaaaccacacccgcgcaaggcgcccgatccccccgaaccaaaccctatcccaaaatcgcacccaaacgccccccgaatcgagcggattcccggagaattccctcgaaatcgcgcggattgggggagagagaaggagaggggggaagggggaagggatcgtaccgacgcctcggggctcgcctcgatctcgaagttggtgcccttcagggtcttcacgaacagcttcatgtcggcgacgtcgccttctcccacctcggcgatatccctatccccgactctgccttcgcgagggtttggactttctcctcccggttcgctcgcggcggcgacgacgacgacgaggagagcgcacggggcgagtagtggtaaagtttataggggcgagagaggaaacgaaaaaaaaaaatctcttagtcccccaatatctcccggacatcacggggcccgatcctaacccctctcacttacgagtgggacccactgggatatggacccacctggcagtgggtggtacgggtaggcggacggggtggggagggagacgagcagcgttcggtgggcggatccggtgcggcgtgcacgcgtgtggcgtctggtggttgggggttgggatacatgtgtatgggtagttgaagcggtggtgcgtggggttgtgcggcgtaggggatccgaggagatacttcgcagcggaggaatggatagatgccgggtgggaaaaggttgttggggttggagagcgagagcgagagatggagagagaaagtggttttcccccggagaaggcgtaaaatctgggtgcgccggcggaggagctcctccggtgagaacctgttttttttttaaaaaaaaaggagtatatgcattttactacgggatcgcctggagacgtcgtccattctggttagcaagggttgctatggaaactttgagcaaatagcctttgcctcttctcctccctgagaagtgagaatatactgaaataatgtcaccggtggtaatggcatcacccaccagctttatcagctatcgcacgcgatggtgaacatgatccccgtctgaaacatgatagtagttttagttggaggaacttttctgcctcacattttagtgtacactgtgtacttacaaggatgtgtttgtatgcagatactcttaagagcaccatattagtttttattttgcacaaatttatgaaggtgtaatgaggagaaagaatacattcatattgcatatcgaaatttagagattacggttatgcatatttttgtcaactttgaatgaagattttgtaataggattgatgtctcagtaagttgtatcccttctttttggtggcggagtggttatttatattccatttcatcttatggtagctacctttttggaatataaaccaataattatataataattggttgtagcttcggttgtagtgaatgtcggatttcatccattatctaaaagtcacttctctagcaggtttaactctctgggctcctttcaaacatgtgattttgataacgcaagaacataaaaaaatgtataaataggatgttgtataggattctaaaccataaaaataccagaagtagatttcataaaactacgtatacttcgatcaaactatcataaaactatatttaagatgttgatcacaaaactatatatttagcgtaaaatttctcacaaaactatatatttaagatggagtgtcacaaaaataaagaataagtagcaattttgattatcataaaactaaaggtttgggcaatttaatcacaacactataattttatagctccaatataacgatagtgctaggatttaagttctagaatatgtagttttgtgataacttcaatattaaatatatagcttgtgataattttgtcattaaatctgtagttttgtgatttatctgtaatttttgcaataagttaatcaaaatatgtagttttataaaatttattcaaatactaggggtagtgtatctgagtaatttacaggaaatctaacactggacctttgtggaactaaagagagagagtgaaagttcgttggacttctcaaaggaaatgaaaacatgagataggaccacaattaccaaaccagacggtg

SEQ ID NO: 5818 - DNA, 692 bp, Oryza sativa
ttggacaagaatgaccgatttgtgaccggtctgacactgctcatgtcgtcagcacacagccaccttcccacgacgtgcccgcctcaggcagaagtggaggtaggtatgtgccgtcccgtcaggaggatgttcggaggacgaccgtgcaaatctccgtccatttatgaaaagaagaaaagtccagtttggaaagggaggggtgcatgtggtatccccttgaagtataaaaggaggaccttgcccatagagaaaggggttggttgattctttccagattcagagcctagaacgagggagaggtcggctcacactttgtagctcctccatacacagatccaccaaaacacaggagtagggtattacgcttcttagcggcccgaacctgtatacatcgcttgtgtttcatgttctcttgagaggtggcgatctttccgtcatctacagggagagcttgagatctcaccctgagcccccggccgaaccggcaaaggggggcctgtgcggtcttccggtgaggggccacgagctccgtcatctggcgcgccaggtagggggctcagcgagtgttttctgagctctcgcactttttcgggtgcgtcaagtttttcttgatcagcctcatggctgagcaagcaaaaggcacccgacctttcttccagtgtgagtggcgacgacggggagccgaattcacg

SEQ ID NO: 5819 - DNA, 694 bp, Oryza sativa
ccgcattccatgaaatgttggcaagtggtggtatccatgtttcaaatggtaaacaatatgcgctaactgatgtcattgatgccatcaaatgtgcttttggggcctcaccgcaaattgtttgcaagaagggctcagttgaagaactgaggttatgctttgacaaagatttgaaggttagctctcctttttgttcttcgaacaacttcctacagtttgtatcatgaaaattatgctgcttttagaatgaacgaccaacagcatgcacattttgaaattatgttcctacaggcctgcagtttcatttgctaaaactcaagcatttaccaacctcaaacatgctacatctttctatatgtatgcctaatagtgaaaacaaaaaacttgatcactgttgaaacaccactaaactgtacggaattcaaggtgattatatgcatcatatagtgttttctgcttgtgtttcttcatgcccctattaaggaatgttttatctgttgtgttgaaatttctaaacatgtgctgcataaattttgactggtgagtatttttcccaaactagctacccatgtgaatattttccccaaaagttgggaatgtgcgcagtcctgcacgtgttatttggcaatgtctcacatggtcacatgttgcatatgctgtacaataaaatactataatctttctttttcaaagaaaa

SEQ ID NO: 5820 - DNA, 4585 bp, Oryza sativa
ctgacaaaagaacctcaagccaacagcatgggaacaccatttccttgcactgtgaattcagcttgatcaacttccccaaagctctcaagaaattaagaagcctttgttcatctaaatgaataagaagatgttgagaaagagaagaaaactgctcgtccatcaaaaattcatcaactaactgccatgcatctctggaattctcctcatacatcaagtaaacgaattgatctacaaaatattctgtgtcaatttgcagtatttcaccgtctttgacggaatcagcaagctcttcagaagaccagaagtctgggacatactccaggaaattttccacagtccgcagaacatcgagatcacgaaaataatggggcttagtagcaacaacagcaggagactgcccatgcttgcctttccactcaagctcttcccaacaaatatcacgattcacaaatgcaaattgagaaagtgccctagcacccttcttatgtgtcaattcaccagtaaccgcaaagtgaccaaaccactgcattatctgctttggattccctgtagaacataataaatggaatgtcactatgtcagaaagaatagatgctcatgctcctgccagtatcaaaccagtctttctgggttgcaacagagacacagaaaactcaatatgctttgtatatttgattcagggcttactacagctgcacagcacaaaaagttacatggatgtttagcatgttttcagtacacaaaggcactcaccctacaatctctctgacaaattacactaaataagatcatacaatcatatatgcaagtatgcgagagccaactcatgtcagtcagtccaagttgagacctagatcacagccaaaaaatggttctatacctaaaacacaaatagaaaaaggcaggaacaaagcatgatgttactgtagtggaaacaccatttcatcttcttctagtgtatggcacatttgtattaatctaagaatgtgttaaactacttgcatgagtgagggactgaggggcgggccactagttactacccattatgtgaagaagtaattcaaactgagtgtacgcaattatgcataattccatatcttgtattgccaacaagccaaacaggcttaatatttttatgcaactgtaatagaggaacaaatgtcatatttctaggtaaatccctaaacagatatatctcaactagagtatgttctggatactgaacagtgagtcgcagcaagaaaaaggaatataaaacagatatatgtgagcagcagtagaaaaattcagagcatcgagttcttagtgtaattccttaccttggaagaagtcctctagcatctggcatttctttgctataatagaacctgcttttttgggctttttgtcaaaaatcatccgcagcaagcgggcagcgacatcccgtttggaatttttcatccccaagagattgagaaacaggtcccgctggccatatgggtcgagcaaatgaatggatgagaccgtactgcagagccacatccgagcctcatacccacctccagactttataaccgacctgattataggctccaccttgccaagaagagatcgccttgcttttacagcatctgtatcaacactaccaccatctgtggtcccttgaaaaaagagttgaaccatcttccaagagagattttctacctcctgaaattgaaagttgcaaattgcaataacaatgtttcacattctccagtcctcattgaagtaacgcatataggtaacactaaaaccttagattgccaagtaaaattcaacatggatttaacttagccgagatttgatcccaacacctatttatctgttgaaacgtcataggtaattttaatcggaaaccctaaactgaaatgcaaaatttaaaagttcctggctaggaaatagaaaccgaagcacaacaggtaccaactgagacctctacggcagcggggcaggttagcgtctctcacgattcacgaacacctccaggccgaccaagtcatggaggaggaggcgaggcggagatgggaggcgaggcggaagagcagcaaagaggaagggggcgacaaggaaaggccccctgcccgaggacggcgggaggatgtggcgtgaggaggaaggcggcggcggtggcggcggcggatcgagcaggcgaggagaggaaagcctcacaactcccccgagcaccacgatctctctccagctccaagaggactccgtgattgcgaccaaattctcgaccaatttgatgaacagattaggagcgcgacgcttaccagctgggcgcggcgggggttcccagttcccactagggcacgacgaggaagagaggcggtagtatgctcgttgcggtgagcggcggcggcggcggcggcggcggagcaccgagcagcgcggcgcggaggatcggaaagaatgaggcggtgacggtgaaattggagaaatttgccacccaattcacatactttttttttctcgattcatactatcattagtaaatttcagaaaactaaatgttttatgttttatggttgaagttacagaaaaacacacatattttaacacttactccctccgtcccataatataagggattttaagttttttgcttgcaacgtttgaccactcgtcttattcataaaattttgaaattattatttattttatttgtgacttactttattatctacagtactttgagcacaacttttcgttttttatatttgtaaaaaaaattgaataagacgagtggttaaacgtggcaaacaaaaacttaaaatctcttatattgtatgacggagggaatagtaattaagtacatatatttttttggtagttttttttttcacaaaaccacaatatcaatgaatggattcacctgtgagatgacgtggttattttacctaggatgaggacgtggcatcctattaatttcatgagatggctggtaataggatgcatgtcattgtcctatgtggaacaaccaagtcgacgtggcatcctattaatttcatgagatggctggtaataggatgcatgtcattgtcctatgtggaacaaccaagtcatctcacgggtgaatctatttattgatagtgtggttttgtgaaactacactaccaaaatatatgtacttaaatgccaaatgtcaaagcgtgtgtagttttctgcaacttggaccataaaacatgtagttttgtgaaatttactctacagtcatactccctccataaaaaaaccaaactagtactgaacgtgacatattatagtacaataaatctagatatacctatgtctagatttgtagtactaggatatgtcacatccagtattaggttggttttttatacgacggagggagtacgtcttttgaaatgggaaaatctaaggcctttctggttttctggttttagtgttaacgagagactgtataggtaccttaacaatatagtaccagtccatcaagcaactagaaaatatattcctatctgtttcaaataaaaatttatccttaaactactcattcgatacacgatccgattacatggttgtgttcagaattaaatctttataacaagctcacacatgattatgttttgatgaaaaaatacaaattacttttataatattctaaattacttttagatttcactaaattacttcttagacatataaaggtaaatttaataaatcctaaaagtagaagtaacttaaaaaaagaaagttactttgtcacgacattaaaattagatccgttatggaggtaaaaatatgagtatatccagaaaattaatttaatcagtacaaattatgcaattcactaaaaatgataataaaataacaactcacaacattatgattatatgaggtaatttaatcaaatcggaaagtaatttatatatatgataaaagtaacttacatatataataaaagtaatttacaacatagacatttctttcatcaaaacatagtaatgtaaaatcctgttgtaaagatttaattgcaatgaacacaatggtataattggattatatatcgggtataagtaatttaaaataaaaaactgtaaaaagaaaaaaagatatgtataatttggtatactagtaggcaaccagctctaagatgaatctctggtcaagacaatataacttgcggtttcaacgtagtcatgtccttttaaaatatatcaccaaaactatgaattgtttgattccatatcaccattactctccttgtctgtttctctatatatcgccactactgtcaccattcccccgcatgtcagctacacacaaaataataaaaattggtgtggcccatgtggccccacaagcgaggatgaaatgtatgtcccatggttttaattattttttcgggatccaattgccacgtaagcgccacgtcaatatcatgtgagacgaagacttagccaaaggagtcacgtcagttaaaaccgagcacaatactaccgagggaacttgtttgcacggtattgtaagatgggaaatacgctatacctggtttttgcattcaagcatgaatttcagattcagcgacaaattaagagat

SEQ ID NO: 5821 - DNA, 693 bp, Oryza sativa
gggttatactgaagcatttctgcaagaaattattcacaatattatcacctcacatcttgttgaaaatttgaacacaatttacaaaatcaagagaagttgggcacaatttaaaaccaaccaaaatcatacataaaagattcctttgaagctattaaattagggagaacttcaaattatcttacagcctaaataatttcgaatagtgacaaaatggaaaaccagtatagatcagttttcttaccgataaaaggtcaactccttcaggctccaatgatgggacttgacgttctaaaatctgtggcttccactgtggaaactcatgccagtccctcaaatcagttactccaggccactgctcctcagtaggagttcccaacaacctattaagaagtcggttttagtcaatggcttaatgcataatactccctgaataaattaccataaggtatacaggctgaggcaaactatcacacactatacagaaagtagtttatgaaattctagcatggcaatttttcatcacacagctatatgttcagactatgtcaaacatggatttatgaaaaaaaatcatcatctacagcaataactaccgattatcaaattattaaaccattgtcttagcagataagcaatgtaactcatattatgataactgcacttcttgctaatcatgaaaggcagaaggaagaa

SEQ ID NO: 5822 - DNA, 7176 bp, Oryza sativa
gtggatcccggtttttcttaatgtaatctccattacagatggacaaatcgttgaaatgccataaagcgcgaaccaacatccatgatacgaaaaccaaaatcagaatgaggaagaaaaagatatcgtgatgtaagtcaatgattccttgcatcataggtgttgcagcgtcttgagatcctaattgccatggttccgcagcattacaaagagcgattgtgaggaatcgacattctaatgaacgaagaatcattggaatttcccatcttttttagctctgctcctagaaaggagactgatcttgacgtcggcgttggtttttccaacgaaaaacgagaacatactttcacgaacttctaatccaaaatgctagttgccttgtaacgcatacactggagcgtttgtcccatcgacgaaggccaatgagactactatacgcgttttccgaggagcaacatgatactttctttgccaggaccgactttcccacttggatgtactcatgatgggtgacgtttccacgtcttaacgttgagttgaaacctgaaaacaatattcaactccatgccttcaagagcataaatgggtaacagccagaaatacatgaagaatcacttctttcgagaatgtgcctaagcacgtgtttcattaagaagatacatgaagaatcacataccagcaaaaatgtcttcacttaaatttataccacaggaagccttgctaatgcctcctcttgtaatgttaaaaatcctgtcgaacacatcaggatgtccatagtgaaatcgtaccctgcacagagaatgaagtatgtcagatacacagcatttagactacaagtctgatgccttctgccctctcagacagtactgccacactttatcccgtcaacatgcttaaacttgaaaagcttcaatgcagaaaaaagtttcaagcaatgtagattattgatctaatctgtaacaccttatttacttgtaatctcagacacatgttcatgtgcattttcaagggcagaaagaatatccttaaagggtcatctcgcaatctttttctaggccaattctggatcatcttctggaatcgtataactgtcaaaagtgagtgactgttcatcggaactgttatagtccgaatactcataaggttgggtcgacgcctgccgtccttacattctatttaggattaggaataggtgtaatcagacctgcttttgacatatctatcctatccttatttgggtaccatatgcactcgaaagcgttagcacgcgcatccgttttcttgctccttggcttcaaacaatcgattgaatctggattcctttgcttatccttcctggctatagtctctcttgtgccttcggcagttcagttaaagatttctgtatcagtagtttgtttccccatttgctaaacaattatttggttatgccattttgggcgtagtaccggtattagagatcaggaaagtagttgggagagctcatgagactctttttgtgaaattcataagtctcaattccccaaaaactcgagttccttttggatttccttcttgattaatgacaaccgtcatcatatcgtattatcataccgttgtcacgtttgagttctttacatgtacgtacaattactgctcaactatatactaataaagaataaatatatagttggtattacgcttgtctgaaaactttgcaatcattggtattatgagaaccaaaattatgccacttgcaatatctcctcttgcctagttcctcagctgatggaattacatgaccagcagcgaagttgaatttgtttttcccgaagcaacaaatcgaaaatcttatcaaccttggtgatatcaaaatcaaaattttcctctttcccagaacttctcacccattgacatggcacaaccttcttgctcctgacccactcggctgctgctactccggattcatcctcttcatcggaaccatacatgtaagtgtatatgtggttgatctttttgaaatttttcttcgcctctgcaaacctttgttcgtgtagggttaccttctgtgcaagatgagataagctttcaaactattattactatgagatattattactatgaaggataaccaaagatcaaaacgctgattcaaaattctattgcatcatccgcccacgaggaattgccgcttcaggctcgcgattcgactttgatcgttatggattggtaccaaaccaagatcaagtcctaggcaagcgggaaacctgaaaaccaaaatcatgcgatcattccttcaagagcataaatgggtaacaactagaaatacatgaagaatcacttctttcgagaatgtgcctgagcacgtgtttcattaagaagatacatgaagaatcacataccagcaaaaatgtcttcacttaaatttataccacaggaagccttgctaatgcctcctcttgtaatgttaaaaatcctgtcgaacacatcaggatgtccatagtgaaatcgtaccctgcacagagaatgaagtatgtcagatacacagcatttagactacaagtctgatgccttctgccctctcagacagtactgccagacttgtgcgcgctacaattgctttagagggagctgctgtcggtattggaaacgtcctcagttcttcgattcattccgtggcgcgaaatccttcattggctaaacaattatttggttatgccatttttggcgtagtaccggtattagagatcaggaaagtagttgggagagctcatgagactctttttgtgaaattcataagtctcaattccccaaaaactcgagttccttttggatttccttcttgattaatgacaaccgtcatcatatcgtattatcataccgttgtcacgtttgagttctttacatgagtttttgagctccattatgtggacttcatcaattttttaattatggacttggtggtagtggtcaatactaactgcaccgtctaaatgctccctgaccaagttagcgtactcgccagggttgagttgagggggcagcccgtgcgctaattgggctctgaggttggctatacgcgaaaaaagctcactttctactgagctgtcctaaactgttccagaatgttatttgtttcataggaagattccaaaagcacattgtgatgccgaaagaatcttcggaaccggtggggttctgattgaaggctagacaaataacatgactgaaatatgtaaatcaaaccagtgaaatagctttataatattatatagatatagaataccaaaagcctgataatgggttaaaaaaatccaaaataagctttttgctttctttttattttgtgtgcgctttcctcctgccttcccgaccacggataggctatggggctttgcacttcttccgcgatataggacgattcgctcgctatctgaggcgttaatttacctactaaaatatcgcctgtttctacccaggaccccaacttcacaactccatttctttccaaattgcggagtaaatgttcttctagatgtggtatttctttagtgattttttcagcggagccttggcttgtcgtatccgtctgaatttcatattttcggatgtgaaaagaagtataaatatcctcatataccaaacgttcgctaatctcattcccaccccgtcgtcgagagcagccagcccgacgtttttatgcgagtgccccatgaagagattttcaatctcgaatctccgtctggttcccaggtggggtattcatccattgatcgaccaactgataaaataagcaattcttccactttctctctgttgcctatcggattgtcgcctgttgatggtaggtttgttctagaggtagacgaggcattactttggctaggtggagtgtttgcgagtactgaagtcaatcttttccaaaaaaggtttagtaaatgcacatcctcgccgctcggctcctccctcattgcccatagtccctaaagtctgtatgtctcttgtctctttgagaccggggatttcccaactgttccttcccttacaccctaatcttaatacccctgttacccgcctgtaggcggatcctaccaaccaaaataaagtgaccgaaagacacaattgcatcggtccaatgagacatggaagcaccagtagatattgaaagaaaaactattgttcggtattattgttgtagttctttgttcctttcgtcgatgaaagtacaaccacccattttccacactttttcatattgacttaagtcagcgaattacccgcggcgaggaggagagattagaactcctggattgaaaaactttttcttctccttgctaattgccgttcctgcccttcgcttcaggccatagtgcttctgaattatttctatacccctttgatgatgcagcctctgactttcgtgggtaaactcaagtctacctcgtaagccacttaaagatctttgagcagctcgagagagaaatccgtcttcattggtacaaaataaccttcgacatttggtactggtcaataacttacggcgagacgagcatccctataccacgtgtatccacactcgtttgtccttttctacttagttgtacagatcacttcagaaaatcgtataaaaatcaagcaagaaaacgtatgcgctttagcaacaaagcgctcatcccttcttctttcgcttggaatcccctcgcttcttctttcgcttctacgctcgtgctttcagcaagttcgtaccagtcgtcaggagctccaacctccgcgcctagccgcaaggaacctaaatgctggttctatcccggccaagcaagcaaggtgaaccccggtgggaaagaaagaccagggggaagaagctgtcaacacttctacaatccagtctcttaacactagctttacttgggaaagtagtgaaagtcctgctgctggataaagatactggaaaaagtctcaagttccactaggcgagatgaaaaagttcagaactgggatgccaaaaagagccgatttacaagcaaaatgaaaaaactaccactttcccactatgtcggaactagttttttcggctaaccctatctatctccttaccctgtaagaaaagcaaggcgccctccagtctcgttcgctgggtggtcagagtacagcttcgccttctcctcaggcggcaacttgaaaaactccattccaatccccaacaaagcgggattcaaaatgattgacaggtaccaaagcaaacatcccttttccccttgcccccatgaggaatcctttgtctacctggatcttcaaagagcctcatagccaaaaattctcaagcagagaagccatttctttctctctttgatacaaattcccatctcatgaaatttctattcaattttattttaaaaaatagggctaaacttctatctgagcctttacgagcaggatccggagtgggttgcgttcattcagcagatcaccggcatacctagcgtaaaagaagagttgctgcccatctgcatgttccattactttttcaagagctaggtctaatggaaaaattcattaataaacttgttttcatctggcagataagcttttgagaagagaccactttgataacgagctttcgggttgccgtattgataccgcccttcgggggaacaggatgacctcgaaaaagaatacaattaaagatgttgattctagaaggaccttagagtattgtcactgttccactggaataaaaatatttgtcagtggtcagtttagttcgaacaacaaagtgagtggctggacttctagttttgaactctggctagagtaaccaaccatcgaaccatctccaggtcacagtcacccaccaggaaggcatagaggcaagacagaaagtcaagacagcaggaatcgaacctagtcatagtaaaatgatcattcaaagtagacttttgtcatagggcaaaggagcttagaagggtgatgtagggaagtagtaagggatgaaatcacttagatgttgtatgacggaacggccgggatgaatcaaaggcatggaaagggaagagatagccctacccttcagtgaaccactcaaggtcaacctacgcctgatatcggcggttattatacgatgcagttcgtggattggcaaaacctggggcgccccggcaggaattctgtaagcttgacttgcgcgcagcgtttgggaatcaaagataaaaaataactctatgggacttacggaactggaaagaaggtagcacctaggcgtaagaaagaaagtaaatagagacagcacctactacgctatctattgaagcttactatataatatataaaagaaaaaaaaaggccatataagtgagatcctagccagagaagagcaacaggagctataaaaaaggaacttatggacttgaatcagagattgggttgacatccgaaacagagaggaaaagaggaagcaaacatagctagctcacgaaagaaagcttgcaactacgcgttatatattttattttcaactgcgctaataagggcacatccgctttctctgtatgtagattaaaaaaatacataccatattttttcccttgctttgctatttgaatgcttacctcagtgcaagagcagggaagaggtttgattgctaataaaatgagtggaagaaggccgtcatggaagagtttggggtccaaagccacaccttctttctcccataggaacagaggtcaggagctgccggcagggtgctgcttttaatctgactgatggctcaagataagttggagacgtacttgagatagataatttatgtatttcgctatttcgaatacctaaactcaagcggtgctaatttgctaatccaagccggtattcttaaaaaaagaggggaagcagaaccaagtcaagatgatatgggtcgccccttcttcttgcgccaaagatcttaccatttccgaaggaactggggctacatttcttttcaatttccattcaagagtttctatctgtttccacgccttctaatctagatcccacttccctccacttcttgcctcacgcccgtcaaacctgactccacattaacgactgtccttccacccaattccctgcatccttgcatcacatctccaacccctgccccaagtagcaatcagaaaaccaatcaatcttccttacactacgacaattcacttgaactaccaacat

SEQ ID NO: 5823 - DNA, 7481 bp, Oryza sativa
ttattcaaaaacttttacaaaatatataaaattatatgtatacataaaagtatatttaacaatgaatcaaatgatagaaaaagaattaataattacttgattttttttaaataagacgaacggtcaaacatattttaaaaagtcaacagcgtcaaacatttagggacggagggagtactaaaaacttaccaacacatctcctagtgcgtttagagatggtaaggtctatgggttttttcacaaaccccatgtagccttcatatatttttaggtaaaaaatgtgtaaagattcaacccaacgttgttctagctgagctgttaggttgtgttttgaataacctgacgattcgttatcctgatcgacatgttattgatttaaaaggatctcacatactacaaaatatgcccgcccgcacataagtccattaaattacacgctcacacgtaacgaaatacatacaacctgtttggtttgggggaatttttgggagggattgagagtttagagatatgaggcaatttactgttttatttagttgggaaatgagaattttagtgggatagggattggaatggggaatttgggaaggaatttcctctttttcattttctgtgtaggaggtggtaattgggagggaatttctcatttactttacctaaacaaatcttaatcatccgtttttgttaataacctaatctctaactaaacccctatcaatttccaccacctctaccaaaaaaaattttaggattaaaattcaaattcctatcttaatctaaccatcaattttctaactcccaatccccttccatcaagttgccaaacgagccaatagtctattatagccacaacccaaccttttcttcttctttttccccctattttgatgaactaggtgaaaccccgcgcattgctgcgggaatttagtatgataacaataaaaataataacgtgtaaaataggtagataacatcagattaagtaaattaatatggtttataataatttaaatttaaatagtatgtagaatggtgattcaaatgtaaaaagtaaggtggtatgactttatggaagaagaaaagtagggagatagtttgaaccgtagattaatcatctaaaggctaaaaacaattgatgtgatataacttaattagaggaaaaaaggagaaagataatttggaccattaatcatttaagcactaactaagtgaggatgaactatataagtatataggatatcataaaacataataaaaatatacattgaaatattatgtgaattatgttggatgataatttaacatgtttgtatttgaaaagctcttaaattataaaaatacaaagatatagcatgtttgcatgatgtttaaatgtgatgattgttagtggatgatgatgtggcatatttgcatgttaagcttaaagagttagtggaggataactttatactaagataggataggtgacaaacaccatcaaacctcattcagttaatccttatcagggagagattggaggggatttattctacttctattgtggtgtagaattattcccccacaatcccctcgaaaccgaagaatgcctcgacgatattagtaatagcagggtttctagttgacagttgactcgttagtagctgacagcgggcccaccccgtgtgggacccaccgggcaggcacatctgatccaatcctaccagcttcttcggctcttcccataaactgcagagtactacgccgcgtcaaaacgcttagaaataggcagcagaaaaaaaaaaagaaaagaggaaaccgaactccgctataaaaccgcgcctccgccgcgacgaagccgaccaagtgaagcagcgccgccgccgccgacgacgacgacgacgacgacgaaaccgccggaggcagagaggagcagaggttacgcacacggtttcaggttcccccccctccctccctcccatgaaatccaacaccgttttcgagcttgatcgtctccgatttcgtttctgggcggcggcggagtactagtggagacgacgcggtttgtgtgggggatgggattcgtcggctcggcgctgcgctggggtgagtggatgtgggtgtaggctagtggggtgcgcgtgcgtgctagtttgattggtgttaggtgacgatttttttttttttttggatgcggcggtttgttaggcgcgtgggtttgtgttgtgcgaccatggtttggatctcggagctacgcatgcgtactgtttttgtgtttaggtttattggcaattatggctgcctcgtgagtactggctgtgttcgtgatgagataagttgattgaccagtttttcatgttgaatgaatgaaattgttttgagactttgtctttgagggtttatttgtttattgactatgtggtttatgttaccgacaccgtaaattctgtgtacagaaatctcatgtatgtgatgtatggaggtcaccatttttagccgagagagcaatttcatttttagacgatctggaattctctccttctgaatagcatcagcatcatagacgcccattgtggcagtacatatcctgaattcctgacgctgtatgtctctgctgacaatgtcttaataaggagcgaacggagaggattgcccactgaaatttattaagaatggggaacaatttaggctggaacattttacaaccggtctaaggacattgtctctgctgacaatctgatatatttcttggtaaaatttatgtgctgtacagactacaaggggtaaagtagtgagaagagatggtaaggtggcgccgctggatctgctgcaattgtcaagtgaacgagtctgatcagcttgaaaatggacatgccaaggtcctgactagtaatgcagatggtatgcttctttgaccttgcttgtgttctctatttatatttcttagtcctgcagtgtcacttcattgattgaaaacttaaaactccgtttctgattgttcacctttctacatttttttctccttttccaggagtgacaaagggtttgaaagattctgctactgaaaaagctcagccacaaaattcggctctcactatcaatattcctgttctatccttggacgaactagtagaaaagacagatgattttggctcaagtgctttgataggcgaaggttcttatggtagagtgtactacgctgttcttgacagtggaacaaaaattgcagtgaagaaacttgattctaatgaaaatgagcccacttcagaattcttgacccaggttgacttgcttttagagatatgaattattattatttggttatagcattaatgcatttctacagatggaggatcctaaacaacactgcttattttctgatgctaggtcgctttggtttcaagattgaaacatgaaaactttgtagatatgttgggatactgcacggagggtaaccttcgcctagtagcatatgaatttgccactatgggttcactgcatgatgttctacatggtatggttcggcatatccatcatgttctccagtttgactaactttactactgtttttgggtagctgggaacgggtgctgtatagctgcagcagaagcagatcaattgttgatatatcttttttaactttgtgtaacaggaagaaaaggggtgcaaggtgcacaacctggtccagcacttgattggatgcaacgagtaagaatagctgttgatgctgccaaaggacttgaatatctacatgagaaggttcagccctccattgttcatagggatattagatcaagtaacatactcttatttgaagacttcaaggcaaaagttgcagacttcaatctctcaaatcaggctccagatatggctgctcgtctgcattctactcgtgtactgggaacctttggttatcatgctccagagtaaaaattcttaccatattctgtgatgaactttattttactgttcaattgtagtttctttatagcattacttcttcaattaactttggaaaggaccagtatacaatgtgattattatagtttgttgaaaaggatccaataagttctatttattcataggcacatttaggactcctgcagtgaaagaaactggtcttactctacgatatttcttactttgtggcactttctacatataggtttttatgcctgggttgctgtagagcccattattgcctctatatgacattttctgatgaataatcaagatatatatgtaacactgtttttatgcttgaaatgatatcattatctgacccaatatgtgaactttgcaggtatgcaatgaccggtcagctgacacagaaaagtgatgtgtatagcttcggagttgttctcttggaacttctgacaggaagaaaaccagtagatcatacaatgcctagagggcagcagagcttggttacatgggtaatgttcaccatatagtttactcatttatcttgtcgttaagttcagatcacatctgaatatctgatttagcagcttatagtgtctacagttaacaccttgattagtacaatgtagcaatacgcagcccaatcctttagtggctactttttacctagttctctgagcatgtctcagttctgttttgcaggctacaccaagattaactgaagataaggtgaagcagtgtatagatccacggttgaatggtgaatacccaccaaaaggagttgccaaggtctcgatctctatacatgcacacaatatttatacacatgagtcatgatagtcatcctttccttctcttttcccccacatttctcactactgcactttctcgatgcagcttgcagcggttgcagcattgtgcgtacaatacgaagctgagtttcgcccaaacatgagcattgtggtgaaggctttatctccactgctcacaagtaagccgactccacccgcgcctccaccagctctggacggttgatgtacagaatcatcagagaagaaataacaactaagaccatataagcttctaagggtcagggactattgtttttcctgcttggtcattttgcatggcataccacagaatggagctacttgcttattgcttctcggaattcaggctaactgcatggagaatgtgttttgccttttgaaggaacacgatccgagcacaataacatacttaatttttgcagacggtgtctaacaatcgggattgcattgcatatactgtcattctgggccaaccataggatttgcaagtatttaggtgcctgtttacagaagattagacgatggcttgtgttctagtagtcgtttattcagtgaactagagatgatgtactgctgaatactgatgatgttctttgattcaaatagtatcgctgttacttgtgttgctttaccgttcgttcaagtcttgggagataaatcaaattagtcaccacatgttgctactgctaagttgagggatactttcagagaaaactcattagcgcatgtttaattattaattattataaaattaaaaatagatttatttgattttttaaacaattctacatagaaactgtgtaaaaatatatcatttaacaatttgaaaaacttgctaacggaaaatgaggaactcaaagcttagagttgagaaaaaaaactggccctagctgctagcccatggaatatggttaagaaacgtgcacgattctgtacgattgtgtgcatcttgtaagcagtcacgttaaaaagaatattttgtatatatgagacttgacttaaaagacacattccaagttaaatgcagagcttaaggtttgttaagccaaaaacgaccttaacaaagtacttactgagttactgtagagctgattaaacattagcacgaagcagaccaccccagatgcacatatattcttgctacaagatcattaatacctaacttatgaaaaaaaaaactctattctatgccactagtatataccaagttctagctcaacgatttatcgacttcattaatcatttctataacatatctaaagtttacacatacaatttagatttaaattcaaatcacccggcaaaaagatttaaattcaaatctaaatatttttaagttaaatgttttaatattaaaaatttgtacgtataaacttttctggtccgcgctcgaacgcttgccctttacacccaggcaggatgctcgaaaaacacatttaatccatccataaaggacgagcctttctcagcaaatcagtcggctcttgtcatgcaacaactgtacagtaagtacagcacggaacagcatctgtttaaattactatgcaagacttgcaagggaacatattgctgctgctatctacaaaaccaacacaaacgaatggaatggatgaatgctgcttcgattcaagctttgtaagtgtgatctcatcacacgcaacaacgctgaaggtatccttcatccccccgctactctatatcagtaaactcacacgattcggttgcgccactgaattagatatgcagaggtgttcttgccacagttaactcaaaatggcgaacattaggtcaaaaagaaggctatgaacaccattataagctttcaactctctacttctctaatgaggactgtgttggtaagatgtatgctgcttctccttggtgtggaaccaagctgaattgtatcagttggcagctctgtcagaaatgtgagctagttaggagagacgtaactaaatcaaaggatagaatgagattaagattatactggactttcttcgcaaaaaaaaaaagagattatactggaattacactgtgccaagaagaaaacctcaggaatagaggatcaaacaggaagaagtggctgcctctcatcagtaccgtgcctgtgtttagcctgcattgtatagatccaatgatttgtatccaaagaaaaacaggggcagttttgaatttgatgtgaatagttacctcagtagcaatagaatcagacacgttgacgactacagattccttcgatctgaggaacaaggcatccatcaaaccaaatatattactagacaatcatggaaatagcaaatggatttctactgatgatagaccacggcatggaaaagtgacaaactacaatgttctatagtgttaagaatccaaacctgtgctcatgagcatcacccatctcaattttactgctcggaacttcatccttaatttggttcgagagatactgaaacaaaaacaccagaaacatgtaaaatcactgaaagagtcagtactaattgactagacaggaaaaaagaaaggttacctgatgcatagatataattactattgatattgcaagaacaaaatttatggtcagagtatgaccaaacaacacagcagatgctactccagtaaagattgtggcgattgttgatgagtacttcttcaatattgtatctgcagtcagcattaatgtgttttaaatgaactgcagtacaattaccaaaactggcatattaaaacaaaaactcataaaagcagaattag

SEQ ID NO: 5824 - DNA, 1132 bp, Oryza sativa
tacccatgaattcagaaccccagagtccgcacatcctcaaatacaaagcacttccctagttagatgtaggttagacttcccgttcgagaaactctaccttctacctgccctcaatttatgcacgattaatgaatgccacctgggtggaagcgagaggtggaaatggaaggtcttagttcggaggtgggatctctacctgatagttgcattgccattcatgatgatcccctggcattcgtccattcagccattcaccattcacccattcaactggaattttggttgaatgccggaattgtgtccacaaattgtggatggatagttggttggctggctggatggctggctggatggctggctggatggatggtgaatggctggcggcggttcggttgctttgaagcatttgttgctatctaaattccatttaaggtcgtaccttatcgcccagcatcatcttattctctatttgtattccctccatctttcagatacggatgtagccttggatgtgcccgtgcccaatgaagaggaagagcgcaacatgaaacgtaagtacaaaagtaccggacacccacccagatcccaatagaatccgccaaatcctgcgggaaattgtaatcccattcaccagctcctacatttaattaacaagagaactattgtatttatctaacacctggattatctccacctttcatttgatccctatttatagattacgctgcgttgctaacgggccgcacctcctatttcctcaagggtgaggaaatgaagtccatgtacaccacctacaatccgcagaatgtggtggccaccgcccgtttcctgttccacaagaagaatctatactactccttctacacctcatcgcgaatcggtcgtccgcgtgccattcaattcgttgatgatgcgggtgtaatcctggaggagcatcaactggagaccaccttggcgggcactctcagtgtctatcagaatgccacgggcaagatctgcggtgtctggcgacgagttccacgtgattacaagcgcatcctgcgcgacgatcgtctccatgttgtcctcctctggggcaacaaacagcaggccgagttggctctggccggaaaggtggccaaatacacggcct

SEQ ID NO: 5825 - DNA, 7595 bp, Oryza sativa
cccccccccccacacacacccccttccaccgccgccaccgccgccgaatctagggttcatcggggattcgggatcgatggagaagtacgagaagctggagaaggtgggggaagggacgtacgggaaggtgtacaaggcgcaggacagggcgacggggcagctggtggcgctgaagaagacgaggctggagatggacgaggaggggatcccgcccaccgcgctgcgcgagatctccatcctcaggctgctctcccagtcgctctacgtcgtccgcctcctctccgtcgagcaggccaccaagaacggcaagcccgtcctctacctcgtcttcgagttcctcgacaccgacctcaagaagttcgtcgacgcctaccgcaagggccccaaccctcgccccctccccaccaacgtcatcaaggtacacctcttgcctgattatcccgtgtcttctccgcttctgggttggttgcctaggtgaaaatcggttgcagcaaccatgttagtgaaaatgaatgaaacactagatgtatgagttttcaaatgacattattgatttttcagtttttttttcactattcagaggcaaatactgggccatggaagtgtggatcaaattaaatacgaaatggaaaaaaaaattaacaatccttatagttcctatgtctctctttttttatatatataatctctgattgttggaggtttttcctttgattattgtgagaccttttacaaacaaagatagatgatgcacgaccgactaatcggttagtggtttcatattctgtcaagttgcacattgctctaattgcatagaattcacaattgttgcacgttaattatgcatacaacaacagtgatccaagttagttctctacaaattttatatggcaatgaaaagaaatgacttcttttttttttcaattccctgcagagcttcttgtatcagttatgcaaaggagtcgcacattgccatggccatggtgtccttcaccggttggactctgttctctccctgtgatttatgttgctgggcttatcagccccatacagcattgcagttgttgataacatggtttatacttattcctgctcaattttgtagtgatttaaagccacaaaacctgttggtcgacaaggaaaaggggatattgaaaattgctgatcttgggctaggtagggcgttcactgttcctatgaaaagctacacacatgaggtaatgtttacacatctcatctgggctaatttctgaacatgctctagcaatttccttatatgtctgttttgtgttgcagattgtgactctttggtacagagctcctgaagttttgcttggatcaacacattactcaaccggtgttgacatttggtccgttggttgcatcttcggtatgctccttttgatctttgttacggctttgtgggggcacttcattcttatatttgaaaaaccaaaagcacaacctggatacaacttttaaacaaacgcactagcagattcatggtcacctgtttatatcaacctttaaacaaaggagaggtagatgtgcaccagcagttctaaagtttttcgtgtatgtgttatcaaggattctttagttttgaatgtgtgtgtatatttgagctccaatttttcatcgctgtcatgatctttgaatttctggctgactaagcagcatatatcatacttttgcttcaagtttttcccttgctttcagtacaaaaaacatactgcctcctcattttgattctcgtactgttctatacagctgaaatggtcagaagacaagctctttttccaggtgactctgagttgcaacagttgcttcacattttcaggtctttcttccttctgcctttcatgattagcaagaagtgcagttatcataatatgagttacattgcttatctgctaagacaatggtttaataatttgataatcggtagttattgctgtagatgatgattttttttcataaatccatgtttgacatagtctgaacatatagctgtgtgatgaaaaattgccatgctagaatttcataaactactttctgtatagtgtgtgatagtttgcctcagcctgtataccttatggtaatttattcagggagtattatgcattaagccattgactaaaaccgacttcttaataggttgttgggaactcctactgaggagcagtggcctggagtaactgatttgagggactggcatgagtttccacagtggaagccacagattttagaacgtcaagtcccatcattggagcctgaaggagttgaccttttatcggtaagaaaactgatctatactggttttccattttgtcactattcgaaattatttaggctgtaagataatttgaagttctccctaatttaatagcttcaaaggaatcttttatgtatgattttggttggttttaaattgtgcccaacttctcttgatttgctaaattgtgttcaatttttcaacaagatgtgaggtgataatattgtgaataatttcttgcagaaaatgctccagtataacccagcaaatcggatctcagcaaaggctgctatggaacacccctacttcgacagcctcgacaagtcccagttctagtttgtaccatgtgattgacgaagtccatgttctgttgtgtcatttgattataaacgtgttgctgttagcagcaaggaaattcgttttgcctacttagcaccctactttgtgatccaacaaggaaatccgtttgccatctaggcaacttgaatacagtttgaatgtaaaatgggtttgtttctatgctgtatggcatatgtattatggacaagaaggttgcaatatatttgcctgtttctttgacgaagtattgccaagcattagtttccacctttacacttgcaatgattttattagtcgttgtttagtagattatcaaattcattcatgtgctctgaggggcgatttgcttatatgttaaaaatcttttttgtgctctaaaaagatgaagccatggtccaatatttgtcaccgtaattagctgggatgctgaaaatgatgaagatgattgattaagtttgaaactcatgaaaataaagattaagttggtgcacataaagcgagaaaactattagtacatgattaattaagttttaattattataaacttaacaaattggtatatttgatattttaaagcaactttcatatagaaattttttcacaaaacgcaccgtttagtagtttgaagagcgtgcttatggaaatcgaggtaaaatcttaatcttgagaaaaaaaacatcaattgactttcaattcaactttagtgagatcaagcatatactattagtttacgttttttgagcgtgtactacttttccgttccaaaatatagatattttttaggttaacacggttattaagaaattagtatgtgataattattaaagaaaatgtgtgattaattgaaaagagaacgtatgtgaaagagaatagatgtgattagttgagaggaagacgtaggaaaaaaaattgcttcattttaagacaagacactgtattataaataaattttttttggataaactattgtgctagaaataataccgaggtaataggaaactcatttgcgagtgagtatgacattatgtgtcatgcacacaggtcgtccactcgtccaacttggtcaaggaaaatcaaatccttcgtcaggactcaggacccacctgtcagtgacggcgcgcgcccgcgagtcacggcgtcggtccgccacttctcgcgtgtgtgccggggcccgactataaagtggccccgtggtcccagtcgacttggagtcgaagccttctcagaatcacatccagaacattctagatccttccagaagcacgcgagagaggggaggagagagagagcagtgggggagaagagaaccatggagagcgcggggagcgggtccggccacgcggcgacgccggtgaggtacgtcgccctcccgccaccgcggggcgtccgcgacggcggcggctggaacgtcctcgtgccggagtccatggcctccgagtggacggtggcgcacgtccgcggggtggttcgggtggcgtcgagaggcggcggcgccccggaggtttccgtcgacatggccgcgctgcaggccgcgctgaacggccgccgccgcggcgacgacgaccccgacctccatctccgcccggagcggggcgggggccgggacgcgctgacgccggtgaggtacgtggccctcctgctaccacgaggcgtccgtgacggcggctggaacatcctcgtgccggaggccatggcctccgagtggacggtggtgcacgtccccgcggcagctggcgtggttcgggtggcgtcgagaggtggcggcgcaccggaggtgtccgttaacatggccgcgctgcaggccgcgctgaacggtccccgccgcggcgatgaccccgaccacctccatctccgctcgggccacagcggtgtgggaggaggtgttgcggagcggggcggcggtggcggcgccggcgggccgtgctacgtccctgtggtgttcgtcctcaacaccagcaaggaggccgagaaaaaggaggtaaagtattctctctgccctttccgtgccatttgcttcacgaaacatggagcggatgccgcagcagcagcgccgcggcgaatttgcggcggtggtaccgtggtagcggtagaactccatagggttgtcgccttgtcggatactcggatctcgcttgctggggaagggcaatgctccaggcgagcagcggcccaaagtttggtttgccaaaattatcgatgccgtgatgggatgagttgttgattgttgtcagttctagtggtgtgctagtttttccgatgatgtgtcgctgtcgctgtagtatttcgtcgccgcatggatcgttccatgtacatgtgtggattcattgttttacttcaccttacttgatataaaatagtagagaaatgcacatagttatttttagtcaattatttttgttgacgtacaggttgattcagctgaaggttattgaaaaataatgttctgattgcttagtaattgaacttgcgtgtcactactcaccagtatccacatatcgttaaattcattttacctaatgcaaaattttgtggagaacacctcagtatattatacttcagttagctttatcactgtgaatctgtgtgagggttcctaatgctttgtgtatgcgtgtggtactggtagactggtagtacctgaagctgttggattggacgtggacatgttataaaagtaactgtgctaagctggtgcttatgcagtttcaataaatttggactaggacattgatgtgcgtatctatgcattgttcacctaaagaaatgaacatatataagttacctattattattgattccgttattgcctacgtatgttattgtttgttttgtctaagtacactggataataaaacttcacataagcatgctaattatgtatgttattgtttatataacttgtacgttttgtgggcactgaaggtagagtctcaactgtgattctaaagaaacaatggatggctaattattagtttgttttactcaagtaaataggtgagcttaattagatatcgttgttgtgtgattagcaactttgattctttgaacgactgtgcatgctatctttgcttggtgacacgcagatgcaactgtggatagatcgagtagttggaacacagacatgcatctgtaatcagttaactcttcatcctttaacctctaacttctgaagttgtcttctgccctctagctgtgttcatgtttgcgttacagtaataaaatggtgaactgacagtgatcacaacagctattctgttcagccgttttgtttactgagtgttgaagtgtagtctgatgtacactatggcattcattggatgtctctttttttagtacttttgaaaactatgccacaagcccacaactaaatacttccttttgtttctgtgctttcaaccagcaccaagcacgcatgatcagtctgctcatgttgtcaacctttgctgtctacctcctctacgctatgcagcacatctccaaggatacgttcctcacagtggaattgcttcagtttgtgggccacattgttatgtgggctgtggtgagttattgtctcacttctaatcattgacccttaatttttgtcattgtactatcctactaagttgcaccaacaattcacaacaggcctcaagagttgctcgaagcacaaacagaagtgagcctcgtcttgtgccaaggtaactcaatcacatcatcttatattcttatgggtatttcaatttgttgctgctccgtgctcctccaagtagctctatttagccccttgacgctatattcttacccagcctggcattacagttctagtcaaaatgtgttctttctgaactgtgtaatatatccgtccttatgtctggtcacttactcactcactcacttgatgttgtatcttccaggtcttttattactgtgaccaagaagaacgcgtgagagagacaatcagtgtgctctctagtctctaccccttcgtcagatgttcaagatgttgggagtttttgctacctcgaggcgatactgtcctctgatgtcgcttctattcgttggtttctacttagtagttagattggcaatggaagttgttctgctctcttacccatatctgtgaattgtggatgtcttaccgctgcatatgtagcaatacggcagaaatgatcacgagtttgcgacagtttgcttcacatttgcatgagtatattagaggattagtactttcaaggtgttgccggtagtgttggcgttctcatgaactcatgcttggatctacatgaaattttgatatgcctgcattgttcctaaactgattcctgcaagccgctgctcccataaggccgtaactcgcttctagttgcaatacccgcatatattttagattatatattatcttagtttgcatgtttatgtattaacccattaactttgactaaaatctgcgtctgaaatgttgctgcgaaatggctgtcgtttaaattagtccatgaagagctaccaccaagtgagattctctcgctttggcttacttagtaaaccaatttgagatagatttggagcatccgaggcagtaatatgtgaaatttgagatagatttggaggcggtgtgcattgttagctattacaaaccagttgtaaagactcttaaaactggagcatctaagacaggagtgtgtgaaaaaaaaattgattgaagagtttttctcatgctggactgtaaagactcttaaaactggaaaatctgagacaggaatgtgagattaaaaaaatttgattgaagagtttttctcacgctggacggtcaacaaaaatgtgtgaatacttttgattgaatagttttgactcatgctggacgatgaacattagttaattaagagttgttggttcgtatactgccaaaatctcttcatatagaactatatgtcaaaatctatcaaaacaagcatctatatgcttcgcaatatcatcaacataatggatgagcaagcaagca

SEQ ID NO: 5826 - DNA, 1494 bp, Oryza sativa
gtcgatcaaaattcttaagtcaccagctgcgaactacagcataaggcggtaaggcccgcagaccggggcatacaacttttaacagctctagtcaagtcttacaacattcagatgtattttcactttccgctttccagtgaaacctgccaattcagtgtcctagcctgtaatttttcaatggaatcaaccagcacggtactttggtcatgtagcagcggctagcacgtccagaaatgcatgaatctgcaaaatatgacaagtgtcatcaaaacttccaataaaagcaaaataatgttgaagcattattgattcacggttattaaaatgataaagatgaatgtggagagactgccaatagaaaacaaaaagcaaaaccaagtatatattacatgtacttatcaaactatggaacttcactaaagaaataaaggattaacaagtggggggtacaggaagtgactaacttactctcagaattcatggcctaaagatgcgcatctgaggttggaaaacagagcgaagcctgtacatacatctccatgaccccatgaattcacccgaaaactggtgggttgttgaactcatgttgtgaggatcatctaaagcaagcaaactttagccatgtttttagataatgagaggaaaggtgatctggtatgtctgcctgcagtagtagcaagacaatcataagtataccgaataaaatagacggtgttaatttagtgacttcactgaatgaaaagtgttaataaaaaagaagatagcatacaatgtcccatgaagcagaaaagccatcagttgaaagataccaacatccatggtgcgattcaatgcccctcctattggaggtaccaagttcaagcagctgatcaagatcgtcctcgtcagaatcatatctccgtcgctttctcttccgatctctctttctccttttatggctacctcttatgagatcctcatcatcactgtctagtgcaattgagttcccatcattttggaccaatgggtaatcatcagccttgcgaaattctattctgttacaagtgaacagatgctcacaagaatcagctgatttgcacccttttgacaattcacagaaaactagccaggactggatgcctatccacttaagtgcgtccggaagttctgtatccacaaatcccttcatgagagcaaaatgatcagcatcagtcaattgattagtgctcttcagaagctcttgcatctgtccttgttcttcctcttgttcttcatcattcatgaggcgccaaagttgtctgcccttagaaatgacacagttcaatagcacaagttcatcaagagatatgtgatcactgtgtgctgacaaaagaacctcaagccaacagcatgggaacaccatttccttgcactgtgaattcagcttgatcaacttccccaaagctctcaagaaattaagaagcctttgttcatctaaatgaataagaagatgttgagaaagagaagaaaactgct

SEQ ID NO: 5827 - DNA, 16440 bp, Oryza sativa
tactccctgggatattttgacagtaagaaactcacataaaccaaatcaagtttgcaagcactttaaactaaatcactcatcttaataataatatcccttataaattggttatatggctgtttaaatgactttttaaatcatagtgcaaagtaaagatgtcgtagtgtcttacacgatcttatcagaaagccaaccacccacagtctgctgaagattatgtggaagatcccaatgatacagagttgcgtatggctcaatacctacagccagacatgtcattggttaataactagaaacattgcaaccttgtaaggtattaagtaaagcatatgccacctttctcaatcatgaaatttataaggtcattataaaaggcaactccttgctcattgacatttttccccaggccatctgcaggcatgataaaattagtctcaatcatagaaagatgatctgaagcattactgatgaaaaaaaggatgtcatatatatctggaaatgcatggcatgtgcaatttttgtatgtgaagctctcatgtgattagctcaacataccaggaaatatgcgtggccaagatatagaaaatctataagcacggaaacccaaactggccatgagttcaatgtcttcctgaaaaaactcatcacagacaagaagttactgctctatgaaaaaaatgcattgtacagaaatatgaaagtggtctatgaggaaaaggactaatgtttgtttagaacaagtttcagggattgtttgcaataaaattaaaatgaagccagtgttgtttcccttttttccttgaaaagaaagacaaggaaggcaattgctaccttgtatcgatggtaatgatcaactgcaacttctccactgctcccatctaagatacgttctgaaaagcacaagcatttgaacattacctaattaaattgataggcgccaaaaacatagaacccaggtaaacaaacctttgttttctgtgaaaacatcccatatgttatctcctttgcctccctcccgtctcgccccttcaatctatacagtaaaagattcatatatacatgatttccattttgggagagaaaggaagtagcacggctgttcttcttccttctatgaaatgaaacaacagcaaaacaaacttctttattccctgcacaaacttctttactcaatgttcctctcttctctttagtgaagagaaagtaaaatacaattaggccttatttgtttaatccacacctattgtggtgtggaattattcctcctcaatcccctccaatcactctctcttgaggattaaccaatcaaggccttattgggttaaaattctctcttgccatagcctgtattttccattttcaactaaaggttgcacaccaattttagtttgtctgttaaccttttttttcccccatatatcttcctcatccaaccatcgactcataaaaaaatttccacaaaagtggcacctggggccgattgagtatatgcacaaaaagtaaggcacatcatgaacattaaatctctcatacaggagttctacacgcagaatgccaattcaagctgtccgtgtgatcacaattcacagtaaaaccaatccacagctaagtctaagctgatcagcaagttgaaaccgaaagggtacaacacccacagtgatggcgccaccagaaccgagagctacactcacccaaaatcccaaataaagttctaactccatcccttcccaccggggtacagtacactactactagtagtagctagtctagtacagtcaccacgggcagcaagcagatgcgatgcgatgcgacgcgacgcgggcggcgagtacctggtaagcggaggtggcgacgccgaagacgaagccgtcggggaagtcgccgcgggtcacctccgcgtcgcgccccgtgctccccattccccccggcggcggcggcgaggaggaggcgatctccgcagcgtgcgcgacgcgtggctcggcaggtgagtcgcgcgcctcgcgtggtttctgcctgcgacgaggcgtgaagaagacttgtgcaaataaataggaggagagcccacgtgagcggccacgggggtgggtggcacggggacgaggcggtgggacccaccgcgcaggctctgtcgacccgggaggtggccccacatgtcatactgatagaggcaggagatccggatctcgtttgcgcccccacgactctatgcccccccctccccttctgtcctttttgtcgtgcttagaggttagtaactgtagttcttgctaattactctatcgaagtctttaaaattttttggccggtctttgactaatggcttgtttatggcatgggtttatatatttcaaaattcataattatatcgagactgtttcataaggggacaggatcgtgccatttgtttgaggtcaaacagcccaatgtgcaaacacgccgttagaaatacagcatcagcagcagctttgcatcattccatacagtgacagatcatgtggccaagcttaacaagacgggaagttaaatcgaacgaaaatttgcgtcacaatttagagcaacttgttcgaaaaacaaacagcaacgagagcactacttcgaatagaaaataggcactattaccagccaacttgttcttgccatgcccatgaacaaaatgtgagaggatgccggcagagattccactacagaaactcagcgcacattcagctcatctccagtggaggaacaaagcaaaccatgtaatattgtcactgcaataatacttttgctctgtgtccaatggcacgcaaaaaaaggatgcagtttgcaactttgcatcagaccaaaatagtttcatgaactcaggatctgattccgacaatcaccatggacggtcactgattgcttcattagtactacctccgtcccaaaatatagctatatctagcacagtactttgtcccaaaatgaagctatttttctaactaccttctcctctcaaccattcacaaccattctttttcacatactttctcttttcaaccaatcacacaccttcttcaatcattctcacctactttcttaatacccgtgccaaccttaaaaatgcttgcattttgggacggaggaagtatatagtaactccattttggctttacctaatgaaagaagaccttgatcatggccaatcaatgcatgattccttcttgtctgcatagcaattgaatacattatcaaatcaaaaaagaatatatttgtgtggttgtgcagctcgtgatagcttccacccaacagcccgctcacagataaccaatcggtacacataacagcaacagctagacacagctcctgacgaagtaagaaaaccgtcgatgtcttttcagagggtgccgacaaaggcttgaaagtaggagactagacaaaactctaaaatgacatgatgcaattctttctaccaaattcaattacgacaagctgtttccaatttctcacagctgatcacccaacagatactgatacattgaaatgaataacagtctgttgtaatagatgcaagggattaaaccaaaaaagtttacaattatcttactacattatggtaattctgttaagtcagttgtcactttgtcaatagtaacaggtgatccaataaaaaagttccaagtagagtttgcctatttaaggtgggagtacgaacaaaggattttcctggcacgactttctctagactctactacactactctaaatataaatgtctgtaatgctaggcaacttggtagtctgctcttttttgttttggaaatcaagtcagaaaaaaaaatcaaagcagcacaacatatgatgtgtacagttgctccaatactattgagctaccagtcaccataagacagtgatacaacaacaactaagaggctattaatactaactgaatgcaagacagcaattcatcatgcaagagaactgggacgaggctattacaacgaccaggtccaaccgaccaaatacaatgaaactatattatctgaatggtggtgcactcatataggaactaaactacatttatcaaataaaagttatctacttgcacaccaaattattcatgcatgtcctagtaccaggtcaatgaaaaatatcttccctaaatcagattccgatgcttgaataaatatacaatcacagttcactgacattttggtattttttacatcataactgtctacatgttctttgatataaggttctagaggtacctgctgcaacattgacatttttgttctgatctgtagctctgtactctctccttgcaaggcatgagatcatatggaaaataaaatatggaattctctcagttctaaagaagtaggaattctagaccaaaattaaatctcttcctgtcagtctagcacttacaatataattgcaagattattgtagcatctaacaacaaacagacacaagtacaaaagctgatgtttctcacaagctcaccagagaagcagagagcaaaagaaagcactgccccaaaattgattggcagctgtgtcactgcaagcgtaccaaaaagaaactatgcttcttggctggcttttgacagctcatccatttccaattccttgactgctgctataaggcttcgagtagtgcctttaaggcataatccaccatcctccatttccttcaggagattctcagcagttctccagtccaaagccttgagacaaagtgactggataagtttgttgtactcatccatatttggctccatcccatcttccttcatctcctttaggcactccaaggccttctcaaactcctccatcttgcagtaaccacgaataagtgtgtgatatgtaaccctgcttagtcttggatgaatcctcttagcatcacgaagtagtgcatgggcttcatccatcatgcctcctttggcgtagccactcatgatcacactgtatgtataaatgtcggggcagatcccttggttctccatcactctcatcaaaccctttgcatcctccatttctccatttttagacaatgccgtgatgacaaagttaaacactgcgctaccaggagctgggcctagatttaccatcctcatcagcactttctttgcatcttccacgttgtttgtattacacaaaccatgtataaccgcagcataggactggccagcatccttaagagattccccctggtactcttccagcagctcaagagctgtattaatggtctcgtcattcctcgccaaagcgctaacaaggaaagttaaggccgaggtcggagcctgcaccttcttttcctttgcagttatgtatactgaatgtgcctccttcaccttcttcttcttgcaaaagaacatcacaatgtcaccgaccttctcgccatcggggaagcagccagagctaatcatcccatcgcaaactctccatgcagcatcaaccatggacttcctcccagctgcttgaatcgccagataatagctgtcgccatccggagcgcatcctaactcactgaacatgtcaaacgcctccaatgcagcctttgacttctcgagcttccagaacatcgcaagcagtttattcagcacctgtgtattcactgatccaggcacagctcccatttccttaaccaaatcccagagcaaatatacatccatcttgtcgatctcatcggaatcagcgatcttgtcgacgactatctcaagattggcgaggctcttggccgcggggttgttcttcccggcagatttgaacaggcggagcagctttttaccggagcagctctcggcggcggacacgagaatggcggcgaggagtggctcgttgaagtccacgaccatgtcggcgagggcggaggggatctgatcctcgggggtggactccacgacggcgccgacgcgcgcggccagcacctcgtcgaccacagcatcggcggggtcgggggaggcgtcggcggcgaagacgtcgtcggcgtccccggcgtcctcctcccagagcgaggccaggttgtcctccccggcttcggtgggatcagaggcgaggccatcctccccggcatcggtgggatcagaggacgcggaagcagcgccgccgccggcatccgggaggggctccggggaggaggagaggaagcgggagagggggcggggaggcggtggcgctcgggttaaggctcgaagtggagatggcggcggcgggagaggcctgtggatggaggagcggaggaggaggagagcacgagctcccgaacgccgccacatctcctcctcgtcggcggcggcggcggcggcggcgtggtagctgtaatgtgtggaggcggaggagtcactggtcgagtcgaggtgggaggcggaaggtttctttcttgctttctagggtttaaggccttgatggcgcactggactgggcctgattatttttgggccaatatgaaacttttctctttttcccctaaactaaattgccagttattttcaacacatttatgaatttagatccacgattgcgttgataacatctagataaatcatctttttcccattttagatgaaatataaatttttaaatcattataattcaacatacaaacttcaaatctattatgaatctaagaaccgaaagacgggaactgtgccaaacaaggcctataagcctcatttccaagaatcatcgccttcactttcgagataagtttgaatccaaatcttcgatggaattatcagcatttccatggaacatattatgatggactcttatactgaccaacaacagaggaaatcaaagcagatgaggattttattccaagcgacaccaggttttagttacatactgtaagacacaaaatagacattcagattgagctgctcatttccaggttgtatgattctactgtctattgaatccaacaggctacatgtcaaagaaataaaagatacatggatccttcaaaaaaaagcaacaggtagatttgcaatgtaggagtagtagcaatctccacccacacaacacacatctgaatgtgcatctatgcagtgatctcggatttggcattcttaacattttcttcatctttggttgatgccgctgctgctctgtcctgctctttcttctgcgcccttatcagtacacgtcttgcccggggacgcatctcacgcacttggcgtggtggcatcacaaaaggttcaagagggcgatcatggaatggatgctcatttccagaaaatatcctcagtttgcgatccctgtcctgtgatcagaacagtgcatgcttaataagcaacaacagcattatatgaagctttagcaatttgaagacgagaattgaaggaaaatatagatgttttaccacacaccagagaggaaaagacttgatttctcggacagaatagagttaaatcacataacaaagaaacaccatgaaagatcagtatacaactatcatgtggaacatgaaccaagaaggtatgattggatttacggtatgttgaagttgaacttgctattcaatacagttctcttgaaaatccccaccccatagaagaattgtaagataaagttcagcaaggctaagagaccgaaactataggcttattatggtaggttgaagctcaaaaatcttatcttattaatgtaattccaaactaagagaccgaaactataggctagatgtagaacaggattcatattggatagctatctagatgtttcaattatagactccattccttttcaaggggaaacaaatgtatacagcttccttcgctcagtgcaatataaacacagatatgctgcttgctgcaataatgaaataatcaaaaaaacttgatttttcaccattcaatcagcatgtcactgcagattctgtatccctacaatttttgggggtattatgaggaatcattggcaggatgaatacactaccagaatcacaatacgtagcataggcaactcacaatatatatctactgctgtataattgtattcgatcatcaatatgccatctagatccatcagcacaccactgtttattcaaactctagagtttcacaactcatgaagctagtccacatcaaggactgatgtgaatctctctatactgaacctaactggcctaactggctctaccgtgaatggatgtactacacgtttgcaaaaagccaacagctcgtcccttgcccgtggtatcccagctgctacaaacgacctcctgcaggccacgctacaaacgaccacatgcaggttatgctatctctaggatcagactcacatttcatcagtatcaaagcctaaaggcaagataaacacgcatgtcgctctggtatctgacggtttcaaccagctgcagtatgcacattctcaatcagcagacaaccaaatagaccccatctcggcgatcacccactctgactgcggctacaccaacactggtacaccacctgtgaacgaaagctcatgcccacgaggagaacctgatgggcgacggctccagccgaaacccaaaacaccacacatccctccactccacctggtgctttgcagagagcacacgcgcacaagctcctattccacggggcaccgcgcccgcgccgccgccatgggtggatccaggttacattaggtctcagcgccagccgaaatatgcgaggggaggacagcgcggctcgctctacggagacctcgatgccatctaccggagaggaggtaactgaccttgaggttgtcggtgaaggccggcagcgccacaaccatgttgatctcccgcggtggacttgtggccggagacgagaggggaagaggcggcaacggcgggggaaaggagaagacgatggagtcgtgggagcgactcttttgtctccttagtgcttagtgggccccacaggcccacctcattatatgggctcaatttgggcccaagtttggccttcttcagattgggctcctttcgtttccaacgagtttgagcctttttttttttacctccctttcttcttcttttttctttttctgaacgcgcacaatccttgcgcatcgatatattagaagggaaaaatatattttacaactaatacctgttagtcatcagggtaacaggaaataggtggaacactgaaagacaatcgggcgcctgtaaacaaggaaaaggagaaagagcttgtagatttgcatacattctttcaaaatttgcataaatttcacttgcattttaacaaattcaagtttatcctcccaaataaacaaaaaaaaatcttttaaatcctcccttgccgctcacatcggcaaagcaatagtagcttgcagatgattttctgcaccctccatggaagcaaacgaagcccagaaatgacatggcaagcagctttcacgtagctttgtgctaagtgcaaacttcaccaccaaaccaagccatctgcaactctgcagcaaggccgccaagatagatcatcgacgttaaccccgatgcgatgtttaagctaataatccaagtcaaaatcataccttgccatgctctccaagctactccaattttctgcgattgatgcggtaatggacagtacaactaccagtacaagatccgggtgacaagccaagaaaacgcggccgcgcgggaggaggaggatggaggagaagaggcagcggctggtgatctctctctcggcgctctgcctcgccgtcgccgtgatgtccggcgcgctgctgccgccgcgggcgtcggcggcgggaggggtcgggaggaagcggcggtgggccgggttcgactactacgtgctggcgctgcagtggccgggcaccgtctgccgccagaccagccattgctgcagctccaatggctgctgccggtgaccccccatccctccctttcttggctagtttcgccattgtcagcttggattgatttgctcacctggtgcttctcccccttttccgtctctgcagctcacatccgctcaaattcttcacgatccgtaagtgtgtatgagttcttgcggatcagaagctaaatttataatcgattgtatcaattcgtgaattcatattcttaaattgttggaatagatgggctgtggccgcagtacagctatgggggatggccatcctgctgcaggccaaccacattcgacggcaacaaggtggctgccaaccacccatcttatcttcagaatgggatattgggatgtggtcgttttcccccccaatttgatgaagaactgctagcttcttgctgtaagattggcatgtcaatgtgggtgtgtatttatctggttttaccttgtgacagatctcgaggttgaagacgatactcgaggagtactggccgtccttgtactgcggctctttctcaacctgctttggtgggaaaaggccattttgggtgcatgaggtagacattggtatctaaatgagatatgtgatttgatgaggagaaattactgacatcttacccttttttcctcttgactcttgttcatgtgctgatgctttactcgacattcgtcagtggggtatgtgatttctgaacttgttgttctgctccttaatgttgtcaaaattgttattcctagataagataagtactacaaaattccttttgtttaaaatatcatgttgccaatgcttgagaaaagaatctttatagtttcttacaccatgaataattcctgtcctcgaatcactgaagacagactgactgcattccatgagtttttttgaacatgacaaatttagttagttcctcgtatgtattaaaaagggactgctttatgtcttttttacgtataatttatctggtcacaaacagacagttcagaagctgcatgaaaaggtttgacctctaattggcaggagcatcccaacctaaactttcctaagcgtgccagatgatgcggctccatttttattgtatctaatactccacatttttgggcagaaactcatggaacatgtggttaccctgaaatacaggatgaatacgactacttctctacagcactgtacctttacagcaaatataatgtgacggttagtggatagtatttggtttcatgatatgaattcgtgaaactataaataatcacctcccatcttaattcaatatcccgcgtcaaaaaagaatcttaattcaatattatatacatatgcgcaaggtatttgaggttgtaacatttcctcagcacattgatatagttctcactctggtcttgcagaaagctctgaagaaagcacatatttatcctagaggaggcaggaaatacttagttggtcatatcgtctctgctattgaattttcctttggggcaatgccatctattgtgtgtaaaaacggctcagttcaagaactgaggctctgcttccacaaggattatcaggtaattttgatgtatttgtgagtgaagcacattattatgtcatcatgtccttacatattcagatttgattaaatcggtcaaagtaggaatttctcctgttatagtgatattagaagggcagggcctaatttttaatcgagtcacagtaggccctagattatgcaataacaaaacatacatattttttcaaaacggctaaacatagagtgttgagatagacaactggaatggatatcccaggctcccagctctcaagtgtccttgaaattattatttttactatgtggctttcgtgataaacatttatcgtcaagtgcagattcttctgagcatttctcaaattcataattgaactaaatagcgtatttttgcagcctcgcgattgcttagttgagggtgagaactctgttagaagaaaccattgccctcgatacgtcactttaccatcatataaaccacacggtgagttatctgtttgtgccaattatcagtcactgaaatgaacagacagtacatgcaatagaaactatgttttctgaacttctgaaatagtactaggttttctgaaatagtactaattgaacaatatagttcatttaatcatcttcttcttgaatttatgtggctttaccttctcttgttttaaagataggttttctgaaataattctctcagttttgacacttattatctggagaaatgcatgccttgtgctaatagaacaatagtataattgtttcagtcatcttctgcaattcatgtgactttaccttctcaatgaaaacataccttgttcatcccatgtgttttccctttttctgacactccggttgcacttgcagcatttggcaattctacagaaggaatcagtaaccaagtcaacgttgagcaccaatcatatcagtagatctcacatctcactgtgagtattctacaatataaacacggctctgatgactcaggaatgagatgtacagcaagaaacccactaggcacacatacagtaacgtctgcatctgtaattctataatgcaattcaattgattataaagcaactgaaaatcccatgctgagttatgcagaacttttactgcatctcagtttctgtaaatctgtaattctgaattgtctgcaaatttgcagcatcccgtcatttccaaattcaagcgcgccgttaacaattgccaatctcatgtttttgtgtcaaaaccattgtgctagatttcataatttgtcagcagctataatattttcgctgaatatcacatcacagcgtttatgttctcagcgaatatttcgctgaagtctgggagcttcgtgctctctgttccgttcactttacgcatctcaacctatcgctgtacaagcgcctgctttctgattgaccttggattatttgcgttctaagatttgtttgatcagatgctgattaatgtcaccttttggccttaatcatataaggaatattccaaagttaccaaatccacatgccatggcatcccgggccaaaatggtaatcagcctccggttgcttcaccttgcagggctctttatcttaaccaatctggaaaaaaattcacatgaattctgagaaaaaatgtgtagaaaacaactcgaatacttcaaagcgaataacaatccatttgaagcccactactttgaaagtttgaaatggatgaattttgcggaaaaatatctctcgataaaaatgctaaccaccaaatcacttgtaactaactgaaaacagaaatggtgcagtaatttctgatttggcggcgggagggccccacctgtcagtgagacgaccatcgcggtaaccgcatccaaataaatccacgtggccgccacgccgagcgaattgaccgtacaaccaagccgcagagaagaggaaggcggaatcagtcgagggcgaggcggcggcggcggcggcgatggcgacggcgaggaaggcgccgcgcatggtggcgatctgggcggtggtggtggtggtggtcgccgccgatctgttcggagcggcggtcgcgcggtcggcgtcggcgcgtcacgcggtggggaagaagcagcgggagttcgactacttcgcgctggcgctgcagtggcctggcaccatctgcgcctcaacccgccactgctgcgccatcaacggatgctgccggtagagcctcctcctcctcctccccgtctcctcccaccgccgccgccgcacgcgcgcgctcgtcggccggttttggtggtcgttacgattttcgcgcgcgcgccgcgaccttcggagattttttttcccctgatgcggttgcttttgcagctcggagccgctccagacgttcacgatccgtaagtgcgccgcgcggctgctcgatcgatcggtttaatcccaccctcgcgttcgatttggatgccgtttgctgctcgagcgaatcaatttctgattgatcgatgtgtgtgcgtgtgtattttgcgtactggatgaacagatgggctgtggccggactacgacgacgggacctggccggcgtgctgccgccacaccagcttcgacatggacaaggtacttggctgcagagctcctcctctttgtagctcgaatgctcgatgcttacacggttaattgaaagagtgacaatgacaaggtggttgtgctttggtgctaaccttatcgatgcatggattcgtcattcgatttttgtggtgtagatattgcccctgaagccgacgcttgagaagtactggccgtccctctactgctcatcctcttccacttgcttcagtggcaaggggcccttctgggctcatgaggtatataaaagtttcagaagtcaagaactaatggattggattatacaagtatacctcttttggatttgcaactgaccttttgtgctgttttcctgtctgtttgtcatatggtattcgatcattcgcggcatatctttagtggggtaatgttcttcaaatcattccaccttatgttatgagctttcttattgtttaactttctaacaggaagttattgattccacttgaaatatcacgtagttatatttactaggcactgatttgtcattactcaactcagctttctttttttctcagagaaacatggaacatgctcatccccggtagttaaggatgaattagagtatttcaccactgctcttgacctctacttcaaatacaacgtcacggtaagcatttgggcttgggcttactagttgtaggcttgtagcatcgagttgatttactttccagacaaaagtcactgtgtcacaaattacagcaacagtagccttttgtccaaataggtcagggtgttataaggacaaggcccaagttgagccacatgccatggcacaaaatcttgtcctttttcctctgattaaatcgcaccgcattgcaggaaatgttggcaagtggtggtatccatgtttcaaatggtaaacaatatgcgctaactgatgtcattgatgccatcaaatgtgcttttggggcctcaccgcaaattgtttgcaagaagggctcagttgaagaactgaggttatgctttgacaaagatttgaaggttagctctcctttttgttcttcgaacaacttcctacagtttgtatcatgaaaattatgctgcttttagaatgaacgaccaacagcatgcacattttgaaattatgttcctacaggcctgcagtttcatttgctaaaactcaagcatttaccaacctcaaacatgctacatctttctatatgtatgcctaatagtgaaaacaaaaaacttgatcactgttgaaacaccactaaactgtacggaattcaaggtgattatatgcatcatatagtgttttctgcttgtgtttcttcatgcccctattaaggaatgttttatctgttgtgttgaaatttctaaacatgtgctgcataaattttgactggtgagtatttttcccaaactagctacccatgtgaatattttccccaaaagttgggaatgtgcgcagtcctgcacgtgttatttggcaatgtctcacatggtcacatgttgcatatgctgtacaataaaatactataatctttctttttcaaagaaaacctgtacaatattgctaaactcggtggtatatttccagccccttgattgccttactactactgctaccaatgaaaacgtatcgaagaagaagtattgccctcgatacatcaccctgccaacatatgaccccataggtaagttcagttgctggaatgtaaatcattgttccaactcttgatgcgcatgctaatcctattgtctgattcgtctgaacatgattgcagtacatgctaattctactcgggagatcataacagtcgaaagtgaggtctatggatatctttacacatcctaagatacgattaccgcgagcaagaattacatggccatgatgaagccggtagttcagggctcttagctgcttaagacatactggggccggcattgaggttcaaggaaatgtatatctagataactcgattattacatttgtaagcacggcacgccagaacaacggagaatgtgattgtgtctgaaaaatcaattgctttatgtactatgcaaggttggaaaatagttcgtccatgtatatagtcattggtcagggtcatctgcgactgcaatctgctgaattataatggacagtggcaatcggtctgaacttttctggctacgaatatctatcatgtatgtgcccagagtacgtgttgacatggagcaagtcatcacgtgaattttgagtacaattcgttaagatcgtgcgagacattttcgagtgaagaactttattgtgttgtcatcgtcagttatacatgttccctttgtacaggtgaaaatgcacacttttgcacaccggcaattgcagcaaatacaaaccaacaactgtagaacagtactccctccctccgtttcgaaatgtttgacgccgttgactttttagcacatgtttgaccgttcgtcttattcaaaaaatttaagttaattattaaatttctttttccctatcaattctgattgcattgttaaatatattttcatgtaggcatataattttacacatttcacaaaagttt

SEQ ID NO: 5828 - DNA, 6373 bp, Oryza sativa
agtaaccaaccatcgaccattttcaaggtcacagtcacccaccaggaaggcatagaggcaagacagaaagtcaagacagcaggaatcgaacctagtcatagtaaaatgatcattcaaagtagacttttgtcatagggcaaagaagcttagaagggtgatgtagggaagtagtaagggatgaaatcacttatatgttgtatgacgcaacgaccgggatgaatcaaaggcatgcaaagggaatggatagctcaacctgtcagtagttcaagtgaattgtcgtagtgtaaggaagattgattggttttctgattgctacttggctggcataagaaagaaggcgccccggcaggaattctataagcttgacttgcgtgcagcgtttgggaatcaaagataaaaaataactctatgggacttacggaactagaaagaaggtagcacctaggcgtaagaaagaaagtaaatagagacagcacctactacgctatctattgaagcttactatataatatataaaagaaaaaaaaggccatataggcctattgggtgccgatccactcgatcctatgctatgcatttgtgaccaaggcgaggtaagatcatgaatacaagatggcgatgagtcatgccaagtttggggagtgttgctcataccctcattgcatgttttaaaatagggcatactgcctgtgatttactattgatttccaagtcgacacgagattctatttctttccctctacactatgtacttacttttccggctatgcgagagagactttatccttggtctataggcacaaatccagtagaaaataccaatccaacttcctcctaaaatcacttctaacaggcgagcgtgacttgtgcgtgctacaattgctttagcgggagctgctgtcggtattggaaacgtcctcagttcttcgattcattccgtggcgcgaaatccttcattggctaaacaattatttggttatgccattttgggcgtagtaccggtattagagatcaggaaagtagttgggagagctcatgagactctttttgtgaaattcataagtctcaattccccaaaaactcgagttccttttggatttccttcttgattaatgacaaccgtcatcatatcgtattatcataccgttgtcacgtttgagttcttgttcttcccccgaagaatcgccaccaaagacattcttccatggttttttttacatggggggggctcggttttgtaaaagattatgggtttgtgtcgaattattttattcttcttacccagtccttcggtggaatgatgaacatacaaagctcatgaataggattgacttccctaggcgagattagggttagaggagatagcaaacatggagattaatgcttcttcaggttctaattgcttttctgttgcactattgcttaactcctcctgtggatcttcctttcacaagttgacaatcacaatcgcagtacctaaacgtcttgcagtgatatggagttaccaaccacctcgacctagccaaagggccaaatcaagatgggtttttgtagaaaacggctaaaccggctagcggagctgatttagagagacccgacgaaaacagattcgggttcggaccctgacggtcagaccggccgcatacctgcggtaagaccggagttcaggccacggtcagaccgcccacatacctgtggtctgacctgtcctgtgaaggaaacccgacactttctaaactttggtaattttcctctatttcatccatatgtgccaaatttggatgtaaacatcaacttaaatgtttaaccagaaagattaaactggtgaaaaaagacaaaacagtttacttatcttctaacaaattcgagatctgaatacgataaagtcgtcgtagcttctggcaccaataatacgcctgattctcatgctcacaagagcacaaagtagccaggccagccttgttgccttcgttgcatggagaagaaagatacacatcaccagagtgtgggatcatacaggagaagaaaaggatagaacgaaataccaccttcgtcttttaatatatgacgatattgatgtttacacatactgttcaccattcatccaaattgaaatactaaacaaatatcatttgtaacttgtttttgttattaaagattttttaaatcatgacgtattttttttatttttgcaataagcttttaaataagacaaatcatcaaacgacacgtccaaaaaaatttaaaagcaaagagcatttttcagctcgaagaactaagaaacatagggagtactctcttcgttacgaaataagtttagttttatccatcacacataccaatataaaattaaaaaaaaagactacaatacccgaactttattaaatcctaatgcaattattcctatctttatctactcccaaatcccaatgcaattttttacaaactctgatacaattgctaaagataaatttgtcttgagattaacaattgagacataaataaagtcgtttgggatagtgacacggtctccaaaacacaattttgacttcctgtttttataaaaaatatttattgaattttatgaaagtatttttcaagacaaatctatgtatatagtttttatattttcaaactcaacagcttaagagttattcatgatttatattcctaagatttgacttaaacattattctaaatgacttactttatgagtacggagggagtacgagctattagctccgtccaagaatgtactccctccgtttctaaatatttgacgctgttgactttttaaaacatgcttgaccattcgtattattaaaaaaattaagtaattattaattcttttcctatcatttgattcattgttaaatatactttcacgtatacatatagttttacatattttacagaaaaaattgtaaataagacgaacaattaaatatgtttatgtgctaaaaagtcaacggtgtcaaacatttacaaacggaaagagtactagcaagcacacatgtgcgttatcgtcttctcccggcgcgaccgcatgcggaggagagggacgcgacggccggtggcccgggcgttatcatcaaaaccatcaaatcagccgtgttgtcgatgcggcagccagccgatcggctcgccggacggccgcctgcgtttgtcccatcgtcctcgcgagtcctcccctcctaacctgcagtgctatatatgccacgacgagcaggaggcgaccagacggagagagagatcgatcgaacgaggcgtcgccgtcgatcgccgtcgtgccggatcgtttggttagcttgcaagacatgcttatatactccttccgttacatattatattataaatcgttttaactttgttttaattttttttcgttttcaaagtttgattaaatttataaaaaaaataacgatccttttaacataaaataaatatcctattaaaatatatccaatgttatatttaataaaactaatataatattatatataaatgatgctaaattaaattaaatcaaaacgagttataatagaaaatagaaaacagatgaagtatatatatactctatactgcgcgggcgtatggatcgccggagtcgccgttggaaaactacatgcgtgaatgcgtgattaaaagtcggcatgatccaccaccgcctgcagaaagaacaaagcacgacagatggtgacttgtggtaaagagattctgtgaaggggaaggtttaattttatgctgtcaattaagtaagtctctcatcggatgggctaaacagtcaaagaataaaccaaaatttaaattttcaaacttaattttgagattgattttgagatattttcaacgtagtttctttttcagcattgacttttaagtcaccaagaacatatatataaaagttttatctaaaaattcatttttattctctaataagccgttttggcttattagggaaaaagccaaacgatgagagcctaacctttcaagactaaaagaaaaatattattttagcagtatatagtttatttttctcttccatgatgttaaacccaagtgtataacagataatatgatcgatctgatggcgtctagaaggctcatggacaattattatatgctgctttttaccatacagtatattgggatcacggtgacctaattttaaggacttttttgaaactcaagaattttataagattttcatagagatccgttcgaagcaagtaaatgtttttttcctatagaagcaccgctatgatcttataagaagcagctagtatgtaagtcagttgaaggaatatgagaatctgaaaaaaaaagttttttcacttatatttctagtttgttatttcctccatcccaaaatatattcgtagtgctagtatgtggcacttcttataccaaaatctcttatatcataaaatgtggaaaatagttagattctataactactgattcctagaatcttttgaggacctgaagatttggaataaattacaggcgtaagaatctgcaataactgattgtttagcattatgaaaaacaactgattggtcagcttctgtaatctgcaaaaaatggctttttatcttctctcttctagttcatgaatctcacaaccacatattctcaatgtttaggtataactttatttcttcgagagagctaaacattttgagagaggcaatacttcttgagaatgctacatgctgggtccccttgtcccctgcctatccaaggacgagtgagctgagcaacaaggaggagggtgcccaccggcgaggacattcgacgtgggccgggggagaggacctgtttagcgagaggacgtgaccaccagcgacgagcactagcatgggggcgtggacgacagtaggctgtgtggttggcgacggtagcggtggctacttcttccctgggtcgccatggccgcgcgcgaaggtggccaccaccgttgtcgtcagcggatccagcagagggaggataggaagcgccatcgtcaccgccgctgcgccaagtgaggacggccagatccttctccactgatctcgattccccacggcagcaacgatgacaaaggctgatggaacgtgtagctggtactgatggataccttgtcagtattgtttgatacctatagggatcgaccggtgtcagtggatacctataggtatcatctgataccttgtcagtattgtttgatacttggtaggtatcagatccaggattccgtgtttcgcaagccccatgtacgcaagaagctttccaaatgcaattcgtgcattcgttagggcatgagcaacgtatcttgtcggactcggtagtaacgtgggcccaagatacatgtgatagtagtatatgaacttacccataatatttattcgtgtgagtgagaagtaaggtagggtccacttaaaagttgattcctatgaatggtgagaaacaataatttcatggttccttatactaatattttacttgcatgtgtcagatttactgtacaaataatgatatttatttcttatgttgctacttggtagcaagagtgcattcaatgcttaatacctagtttttcatcacattgtggatgtccttagagcaagtttaatagtatagccaactattagctccaatttatctatagccaatctaataactcattcatacaatagttacatactacactatcaataactggtcccacctgtcatacacacagtgtcttggagttcgtattacagctaactacaaatgtgtagcccgctgctcttctctccttatttatcttcttaaaatatgtttggagctgcctcctgctatttaatctgctcttaggcatgctgaaaattgaaatgcaatgaccggggcccacgcgtcagtaacggattcccacgccctcgcgcctcctcaaataccaccacccactccactccgctttccttcaacattcgcgacgagaagttcaaaaaaaaaaaaacattcgcgacgagcatccgatactcgccgccgccgcagcgcgcgccatgccgctctccgcaacggatgcggcggccgccgccgtcaagccgctgccgcgtgcgctctcgcttgcgggggcggccgtggcggcggccaccacgtcgctgatcctcatctccgtcgtcgtctcccgcgcccaccactccgcctcctcctcctcctcctcgccgccgccctccagcagcgcctccaccgcggcgccgctgcccgcgccacccaccccgtcgcccgtcccggagcaccttcaccaccacccgccgccgccgccccccgttccgccgtgcccgcccaacgccacccacgttgtcccctgccacgaggacgacgagctcttcggggagcgccactg

SEQ ID NO: 5829 - DNA, 8271 bp, Oryza sativa
gccgccgccgccgcccccgcacccgcccgaggacccgccgcctcacccgccgcaccccccggaccacccgccgccgccgccaccttgccgcgtcccgccgcctcccgggtaccgccagcccatggcgtggcccgcccggcgtgaccgcgcgtggtacgcgaacgtggagctcccgccgctggccccggccaagctggccggcccccctgaccccgtgcgcgcccgcggcgactggctggtgttccccaagggggtggggacttacgtcgagcagctggccggcatggttcctctccgcggcggcgaggtccggaccgcgctcgacgtaggatgtggggtaaggctaatccaatcatttctacgagctttccgtttcatatccgagacgttgagatttcaatttgtaggggactgaactgaactactgatagtgaatggtacaaagtacaaacagttaattactgtcacctctgaagttaaccactgaatcaagtagtactgaaaatttcagtgtcaaagatgactctatcaagttaaaatttgactaccgaatagtgaatttgaatgtgatgtctgtctctgtgctacaggttgcgagctttggagactacctgttgaactatgggatactgaccatgtcaattgataggagaaataggcataaagcacaagtgcagctcgccttggagcgtggtctgccagcgatgatcggagcactcggtgttcgcaggctgccttatccgacgaggtcgttcgacatggtgcactgcgcaggctgccttgttccggggaattctcatggtaggacatgaaagatacatactctgtgataattcttgatatcttgttgatcatgaaactcgtctccatgtatagcttttgattggttgcatatatcaatagctttgaaagttggcagatgttgtcatcagtgagaagaattattgtgtggtgaagtgctttagtttgttctcattcacctatagctgatttcagatgaactctacatgctggaaattgaccgtcttctccgacctggtggatattgggtattggctatgccaccaatcagctggaaaacacagtatgatgatttgaaccgtacagccaagggtatgccaggtgaacaattagctttggaagagatagtgaaaaaactttgctggtcgaaggtttcagagaacggtacaatcgcggtttggagaaagcctataaatcatattcaatgcgagcaagatgctaagctcttgaggtcaccaccgttctgtacaggagatgatgcagacagtgcttggtaaagttttcctttccaccttgtagctctgcacaattttattttctgttatctgatttgtgttaccatgacgtctgtctatttcctagtcatctattgctttcaggagaattgtccttgtaaatgttaattctgaaaatcagtatatagtatctggggtattttaggagagttaaaaatttgaccagatcaaagtttatcttaagttgcaccatgagtacgacgtccaagtaagagtattagcacagtaccagtgcacttcacaaggagcttactgctaaatttatgaaaataagaagagagaaattggttactgtagtagtatataactctatcgactatagattatattggagaattgcccattcaattcgtcagttatgtaaaactcattcataacaaatgcattttgattatattgcaggtatgtaaatacttcaatgtgcctaactcgtcttccaagagatattgctggtggtgctgtggagaagtggcctgaaaggctcactgccataccaccaaggatagccagtggagaaacaaaggggatgcccatacagacatacaaacttgacagtttggattggaataaaagagttgatttctacagaacatatttgaatttatctgatgggagttacaggaatgtcatggacatgaatgccggctttggtggctttgctgcggctatgtctgaatatcctgtttgggtcatgaatgtagttcctgcaaatctgacggacaatacacttggtatcatctatgagcgtggcttgataggaacatacatggactggtaagttacagatcagattttgaagcgttatttctacttttacactaaacataacagatagctcaccatcctgaatcaattttcttcttttcattgtcaggtgcgagtctttctctacttatccacgtacatatgatgtgctacatgccaatggagtattcagcctgtatatggacacgtaagtgacgactcctatcaagtagtaactcaaattgttctcgttctgagagaagatatcattcagaaaagagacatgacatgcattgctactctggcatgcaactcctctggctcgcttagcttgatagtgccaaaactaatctcaatgttaagacgtaccgattcctttacaccaatctttgtgttgttcaggtgtggcatcccttacatcatgctcgagatggatcgcattctccggccaggaggtgctgcgataatccgggacgcgcctgatgtggttcacaaggtgaaggatgctgcagacaggctacactggcacagcgaaatcgttgacactgagaatgggggcctggatcctgagaagcttctcatcgtggacaattctcttccattcccagatcaccctgcatgatgttgataatttccacatcttctctgatcatcatcttcagaatcagaaaagattgttcttggatgcttgtatacatgcacagatgaagagtataagaggactctacacgcaatagttacatatccagatgaccacatagccgaataatccaatgtatttgagctgtttactccactagacactgtcagattccaataaaccagtataggtaacttaatctcctgagctctgtgttgttcccagcatggtgttggatgtgcagagatgcaaccatgctcgattctgtagagatgtagtatctaattgctctgcatttgtatattgtatactagctgtgtattatcggtgagatttctgtgaaattccttcagagtttgccttgctttgcttgctaagcaatggcatgattcatgtatgatgatggaatctgtagcctctacagttttgctcaggtacttccaaatttttcaggctaaaggatgttcaaaagatgcctatgcttgtttgggatattgtacaagtaaagtgaagctgcagctgatcgaatatggacatgatattttcgcctctttattgaacattgaactgaaaagtttgagcttactacgatggcctctgctactactgccgaagtagtagcaacttggaatgactgaatagattaattaatagcaattagtactagcatgcaacatttttgcatgagaatctggaaaatgtattaatcttgtggaacacataatcccctttgctaatatgatgctggaaacatgtatatttatttggctatctatattcacaacacacaaggtaggttaccagtacagccaactgctactccagggccttgatccaagttaagcagctgaaatgtgtatacagtcagcagtcagcaccaggtgcttcccataattcatggctataatttatatacaatgaactggggtatttccttccaatatagtagtataacataaacttattattacatataaacgatacatatataatcaaaaggcaccactggttcaacgaaccacttacacttatatctctacgggtttctaaccagaaagcacactagttgctgttgttatttttcatagttgcacactagttggctataataataataataaatatagttgctgtttttttacatagttgcagactagttggctataatagtaatatagccaacacgcccctataataataatataccgagctaacactgcctgcttcttttgccacaaaacttgttcgagacttcctccacagtgagatccgcaaatttgtttgtacctagtgtgcatttgcagcaaccatattttttcacctgttcagcattgaacttttcgacatactggacagtagacttgaatacctcaaagcgataagccttctctgcctcgtctttgtaattacggttgaacttgttcatccactcttggaatctcaccttcagggcctgctcctcgtcttcagacaccttcttggagccctccatcctctcatcactgtcgcttgtcttcagatacttgaaagcttctgtaattatgaggtatagtagacatttcttgttaattatgaggaaacaaaaagagatttcacttcaggcaaagctgtccgtacctggttcccctgcagtgtttgtggttgccatagacacttccattgtgttaccaggccttaataatttgagttcacgttcccctgaaggcaccctgcaaaaggtaacgaaaatggaacatagttaaaacatgtagggtaatgagtgatgaaatgctagatttttttcttttgctctaacttttctgttcgtaaagttgattgcacagatcagaaaataatagacagagatatagtaacttcttttttcatatttttgctctagcttactgaatccttaatcgcttgggtctttaacgacgtgttggcttgttaagggcgttcgtaatggtaccggtagcaaataagggacagtttttgggtccgcttggcacaacttttcttaaaagctgcaattgatatttaaatttagaatttggttttaaaaattatttcttgaggttttcctttgccacttccattgcctagctctcttttcatgattgatatacatatgagtaaaacctacctaaaattagtcttaaaaaacacatcaaaatttgtcttttttaagaaaatgtgcttctaaaagttttccctccacaatatatatcttttgcctatataattaagttactctcctggttcagtgaagatctaaccatcatggcaataacttgtgggttgaagatggcgtgtgtgtatcacatcataacttagttgataatcattatatgacaataataggaacgccgaccaatgcttttagactcatggttattgcagggtcctcgaaagaaagaaagaaacatggtgtaatgaatggcagaagcacgtcggaagctattctccatggtttagcttatatgttctcaatattgcttacaaacagaaacatctcaataaataaaaataagtactatgctatgagaataatcaattctattgctaaatgcattctggaaaacatcaatcagatttattttagtaagtcatgcgcacaatctctctttctctgtggacattgtatatttgtttacattcgaccaagatactatctttcagttagcaggacatgaacattaaagggaaaaaaaaatcaatgcaatggaaagaatggaaccctgtgcttctgtacttgctgtttataataagtttaagattataaaaaaatcctgtcataaatagccacaatatcgtaattataatcacctaatcgcacagaccaatccaaatcatgacacatcaatacaagccatgacgaccggtggacaagtcaagtggcaggctattgtaccatcgttgattggtggactcataagcatcaattactactccctccgtccctaaatgtttgacgcctttgatttttttaaacaaatttgaccgttcatcttattcaaaaaatttaagtaattattaattcttttcctatcatttgatttattgttaaatatacttttatgtatacatataattttatatatttcacaaaagtttttgaataagacgaacggtcaaacatgtttaaaaaagttaacggcgtcaaacatttagggacggagggagtattatggctgtgtttagttcagcgcaaagtttggattttggttgaaattggagatgatgtgactgaaaagttacgtgtgcatgacaggttgatgtgatggaaaaagactgaagtttggatccaaactttagatctaaacacagcctatgtaaccataacattacataggaagagttgagatatcataacattttttactgaaaagactaggaaccaactgatcaatggtttaatagaacatgattgagcaaaatcatataggtttcacatcaatatttacttaatttgtgtaaattgtagttaagaaatatagcttcttttatttttaacagagtcagcaagaagggtaagtagtaccttagaaaagagccctgcagccttgtggttcttcctgcgttgtaagcacggccctgaaaatcatactctcagtaaagtaaaatcagtcaattgaacatttggagcgggtttgtgagagtaaataaataaaagaaggcatacatggaggagaagacttgctgctctgcgcagaatcctcatggagaaggataaggatggatgctagatgacctaacaagaagacgaattcaaagattcagggcctattcagactgtagtcaaaataaatattactaaatattgtcaaaattttagtaggattttttatatatttatcaattttaacaacaaactaaacgtagccaaaattttaacaactttataaaaaatagtatgattaaaaatagcatcaaagtgaacaggtctcaaataggaagggaaatcagattcgacttgacaaatgaacaaaataaacacgccctaccagcagcggagcggatttggttttcgagggaactctgaaaggcggcggcggcgatggaacacggaagacaggacgagtatatggatgagatatgggccttttagcaaagtgggcctttcctttaagagttataaaaggttcactttggatccctcaatttgtcaccgagttcgaaattcatccctggaccacaaaaccagatatagcgtattccccaacttagaaaaccaatgcaatgacaggtaagctcacacagaaaagtgacgtgtatatctttggagttacagtattctcttggaacttctgacagggagaaacccagtggaccatacaatgcctagagagggcagcagagtttggttagatgggtaatgttcacatctatttatttttcttgttagatttgcttgatcacatctgaatatctgatttaattaacaatgtcaacaactaaggggggtgttcagatcccggggtgtaaagttttggcgtgtcacatcggatatacgcacacacatttgaagtattaaacgtagactaataacaaaacaaattacatatttcatctgtaaactgcgagatgaatttattaagcctaattaatccgtcattagaaaatgtttactgtagcaacacattgtcaaatcatggagtaattaggtttaaaagatttgtctcgcaatttacaccaaactatgtaattagttatttttattgtctgtttaatactctatacatgtgtccaagtctctatctctctctatatatacacatgagtttgacgagtcatggcacaatccgagacgcacctgacctgatgtggttcttcacaaggtgaaggatgctgcagacaggctacattggcacagcgaaatcgttgataatgcttctcatcgtggacaattctcttccattcccagatcaccctgcatgatgttgatgatttccccgtcttctctgatcatcttcagagatattgttcttggatgcttgtacatgtacagatgaaggaagagtataagaggactctacacgcagtagttacatatccagatgaccacatagccgaataatccaatgtatttgagctgcttactccactagacactgtgtcaaattccaataaaccagtacaggtaacttaatctcctgtgctctgtgttgttggatgtgcagacatgcaaccaggctcgattctgtagagatgtatctaattgcgctgcatttgtatattgtatactagtagctgtgtattatctgtgagatttctgtgaaattcctgtcgggttcgccttgctttgctcgctaagcaatggcaatgattcatcattcatgtgtgatgatggaaaccggtgaaatgggttgcatgtacttgtcttctcttaatctcttcatctaccaatcgttggacgatgtgattgggtgatgttcttgcttgtcctttcgtcctctcaaaattccaatttttccccctttgcttcgtgcaaaggacatcataactggttttgttagacgcacacagtgctatacatctccattctccagttctctgctttgcttattctattacactccctccgtccctaaa

SEQ ID NO: 5830 - DNA, 8841 bp, Oryza sativa
  unsure (1)..(8841): unsure at all n locations
ttcttatcttggttggggagcctaatcctggccctgtagtcagtcttgccctctgcaaacaataacaaatgagattaagtacatcaaaacctagctatattacaagcacagaatgcatgagccacatgaaaggattatattgaacttacgcctccgtctcttgaacttgacttggaatcgcttgaagtaggcatgggtcttctgggtcttgacaaaccctccctggagagacattatcacattaatacaacagcataaaaactgaaggcaagcaaacatgtgaactagacttaaatttgagaacttcctaaacgcatatcaaaacactgcagttttatcatcatgcagtcagttaggatagcaaatgtactgcagcaactacacgactgaaccatctaaaatccaatatccaaaacacataaatctctgatgcgtaggagtataactgatagaactagacaagcatgtgaaatttgtgctggttgtagcaactagatagtgtttgtgacatctagtatacttccactacagggatgtggcaatacacctaagtggatctactgaacaaaacaatcaatatggatgtcacgaactactgcagaatgttaccgcaaagagaagagatgctagcaaccatcaaatgggaagcacgccgaccgagatggcacaacacatcgtcgtttaagcaagaaatctatatgacgccatagatccctaccggatcgaaatggatcccaagaacccagcatcatatccatcgccacaaacgcaaaaaacctcgcagccgctctaccaatcacccacggagctaccaccacataaaaccttcacgaaccaaaccgcaacgcggcgaatcgagaacgaaacagcacagcacagcacgcagcgaccgattcgagcacgggccgtaacgaggtagagaggatggagcagaggatcttaccatgtcgctcgcctgctgttgctgctccgctgcggcggcggcggagggggaggagcgaggagaagggagaaggtgggagaaggaatggttagggtttatagcggcggctgcccacgagcccttttatccttcctctcgaagaaaccctagtcgcgggagcgcatcgggcggacggatgcggtgcgggagatggatcggacggctcagatcgtcttgaggggttgctctccgcggcttgatgggcctcagtctgtgaggctgggaaaggaaatgtttcctcgttaccagcccaaataaatttgcaggccagcattagtcccatcttctacgaacggatggcctgcaggggattggcgtagagaagaacgaaattcattttatagaaggaataagttcactttacatctctcgtatcttcgacgccgagttttaattatgtttttttaccataataccaaatataacgctcatcttttaacttataaaactggtgtgaggtccaagatagtacccagttttagctgatgcaacgagtgagccacatttgtcatcggccaactcttgttcttccccccccccactcactctcttccctctcttccacatctctcatactctcacctagcctcgagcgacggcgagaagggtggataccgacttggagagggccaaccaacaaggtggactaacgggtgagcaacgagtagcaaggagagggacgaccgccgacttagagtggggcagtgggtgcggcaaactagaaggacaatggtcttcaaactagaagggcagggagcagcattcttcttcctctcttccctatcttccccatctatcaccaggcctccgagcggcggggataagggcaatcgctgacaagccacttgttttgtatggcgcggcaaaaggcaccactaatggatagcgtcgcataggggggggggttggggacaaccccgcgccggggcagcttcaggttggtcatcggcggctatcgtgctcgcaatgcagcccaccctgatcgcctccacctcgtgaccatggcctcctgagtcccgaggacacgctcgtcatcgtctagcacactgcatacctccactagtagtcaacgtgctcctgccagctcatcctcctcgacatcatagaatttcagccccccgaggtgggccgcctccttggaaaccttccacggtcaagctcctgcgctcatgttgaccaccagtgtctccctgtcgctcgccgccccccctcctggcttgaagaggattggggaagagaggggagaggagggagagagaagaaacaagagtgggttgttgacatgtgagacccactcgccacgtgagttaagattgggcactatattaccctaggacctcaggtacacctattttgcaagtttagagacacgctatatgtatctagtatcacggtgtagtgatgtaattcaaacttgacgtatggagatctaaactgaacttattccctcgtagaatgtagaattggatgggctaatgactttggcagtcaaaaactcgttgaattgatcacctaccgtgcatttgcatttggtttaagggatgggatggttggcttggatcgagtatatttcttagcgtgtctggtttaaattgttaaatacacagttttgccataaataaattgctaaatatattatagnnnnnnnnnnnnnnnnnnnnnnnnnnnnnnnnnnnnnnnnnnnnnnnnnnnnnnnnnnnnnngaagtggtgtttttagttgcggacgtgtgagtaaacttccttgggagaggaacaacaactcaaaatggttgctagtttcgctaagggaaaattttcatcaatagtctgataacaaatttagcgacgtatctatagtttcgcaacagtttggtttaaaacaaaatctacttaaaaaaaactcaaatagcaaaatgtttgcccccctaggattcagaaaccagcactcgtagcccagtggatggatgatggactgtgagcagcagcagcaacaacgaccaaggagctagcaaagcaaacagcggtgaaaacgaccgggggcaacgaggcgtcgaacatgtggcgcggccgcgcggggcaagcgacgcgccggggtcccacgcgcgcggggaagaaaccgaagaatccacgagcaccaatccgcgcaatccccgcctccgcgatcaccaaatccgccgtcgcaccgtctccactcgtcccggatcaacaaaccgcctcttccacacaacacgccacgccacgcctcgccgcgccgcgccgcgacgacacgcgccaaccaaacgggtggcaggcaggcagcagcgagctgctgatgccgctgccgctgccgctgacaccccgcccgcccgccgccatgctgctccccgtctgctccgccgcgcccacctgctccccgctctgcccggtacggaacaaaccaccaccgcgcgccgcctccgccgccgccgccgttgtcgttctggtagtcgctaatgcttctgtttggttggctttggcaggtgacgtcgtcggtggcccatgtcgtcggcgcgccggcgctacgagggagggtggtggaggtgagcgcgctcaggtcctacgccgatccgctcgtggcgcggccggtgcccgaccgcccgctgctcgcggactcatccatcctctccccctactccgcgtcacccgacgacatcgtgcggggcctcgccgccgcggaggtgcccagcgccgacgccaccgcagcaggtgacgcgctctgctgcggcggggtcgagccggcgacgctgacggccgtctccgacctcgccgccaccacggccgacgcggccgtcaccgacgccgcggagcgcgccctgcttgacgcgccggtgcccaccacgttcccggccgacgcgtccgacgccgaggccgccttcgcgaggctcatcgactccctcgggaagaagatcttccaggcggaggacgcgctcaccgaggggtacgacaagctgcggctgtcggcgtaccagtcgctcagcgcctggaggaagtccgtcgacggcgcggttggtggcctcacggcgtcggtggacgccaccaagaagcaggccgccggtggggtgacggacgcctccggcgcgttgcaggacaaggtggccggagctggcaccgtcgccgtcgatgtccttaggaaggctattgttgctgccgaggattcactgggcagcgcagcaacatccattggatattactatggatcaaccaagtcgtcgttgccaccgaatgtgaaagatttgctgaactcctccgaggagaaagctagtctagttctgaaaccgattggaggtgcccttcaacaggtaaatcagtggcaagaattcagctcttgttcttggtatgccagttagcattttactgaaattgctcaatctgttgttgcctgctatgattcaggtatatgtagtcgtcgaaggtattgaaaagaatgttggtttggacccaagtgatcctattgttcaattggcagttctgcttggaggttcaaccacaatcgggtaaatgagattttctctttgccatttatagctgacatgttcataccaaatcttcttcttaatccctgctatgttgcaggttaacttactggctcttcgcatacggtggctattccggagacttgtcacccgaatccacactagagctgttgagaaatgatgacaaagccgtacttattgatgttcggtctgaggcaagagattgtaaatctcactggcctattctttctttgatgtccgttttcatcttttatatccggtccatgatatattctgcaaaccgtagaaaagataatattgtttgttagccacctacatgcctttgccaatgtagaacagtttgttcctgccaagccattcagtacaaacatttttagtactgtagcactacaactctttgatgcgtttcctctagagcatgagaatataagcttacatgcagatgtacctgaacttcaagtgtttgattcatcattagtatttcaaaagcaactgtaacagcttatcatggaatcctttttgtaggacttgagagtgaaagatggaattccggatctacgccgtgcagctagatctaaatatgcaactgctgcttcacctgaggtgtgtctttgtttgaacttggagatctgaagtgctaccagccattgattgctggacagtttatatgtctacttaacctgaactcagttccaattttttatgtatatccgtgaggattgaagtgtatgcaatgagttctttttgttggaataatgttaggagttgttttcattctagaaaaagaaaactgagaagtaaacttatgcaactctagcagcagtcagccatttcaatttcaaacgggtgagagtacaaaactgattttgcttactgatattaagttcacatatttttctttagattaaaggttcagtaaagaggctacttaaaagtggaagagatgttgatgatgcgttgctcgcagttatcatccgcaacttgaagttggtcaaagtatgatgtttgcctgaacttggatttgatatcttcagtctaagatttcttcaaaataagtgaagtatgttttcaatcttcttttatagggtgattcaaaggttataattatggatgctaatgggagccgatcaaaggccattgctaggttactgaagaagcttggtgtgcaggtaagttccaatgcagtttctcccaaaaatatttcattttcactgatccgagtcctgcctaaatttgactgttttgatggcagcgaccttaccttgttaaaggtggtttccaatcttgggcaaagaaccttcgagtgaaagaattgaaacctgagaccgcattaacagtaataaatgaggtaaaaattcagacaaaaacctcatgtttgaatgaaaagaagcgtataaggttttggtcacaatttttctttgttcctttccaaaaatttgtatgtatcagcgttgaatactacgtagaggtagcactttttgttatcactatgtactattaacgtcgaaaactcacaatattgttttgaatgtatgcaggacgcagaggaaatccttgaagacataaagcccactccaacacttgtccttggatctctcctggtacataaacatcaattggtctccttttactttcttttgcctctgttggcagtcggcacactgtcctgtttctctttgattattggttccattatatttttttaagaatggttcttttaaaagttgtactgaatcacgacatttctccctttgtgcatttgaagccttacgtgcaatatttcttcctttctaaatttggttcttttgtgcagggcctctcagcagcagcgtacgctttgctaggtaagaggggtaggaaagcattaagtgtggttattgcattgctttgctatacattaaatatattgcaagtcatatgattttcagaacagtatgttctcttgtcagagataagggctctttcatattctctctcttttttattttgtcctgctctttggagctcctaatggtctataggattcacagttatgcaaaaagaggacaggtttttaatctctctcttttttttgggcgggctggccgaaggaggccgagtaatttcattaagatttggaagagtacaagttacagaaaaacagcaacagaacgctgttgaaaatagtaaatttttaatctcagtgtcagtttatcaacagaaagcgatgctgcattcacaagtatgatattttagggaatttgagaaggcatttcttagtggagtgtttgcaggtcgctttaaacaccattttgaataattcataccctgggaagcttactggattactaggagtcatgattgtttttatttgtcattttacctaaatgtgcataattgatctttttgactggatgcccatcatgggtatgtgctattgaacttttataacctagttaggaaaagcagctataattcaaccgtttcaaacttgtattcattttgaatatgcgattaattgatattgataaacaactgcagaatgggaaacgactctgcaatacataggtgttctaagccttggtctggtaagtattttccattttcaaactgtcggtacatatcatatattcttctgttcaattgcctggaaagtaaagcaatacagctttgtgccttttatattactactcactccgatccaaatatcatggcaagcggaaacaacacagtttacatgacattcttctactcttgtagactatctatctgcgattctctacgtacgagggttcagaggatctggagcaagatctaaagtaagtcatcctagtatcatccgttctcgtggtgtgcttcttttctgtagtacaaatttacagctcaggtgctcgaaacctgccatttttccaacacatgacaaaaaaaaaaaaccattgcaaatttacaagttccccttactcctctccttgtgattgcctagactgctgctttccccgttaagagtaggcgcggaggcgttctcgtgggcggccaagaagctggagccaagcaagattggcttggcgacttccccctccacgacggcggtccaagaccgggttctccaggccgccgcgaagcacgagtcgcagccgtctgacgccgaggcagacagtttggtctctgaagcgtgagagtttcaggtttcagtggccaatgtgatcccaatctgtgcagctgagtgaaagtcgttagccagtagctacacgcccagtaaattctgtggaaaaatttgatgttttctcatgtagttgattgatctgagctactgtgagcagccgtggtgatgaaccggcactgtaaatttttataagcagcgttcaacaataatgaacacatgttagcacaagatgatgttaatgttgtttcacttctatgtggagttgatccgtggggcccatggtccagacagtactgtactgtagtctgtagattgatccatagcgttgttctgacaagctccacatcagaagcattttttaccatcgtagattaaattttacaaatctatagatatttgaacaacctttttctatggatatctttcgatttctggtctgccagagataaaaaacacagaaaactgcaagaacggggattcgatcctaggaccaactggtcgcacgcatcacgactcaaccaagtgagcagttatccaaacttgaattaaaacaaaaattacacattacttaaactgtaattacatagaaattacgctgtaattacatataacttacactgtaattacatttgaaagtttttttctaaaaaatctgtcgccagaattttagatagtccctttgaacaatctatcacaatttacagaattaagaaactacagatttaagaaagtgtatataagaaaatttatcacaaaactatatatttaaggaatcataatagaaacatatagatttaacattggttttatcacaaaactataactttgataatctcaatagtgctatggatatagactctaaaatctgcagttgtttgacaactttattattaaatatgtagttgtgatatgatgttttaaatttatagctttgtgataaatttcacgctaaatttgttgatttatgatacccatttttaattatatagttttgtaaaatttacttgaaatttattaatcaatgaactaaattactccctcgagtgaaaaatttttggcgctgggatagctaaaacatcaacatcaaatgaactgtgatgacaaatacttgacgttgggagaattgaggccggagagtatgcctaatacatttgcatcaggaattcaggacacatacagaaatacagtgctgcaaaaaaaaaaaagaatgaaagaaagaaagag

SEQ ID NO: 5831 - DNA, 18565 bp, Oryza sativa
aaattattttctgctgtgatattatttactgagtttcttccattctccagtaccatacggcagcagttgatcagcactgaggatataaggcgcattcgtaaaaaggctccatgtacccgttccgaaatatggatgatcgagaaaggttccttagaagatgatatattccatgagcccatcttttcctgtaagctacttaaattggtttttattctctgcttcctctttacacatttactgtatgttcaattcaattaggaaagaactgaaacagaagtgaaattagttttgatatatgaggataattagtggttagttttatgctctgaaattctactgatgcatgtttgtgttcccaactaggcatgtgcaaggagctaaacgatttgcaatatcggacctatgagattgttgctcatcccaccattcataatatggaaatacatgtacggctagacatgtcccaaactatggcagatggcagcaatgatgttggcacctctggcgcaaaggacagtggaaatcaccaagatcatgtagtgctaccagatggagctgagtcagatgcgatgcatcctgaagcaactgatgcagcagatactagaactgattttgattcacacatgccatctgacaaacaggttaacaatgttgaaggagtaactgaacaattaactgataatgagaaagaaactgcagttgttgagaaagcaaccactaatatgggtgacagtgctcaagttgattcacttgataaggaatatcttcaagatgttccagctgatctgcagaggagcacaaatacaaatacacctctgtttgtgctagatgacatgcctggtccagatgtggttctggatagctctgatccagtttctgcacaagcagtggatgatatgaaaggggagttgagtgacattgtccatgacaatgtcaatgcatttgacaataaggatatgccgacttctgagattaccgtactggaatttactcaaaacgcttctggttttcctcagccaacagaggatgaaaatgttctgtccgcaatgggtgaaaattctggattgcaagaaaatcatgtaggatctgttatggatctggacaatatggggcatgacttttcactaaaggaatgcagtgtaagtccatatagaagtttccacttgtcttcagacacttgtcagatgacttgtgtttctcttaattccacaatgtagcatgctatacagtacttgcactattttattcagtcgttatttgaagtccatggcataattggtatgctgttcacattgcaggattttggcagtgcgattcagggtgttgacacaggtattgccttttgttctgatacataagtgtaaactagtgtagtagtgttctaatataatgtggattatgtgtacaatgctttgtaggtgcagcagaaaactagctaaatacccatgcacagattttctaataaatatatcatcagttcgaaactcaaaaagtgagcatatttatcctgagaatcatatgtaatttgcaagacgcatattacaatgtcaaaataaaaacaatcttattacaagacgcatgctcagatattctaattattcacagaagggtcaggctgactcaagaagtggcggtgggatttcagactcaccataaccaccattcctaggttcttttgtattagtagaaataaacatgacattaaccttcatgactagtgcaatatccgttcttaattgtattttatatgcaaattttgtgatgggaacttccacacgcccgtatgtgacactggtggatcttactgttctagtgttgcatcgcgagaggtttataagttttatgacttgtgtcatatttgtactctacactttcagattttctgatgtatgatgatgaggtggactgtgatgaggctaatgatgatgagcctaatcctgaggaattccagtctcttgataacagtggatggtcttcacgtactaggtacgattggatttcgtgataatattctcagggtttaatgctcaatatttttttgagttctataatgagttgttacaattgctcttcaggggtgttgcaagatatctcaaaactttatttgatgaggaatctggtctgggaagaaagagtgtggccattgatcatctgttaagtggaaagactaggaaagaagcatcaaggatgttttttgagacattggtaagacggttatgcttttctgtttctccactcaagaaatggaatacctaccttcagctccagtgtgattggaggcacctagaattgcatgatcaagaatacgccattcattttatattgcatgtttcgattagccatcttctcattagacaatcttactggcatcaaccaatttctgtagtcattgtcaaactagacctgcaatggtagcttaaattgttttctcgaatcatttctgttgacattatccttggtacttattgtgttctgttccattcacaggttctgacaacaaaggacttcataagtgtggatcaaccaaactcctttgattttgtcagcgttaagccagggccaaagctcctgaagtcagatttctagatcaaaaaccagctagcgtggcgcgatacatacaatcttaccatatctgtcacattaccaacaacatacagatctcgcatcgccgtgaccgtcatttttgttttgttctttttaatttatcctccctctgtagtatccccgcactaatctgtgtttactaggcttcttgggtaggattctgttgtacccccctccgtgttggctattcagtgtatatatgattagctcttgtaaagttgcttgtgtaatgtgatagcatcagctcctaagtccccgtctattgttgctttgaataaaccttcaaacctgtatacttctctgactttgagcaacctgtcgattaatttcaaatttattcagattcgtaggtcaatcgtgagaaaagagataacctttttttgtttgttttgcctgaagtggaggggaaaggttgctcaaaattctgtattggtattatatcattacaaccactctgctggtgatccgagtcaccagcatgaacgtctgagtgaccattgagcaatgtggggcgtgtgattaaagcagctttgatccctttctagcacatacgtaaagtgacacgctgctgtgtgctctcgctattcgcagaaaatgtaaaagcatcagcaaatgcaagacagaattggcagagaataaggtgtttggaaaatggaaattcttggaaggatgacaagtattaatcgacggccaaaaggacaggggaaagccgaccagaaatgaagaacggagcagcgaatgtcggtgccgaaattgtttttatctgcacggttagcacagggttttcgtgtcgcgcgtctcactagctcactgctcatgaaagactgaagtgaagcctagcaagcattgccacctgacgagtgacgaccatactttgatcgatggatggatgtatgggcgccgcaaggcagtttgtcccattgtccggcattgctgccgattcctttgcctcgtgcgcgcggcatcctccaccaacaacgtccgcacgaattccacgcccaaacaccggcaattcccgtgcaaaatcacgcgacacatctccgcgaactcaacgccacgcacgcgcgcggacgcaaagccgcgcgcgcgagccacgccgttgccttgccaccacggcgattttcatggcgtcgtgcgcgcgagatgccgagatccgcctcgcgtgcccagcgccatcctgtcggctacagtacgccgatcagtggagttcccatgggttgatcagacggacggcgagcccgtgcgtgaacagtagggtgacaagccacacccagccagtcagccacacgaagtggcatatatctcgagctatagcctgacctgacctgctgtttagcttgttactacctgtagcgcctcggctctcaccaagcaagtgtcggtgcattgtttttttttcccttcttcctctctcaaaatataagagtttttatccagatgtgacatatcatagcacaacgaatctagacagagattatatcccgatttattgtattaggatatgtcacatctaataaaaaaatcttatatttatagacggaaggagtacctgttattcattaccattagtagtacaactcgattggttattatttcttccatgagaaatgtcctatatatatagctagtttggaaaatgtttgcttaaattggaaatatgagattagcttaattatgtgatcaaaatcgatgccctttgatctagaggtgtatatatatgtacatatgtgtaagcatgattaggcgaagaaagttcaagtgtgaggtgtaacctgttatcttattcggcggatgcatgaggcgcacatggcatgtgacgccgtacgccgatgttggttgatgcacactagcatggatgatgtgtgcattgtcctcattcctcctccattatatggctagctcttcacaatgattaacaaataattaagctataagcacgtccctcgtctctcaattccttccgatctgagcattttgtcaccacttccctgttccgtctaatttaatgacctaatccaagaccgtatctgggttagaaaccaacaatctcaacgtttcctctcaccttaaaagggtactagtacaacgatgtaaaattgtggtactactacctcttttcctgtcgtcaaaagggagatttttacattaattcccttctcctgtcgatcatccaactcatcaactacttttgacctaatattttccctttttttctctctttttttttccaatgtgcttgcattacatgattacatccatgaaggttgggctgtctgtacggcactcattcattcgttcctctcacaaacactgaagcctgaaaacgattgagaagcaacacaagctactcctagctaggaaggcatgcagacctaacataatccagcatcacttagtgggtctaataaaaaagaaacaaatccaacaagcaaacaaccatgcataacaaaatgctcattgccaccacaactgctctaatctcactgtctctctctttctctcctttctgcactctgtttgcttacaacacaagaagaggaggagggtttcggttcagcagtcggcatcaggctccatgcagagacatggatggatccatccactgtgaaaagggtagtatcgctttgtgattaaagagagcaggaacaaaagggcctgcgaaagctggcccagaaagtgccgatcgaatagattctgtcattaccagcagcggagtatcttcctgcagacatctcacatttgcatgccttctctggaaaagggcacgcgagtttgcatcgtcactgaacagctcgaggtttaccaaaccgttttgagtagggttatcgtcacctacggttttacggttatcgtggtaaccacgtggttatcgcggtaaccacgcggttatcacgatactttggttttaaaaattgaaaaggtggttttgtaaactctgcacagctcataacattgctggcttctccagcctctagtgtcgttgtcaacaagaacaacgaggttgattctgatttctgaaatgtgaagttgggtagtaacagcgaatcagcgatctgacatgcttgctcacttccatggtgattttctgagccaaaaaagagtgaactggaagacagagcgcccaatgcaaatagttgcagttttccgcgtagttaagagggtgtttgggaactagggactaaactttatccccactttagtccctccaaccagacaccacctaaattctgttgtgggggaacctagaggagcaagcaggagtgactcgtgagcaccgaaggttccaatgtaccagagttgcatgcatcggccggcgtccagaagcaaagacgatcgatcggctagaaaaattgaagttcaccgaaaccgatggccgttccatccaccacccggagcgccagaatttttcgtggttagcaccgtgaagaaaaaaaggagaagaaaacagtcacacggcgcagagcgacatgcgtccactcccccggcccgcggtgctctgcacctctgctcggcttcggcgaaggaagtcgcggtcggtcggttgccgccccacgtcgatcgcgcggagaaagaggcggaatcgcacggagaaattgcctccggatcacggtgttctcctcctgccccatcccgcacgcgcgcgtcgcgtcgcccagttggttcggttgatcacctgttggatgcggtgcggtttggtgagttggcctcgcgcgcatgagttgcatcgcacgcgcgttggctgacctagtgacctgacctgctgcgcgcgtgccatcgacttggtagcagttagctactactccgtgcgccgtgcatgcacgccaaggaataatgcatagggaagggaagggaagggaaggctgcaggctgtttgcggtgtattccctctgtccctataaaatatgaatctaggatcaaatatatttagatttatagtttaaaatatgtaatgtaggttagttttttttaaaacggaggaaatatgttttagacctaacgaagtataatagactgtaccggccggccggccctgcagctcacgaattgtactagtacgtgacatacgtgacaggaaagagatctacactccgtatatcgatatcataccaatcgtacacaggtaaaaattctgtatagtagattagtactactaccgagtagtctagtacatggtgccgtcctgcggatcgagcacggcactcgtcaacgtttatctcgagtccacatcgatatttctgacacaccaagcatagagcttactaatttaattactggtctctaggtgcagagacacagatcgatggagattaatccgtctgacctccgcggatcgatcggccttcgcgtacgacgcagcgaggagagaatcacacgggaaacttctgcggatgacggcatttcttccgtgagctaggctccggcaacagcaagtcggcaacagtgttaaactactcgttatacagtacacaacgggagtgagccaagtgaaggctgtgcctatccaccgccttgcagatcgatcgatcgatcgatcgaacgcggttaatttgtactcaagcctccaggtttacctgcagtctactactacgagaccgcatctgacaaagactagtactgtacgagcttactttactcatctcgaggctgcaaacttaacctctgagggacagaaagatagcagcgattagtttagtactagtactactccatagcaaagctaatactgcaacagtaatagtataatcaactagtgctaataatgcaccgtgctgatgatgtcacccagattagcctagctgaataattttccgtcatattatctgaacgccacgcaacgtgtcccgtcgacgcctgcgtagtacacacacaagacaagacagctctctcaggtcgccatggcgatcaccggccatggccatcatcggtctcttgactctcgagcagccgacatggctatgcacagcacagcacacagtgtcactgatctgtttgaaatttgtacgtacgtgcagtgccattgggtgtgtacgttgctgcaattaacggtcgggagtcaaaggcgagaagaagaagaagaagaagaagaagcgagaaaagccatctgacaaagacgatgatactgctgctttaggtgagtaaacccacatcattaagcagcttaatgaatgctctatctaacatgattattatctcatctcgtggcctgataaagtgagagacgaaagtcacatatactactagcagtattatgtgtgcgtgtcagtgtcaagagttatcatgctttagccggtaagagtggctatcttcgctagctacatgtatgcaagtatcatcaagctaatagagtttatatatattgctctagctagctggtccgtcaggtaggtcaagtgtcccaagcgtacgtacgccatagatgtgctcgtgcggcgaggtcgacgcacggccgtgtcgcgctccatcgttattatagatgcaccatcatatctctcgtctatttctccggcgatatgatgcgaccaccatcatcgagccccatatttccatcagattaagcagaccaaggcagcctgatgaacttgattagaggcaattacaaatttatcactgctttgaatcgttattgtaagactgccactagaaaattataaaagtactactagaactgtcattcaaatgacatccttacaaaattaaaaataaatgatagtaaatttgcaaatgtcccgattgattaggagtactaagtaacatcagaatttctgtacgtgctactgtgcatagctacactactgccttggtcattcactcattcacaatgcaattaaaagagtacttttccatattaaaataaattaacttcatatcagacatgataattctactactacgaatctaactaataaacacgactcgtcctagggttgtgttcgcttgaggaggatagaaatgcgcacggaaaatggagtagtccattagcgcgcgattaaataagtactagctattttttttttctaaaagtggatcaatatgaatttttaaacaactttcgtatagaaactttaaaaaaacgtaccgtttaacggtttgaaaaacgtgcgcgtggaaaacgagacgggagtcttgcaaacacagcctaggtttatttaacggcgccccgacctgcctcctccggtcctgcacggtagcctggtatgcacgggcacggcaattcaatgcacgcatccataatagatcgatcgccggcgcgggccacgcacgcacggcggcggcgtttacgccatatactacctcgagtgaaggtggaagaatcgcgtacatggggatcggatcgcctggatggtttgtgaaatccacgggagagtacgtactctatctactgtacagaccgcgacgccgacgcgtccgggctttttggcattggcaggcggacgcacgcagacgcagggcatgggttgatggagtacgtgagattcacacgcagacgcacgcggctccggcctttttttctcacgcgtcccacgttggggggctctgggacgttggactgccaacggatcccttctgtgccgcttgtgatggctgactgccgaggttttcattgccagtaacatctcactcacacactgcagtcgctgattaaatttacccaaaatttactacgagtactacagtaccacgacgactaataacaagtggaccagcaaggaccgtacaatgtaaatggagggggtaaaatcttgagtaattagatgaagaggagtggctatagctcgtggagtagtgtatgtgactggaccattgtatcatatcatccagtaacaaaaaaaaggaccatccggtttgtttgagtgtttcctcacgaactcgatggatccagccacagtcaaagctttcggctttcgtttgcatgcatgcatgcttgctcgatcgatcagctcgctacttactggataccaacacgtctcatgtgtctgccctgatttctagccggctgtttcttcgtaccctagctggaaatcagatgagctcatcatcctcaccgactaattatactcgcttccatcgcacatcaatttgcggcgacgatctgaaactgaaagtaccaattaattaacaacctatacatcatttatatgagtatattcctacgtgtgattgcatatttgtatatatattcagttgctaactcagaacgcaagcacgcttctagccaacaaaccgaaagaacacctaacatttggagacatctgaaccaaaaacgagctcaattttttacactccttaatatatataccactgatcattcagtccccactctaaattatatatataaaaaaacagttcttttcagagtacaaaatacagttgagttactagtagcattctgctcgtgcttgtgcttctccttccacactttgcctatgctctctcacttgtcttgcactcttctccaactaccctcttcatctccacattattaaacagcccaaaaaacggacaaagaatgagaacaaaaccaagcaagccatcaaccaccacctctctccctctccctaattaatatcttcacccttcactaatcacctaccctcatagtgacccttacttagctaattgcctaatcacaattagaaaaagaaacaaaaaaagcaaaaaaaaaatcatcaaaaagcagccaaaatactcctcctccatgtaagctgtatccaccacgacgacgtccactcctcttcttcctcctctcctcctctctctctcttctttctctctcctcgcgagatctgtggcgtcactgacctagcttgttcttgctagctgctgctgctgcttcggcggtggcggtgtgtgtggcaatgccgtctctccggcgattcttggagttggtggtggttgggattgttgtgtgtggtgtcaatggcgggagtgatggtttggaggttgcggtggcgaggaggcagctgcaccagccgttcttcccggatcagtcgtcgtcgccgccgacgccggcgccgcccggccccgctccgccgttcttcccggcgctgccggtgccgccgccgccgccggcgacggcggggcaggagcagccgacgtaccccgccctcgtgctgcccaacaccggcgccggtggcgcggcggcgacggccgctccggatggaggtggtggtggtggtggtggtgcgagtaagtccaagagcagcgcgtcgaagcttgtccctgcgattgtgctgccgctgctcacggtggccgtgctcgggctgtccatcgcgttcttcttcacgcaccggcgtgggaatgcggcgcgcgggggaggaggaggcggcgggtgcgtcggtggcggggacgccaagttcttgcacccggagagggcgagcctcttcgcgcgcgacgagttcggcgggagcggcggcgccgccgcgccgccggccgcggcgatggattaccgctacgtggggaacgccggcatcgggcggatggacgagaagagcagcgagacgacgtcgtcgggcgacgaggcgtcccggagcaccggcggatcgccggagctccgcccgctgccgccgctgctggcgcggcaatgcgggccgatgggcgcgaggagccccggcagcggcgtcggcgggttcgcgtcgccgtcgtccggcgacgaggaattctactcgccgcaaggatcatccaagatgtcgacctcgcacagaacgctcgccgccgcggtcgaagccgctgtggccgcgcgcgaccgctccaagagcccctcgcccggctcgatcgtgagcacgccgtcgtacccgtcctcgcccggcgcgacgatgtccccggcgcccgcctcgccgcctctcttctccagccccggccagtcgggccgccgctccgtcaagtcaagatccgatagcgtgcgcaccttcggccaaccaccggcgcctccaccaccacctcccttcgcgccgacgctgccaccgccgcctccgcctcgccggaaaccgccgtcgccatcaccgccctcctccccactcatcgagaacacgtcggcgctcagatccaccaccaccaccgacaccaccatcccaagaaacccattcgtacaaccaccacccccaccgacacacacccacggaccaccaccgccgccgccgccgccgcctccgccgccggtgggctactgggagagccgcgtgcggaagcctggcaccggaacgtccaaagaaacccggtccccggcgctgtcgccgccgccgcaggccgccagcttcaagagcggtctacccaccgacgcgttccccggccgcctcgcggacaatgcggaccacgccgccgccgccgcggccggcggcggcggcgacaagtcggaggagacgacgccgcggccgaagctgaagccgctgcactgggacaaggtccgggcaagctccgaccgcgtcatggtgtgggatcagctcaaatccagctcgttccagtgagaactccacccaaattcacaaccttattcagttcttgatctgtttttctttttgtctaaatcattttgtggtgaattctttgcagggtgaatgaggagatgatcgagacattgttcatctgcaatccggcgaactcggcgccaccgaaggagccagcaacgaggaggccggtgctgccgacgcccaagacggacaacaaggtgcttgatccaaagaagtcgcagaacatcgccatcttgctgcgagctctgaatgtatccaaggagcaggtctgcgacgcgctctgcgaaggtgaagaacatgatctttctcttaacttactcatcacaattttgccagtttctgatgaactgcatactgcattgagttggggatttttttgagatgtttgcagcagtatctgaattgatgataccttctaactaattggattcatttttctcgtggttcttggttgaacacacatggagcttgtgaatcgagatgtttgtccgtagaatttggttgggctttaaatacattgtctgaagaagtgaatgccagcatacacccgttggtggtcgttgctgaatttagccgtttttaagctgaaactgactagtaattgcttctggatgactgaattaggtgcatagagttatacctgcggtgaagatggttagagataccattgttctgatgtgaaaaccagtctttcgatctactagtattactaccgtagttgcttgatatagtattactacttctctgcacatagtcttgacttgggtgcaaataattgcaagatagttgcattattgcaccaagtttctagtcaagtcaatgagattgatccttcctatagtattatccttactaacgtggtaccaattcactgagcaggtaacacagagaactttggagcagaattgttggagaccttgctaaagatggctcctaccaaggaagaggagatcaaattgagagaattcaaagaggagacatctcctattaagcttggtcctgctgagaaattccttaaggcagtccttgatatcccatttgctttcaaaagagtagacgcaatgctttacattgctaactttgaatcagaggttaattacctgaagaagtcctttgagacccttgaggtgagaattatcgtttccgagtttcctttcatacttattattatattgacatcttacctataactaagtacatgaaacttttcttaacagactgcttgtgacgagcttagaaacagcaggctgtttctgaagctacttgaagctgtcctgaagactggcaacaggatgaatgttggaacaaatcgcggcgatgcacacgcgttcaagcttgatactctactcaaattggttgatgtcaaaggcactgatggcaagactacacttttgcattttgtcgtgcaggagattatccgaacggagggctcccacctctctgctagcaaccaatcaactccacgaactcaggcaaaccctttacgggacgagctcgagtgcaaaaagcttggcctccaggtagtggctggcctcggaaacgagctcagcaatgtcaagaaggcagctgccatggactccgacgtgctaagcagctatgtctcgaaacttgctggaggaatagagaagatcactgaggtgttgcggttgaatgaagaagtcaagtccagggaagatgcatggaggttccatgattcaatgcagaagttcttgaagagggctgatgacgacatcatcagggttcaggctcaggagagcgttgcgctatcacttgtgaaggagatcaccgagtacttccatggtgactctgcgaaagaggaagctcaccctttcaggatcttcatggtggtcagggatttcctctcagttcttgatcaagtctgcaaggaagttggcaggatcaatgaccgcacgatcgctagctcggtgcgccatttcccagtacccgtcaacccaatgatgccacagttgttccccaggattcatgctttgagagctggaatctcagatgatgaaagttcagccacttcagcatcatcaccttgatcaccagtagtctgccaatagaaatttttcgcagagtactgtgggaaacctccatagggcagagggagaccaacggcgacggggtgtcaaatttttttttgaaccttttgtacctgtagattatagaatgtaagaagtttttttgcaaatatttatttctatatataagaggagataaaatctagatcagaggaggaaataagcagttcatgtgtttgtcatcttcagtctgtacatgacacgaggtagtgaaacagcctgtacaatgtactaacaatttcaagtatggccagtctgcagaattcaaaggtaagctgaactcagatgtacttggaacagaaaacaaaatacattgaatcctagtgctggactgctggtggtgccaagaagaaagaatcgattgtgttttgtcaccatctttcctgcacaaatggtccataccacatacatacaaccatagactttacctgacaatttcatcattttacagtaaaagaacctctcaattacttcatactctgttcagttcagaaatttcactgacgctcaactcagaggctgacattctgaagccatggaaggctcaagtaatggctggattttcttacattctaacccgtttcaaaaaacttatttcacatgtagactccccaaaaaaattatcacaaaaatagacctagaactcaatgccagagtcctcggctcgatgatggacgtctcaatgccattctcgttgacgctgaggatttgggccagtctccatgcaacagatctcccgcaccatcatcaccatattcaagtctttgatgttaaaaatataaaaaggcaaataaatcatgatttatcaaatttccccacaaatttgacaacctaataacaaattaaggaaagtaaatcaagatacattgattcatcaattttccatgaaatttgacaccaaatcaaataatagggctcggagaggatgtggagaagagaggaaagttgttcataggtgacaaagggtcggcgccaaacaaactagcactgaccctcgagtttcatcgccaggatctttggcgcggaaacattccacttcggtccaatagccttggcgccaaattatgggtctattttacaataattttttttaaaaagtctatttaccaaatatgtttcaaaaaatgaccaaattgtaaaaaaaaaaaaccagcaagtaatggttcaatcaacttcccattttgagcatttaaacatacataatgcctgtagcttaactaactgaacatttcattttccatgtgagctagaattcccatggcttcatggcatgcatagtagaagtagtactccggggagagagagagactcaggcctcgtttagttctcaactttttcttcaaaccttaaacttttccatcacatcaaaacttttctacatacataaacttctaacttttccatcacatcgttctaatttcaaccaaacttccaattttagtataaactaaacacaccctcagactctcagagacggtggtttgggtggcagctttcgttaggtccccatccccatgtgagggtgacaaccatgccttgtagccatgcccacaaaacgttgtggcatggcgccccctttcctaccaaactctttccttgccattttgcaaaccccacatggctcactttgtctcctacaccttgtggattctcttctctaatggactcaaatcattggaccccaaagccaagaaaaaagctctttgttttggcctccaaacacacacacatggatcaatttggctgcaaatgagatgcatatgttcgtcagagactatgattaaagaactatgagcatgctaaggagaggaagcaagaaatagtcagaggtgatcagggtttgcatttcctttttgaaaataaacacgcttctcaccatttactgaaaaccgataaaaactagcaaaaaccaacaacttttggtaatgccatacgaaaaccagctaagattggtttccacaaaccatccattagcggtttcacgaaaaccgatctgttttatgaatcttggaggtgatactaggtcttagattagtggtagcagttgggagttggaaggtagagaggacccggccatggcaatctactggggtagaaaagattctgaattttggaaggagagaacaactgaacaagcaaaagaggatgaatgacaggtactgagtactagtatgatttggagatgtgctactcaattcttgcaatgacgctaaaccttttaaatattcctccgctacatcagtctcatgagttgcatgtgcaaactactgttagtaacaatatcaatgatgtcttatgaatgtgctgtgattgcactgtccatgaaagttaagcactctgaactctgaaggctttttgctgtgagctcttcaccggttgtgaatgatgtgtgcacaaaccataaatcagaaatcaactagagtagtaacatccagtaatatgtttattttttttcttcagaaacttcttaatcggggatatgagcctgacaggttacaaagatgtcaggtacttgaacagaaaacaaaggctgctaattaacttattttttgctgcttcagtccaagcagagctccttcaaaagaggcaattgatccttcagcctgaatctacctctacttgatctagctactactactttgcttttcacaagtagaaagcaaggcagcttctgcaccacatggcattcctgataaaatcagggatgctaacacaagaaaaggtggcatctttatcgtctaatcagaataattacgtacttgaaaatgttcctccattgtactaccatgcaatgcaaaattgcaaagaagaaaaaaaatgctttggcctgtcacgtgaggaggaattgcccacgaatcaaagctttttcatgcaccatggttctcacttttcgcaaagaagaaagttgcaaggtgtgatgccttgtttacgtaatctttaaagggaggcgtgtctcctgaacgggctcccgttcttcttcagatcagaatatataccagatcgagctatttctctgagatgctctgagaaaggttcaggtttgtgcatgaaccagagcaaaggaagccaaaaacaagatgcaagagagtaataaaaaagaagaggacatcttgggcctgcaaatggaggtgatcactggacctaaccagttgacaagaggccctaaatgaattagttattgcaggccgagtgtcacactgtcactgatggatcagatcattgactagtttcacacaattgacatctaagcacaaaagaaagaggcaaggaaatgagagcagaagaaaaaaaatgtttagaaaaatatcaaatagggatggctgcggtggcttaaccttcatggattcttgtcaggcctactctagttcaaccaaatgaactaaaattcatactgccttttacattggttagttcaaatatgagctaaccatcagaaatttcagaacagagagagtacttcgtagccagtgttgtgtatttatactttatttggttaaaaaccagagtggctcaacaggtagagtccatccctgtagcaacccctctacagaaacagaaagagtataaccaacaattctaagagtgccagcatcagagtacatctgaaagctctgaacagctaggcccttgcaacggcctgattcctgctcctgacgctaccatcatcaaaatccaaagcagcaatgcaacggcatgaagctccatataaagtgacgagagaaccattgcaattttgcaaaggggccatgctcttgatgagtatccgtagattcttgttgacagaataaagaggcaaatcctacaacagataggcccctgaacagaaaagaaagtgaaggggccaatagcttctatacaggttccatggggggcaataatggcaggtcactttgtccttcaccaaccatcagtccatcatcagtgacctaacagagaagacctcggcccaccatcatttaaagataaagggatattcagagactagaatgttaaacacaaacttttacagttttactacactggtaattgcttactggggcctactgaaggacaaccaaagactgatacaacagcagcagcaaagaagcatggagattataagcgtgagggctgtaaacatgagtgtttggcattgattcagattttattggtatgggcaaacctctgaatttgatcaatgacaaactaaatagcacatctgagatgtatatcaatataagatacactattatgatgatgaatagatacactacatatatcaatataagatacaacaacagcagaaacgattactgtgtaatgttcctttactttcttcagaacctcgtagttaatgtcagctttgttgtcagcgtcatcgccctttaagaagcgcgagacccaccggaccgctgctctgggatgccgggaaag

SEQ ID NO: 5832 - DNA, 19844 bp, Oryza sativa
tgatgagtacttcttcaatattgtatctgcagtcagcattaatgtgttttaaatgaactgcagtacaattaccaaaactggcatattaaaacaaaaactcataaaagcagaattagcttatccatgtaggtgagatcttaagacataatcacagctttgcatactaactttaccaaaaaaaactggtcaactgcatccagaacatgtacaaaaacagacttcaaggatattaaaaagtaccattttaagagtcaaagggaaaacgtacctgcatatttgaagaaaaatgacgataatatgccctgagcggcattgttgcaaataagaaacattgtggcctttgaatgcccttccagaatattaaagctactaggacctggacgaaattacataataagtgatctttatagcaccgagtaatgcatgacacaaaagaaaagtgcatagctatagtggcatcgtagaagtcaaatggttgatacatatgtacaagaggacatttcagagaaaacacagttaaggtacaagatttcgttgcgcatattgtcatcctaaaagcatagttgattgaataattgtgacaaaatggaaagcaagaagaaagagattccattaattaaactattgaagcactttattatgatctattaaattgtagccataccgaggtgtaaagaactaaagatatatatcacaaaatgactgaattaaccaaataagtaccctatcaaaatccaagcaggcatagggctagtaattaaaagtaaagttattgacagcagatcacaacacataatttggaaactataatatgcaaaaaaaatgcatttcttatcatgagatataaattctcaacaattaccttggatgatggcagtgatcacaagccctaggaaattaaatattgcaccatatccatacagaaataagttctgtaaacatgatatgacagtcatgacccttgaaaaacaatagctttaggagatacaggctgatagtttagtacattatcattgagtagcacatggtgactgcaggataagtatgcatatggtcatacctgaagatatatactggtatcaaactggcttttcagagccttttcattgtaaactgaagccaatgcaggaactgttacctgattgcagaaaatgttagcatggaacattagattgtgttggctatttctgttatataggaaaaaaattgagcaatcaaatgaaattaagcttgtttccaatgtgaagtattcaaaagcaataatgtaatcccatgtgctgagaactactgtagctattttactctgtcagtttaccacaagttcttaatcctaccatgctacatatttttaactatatgtgaatcaataaaatgcaaaacactggttcaaagcacaacatataagagttcaagcattgtatcaataacccaaatgtctgctcgtctataactatatgcagataaagagcaggccagatatagcatcattgtatcgtaatctacggactaccagaaagccttgcttgagctgggcatgaaaatgaactctgaaaactaaaagttaacctaccttcccaaattacacagaagatacattagtctagtctaaacctacatgttaaatagagtagcacaccatgcactaatcagatataagaggatgaaaagaggtacaagaaaaacgaatgaacaaatgaaccaatagacagaacttacgaaaaataatgtgtataggtaggcaccagcagcaacaggaagaccaagtgtactagaaccttcaggcagtgatttgagctgattaaccgatataccaatcaacaaaagagcaagggcttcccactgtcaacacgccatagtatgatgtcaattacataaagtttgtggtgttgcaaaaatatttattaagagttagatattaatagatagatgtaaagaaaaacaggaagccaatcggcttaaataaaaaaccacatttggaccacctctacttttaaatcctgaaaaaaaagctcaaaactgattaacatgacaaatgataattaaaaaccaaacctacctgaattgtggagaaacgcctcctcattatcacctttaggagcacagcaatcaccagaacctacagaacaaatgtgtgatgaccaatacaatcaaaacgtaattcacatgttgccaaactccaaagaaatgatgaaaatcaactagaaaaatcacaaggttgggagttgggactattaggagcttaatagcttttctgaaaacaacatggacaagtgtgtgcgtgtgcacgtacatacatgtgtgggaggtgggtgaatgcaccaacgttgatgctatgtagctactacgacagtaagataatctttgaaaaaaaaaaagagggtataacataccttgagattacccaacattttcactgttgcaggattaaaatatagctgcacaagacaggatcaatggttagaagagctgcatcagattgaaggtaggcaaaagaaagatctcacagattggttcaaagaaagtcaagttcccacacggtctgtaattaagaggtctttatgatcctatacctgcattacaaacttcatgtaattgttgatagcatagaaaagagcaggaactgcaagaagaacattgttgcgagcagcctgccaagtgaagaagaataattatgatggcagaaaaaaatcactaacttcttgcaacaaatgggagcatatggccagtaagaagtaacacatgattaaaagatagctttctatgtaagttttaatgctttctgccaaatgacaagttgccccataatgtattcgcgtgcggtttatactgttaggcaatgaggattgactacctctcttcaaaataaatagtgagtacttcaactgtggggtttgcaagagaaatcaatatttgagatttagaccaggcaaggaatcacctgatccaatcagtaagcatggcatacttgatggttatattacctgcatgaatgttgaaactgtgagaaatggcttctctcccacctttaggcgcctggcctgcaaagggcagaaaccgatttgactaggatatccaagaattaatagaaacagaattctttagtaatcaaggttgcaatgaagttctaagacatgaaaaacaatcaatattccacttgcttagcagtacatgaagaaaatgcatcttgcagtcaccaataaacaagtataggaaacaaccgtataaacaaatacgcttaatggaacaatagaaggttttacatacctggatgcatagcatgatgatggcaaatataatttttgtaatctctgtcaagaagtttacactaactgggctaaatttgaacttcccatccactttacacatgtacaccaatataggctgcagaaaaagaggtagagatgcgtcaggcaacataagagttcataaagtggcaacagagtaatgacttagcaaacatttctatggatgtgctcagatggctaaataactcagcaacaagttgtgtttcaacagaatgttccaaagtttaagatctctagagatatctaataagcaatgaaaatgatggaatgataatgacagtagtaactagacattcattcttttcctagcagctagtatgtgtatctagacattaacattagctcaggaaagaatacaagtcatcaaaaccccaaataactactgcttgttcacgtacacagatcaatgaaaccgatcatggtgtgatgtgataatacataacactagacatttacatgacgctcattttaccagacatcagcacagtttaataacattaacacattcatagaaaaagtagtcacagactcatggctaattagtaagtttttgtttagcatgaactgtagctaaacaaatgcaacagaggcacaaactttggtaccattacagtttcactgagcagcaagctactaatcctaaatctaaatcctctcaattcattatctcacgcaatccaccaaaaccaattcagtccgcgcgcaacacctggcggcgattcgggaccaggcacgctgatcagaccaccaaaacccagtgcaggaagggggggggggtgaagcattatccacctgtaggccggcgaggacgcagtcgccggagacgaggaggacgttgagcgcgcgctgcctcgacgacacggagctccggtggatgtcgtacgccttcgacaccgccgccgccgccatcggcacctgcaccttcgcgtggcacactctgcattccacctccccgctcatctcccccaccgccgcctcccccaaaaccctacgattccgatctctcccgctacaaatcacccaaaaacatcagcaaaattcaccaaaaaaatcgagaaaaaaaacaaaacaaaataaaataaaatcagaacccgccctggccgggacgaactagggtggggggaaagggaggcgaggcgagagaacctatcctctggaggccaccatgggagggagctcgttgctgggccgaggtgggaggaggcgatcgcgattcgaagattctagaaggcgcgagtcggcgaggtggggggagacacggggagcggaggcccggagagggagaggagtgggaaaaaaaattatgtaaatataaaataaataattattcggaggaatatcccacgagaacgaaaggggaagggacttttatgtgaggttcgtgtgtttctaaaatggacccttgaattttactgattttcaaaatggtcctcgtagcatttttttttctccttttttttgggtgaggtttttgctgatttgggatggaatcaaaacccaggatatgtgtgatatccaagtgtcagtagagactttcggtttagagggaatgtttaatggctagtgctaatagatgagtattagctgttgtaaggtcttgttttgtcgagtgctggtggatgatggatgaaattcagtttatgtcaattgttggatgttataaatgaatgaattagatgttagagagttaagagtttgttttgtaaagttttgaagaaatggttatgaagaaagttgtcaaagagataataaacttttaggccttgtttgaataatgggttagggaaatgttttttcacccaccaaaaagcatctttaaatcctaaccatttattcttactcttccatttaatcctaacatttcattcatttccctatctcaatctcaccccttatttcccattgtccaaatatacccgtaggagcttaggaagtagccatgataataaaaaaaaatatcttaagctgaaaaggatgaaatttaaaaagcactaagtggtgaagaggattttgatgctacaccatattcgccatgattacaccattaggcatatcatctttctataaggtggataattagtatatcctcatggaatgttggaaatatataatttacgtttttctaatgtgggcaccaagcaattaccaaacagacaatattgtacgaatgtgttatactatagtgcattaccatatatgcattacagcataaaattcattagctgggtcgaaatacaaatctgtaaattgattttttttaaaaaaaatattaatgcgatcctttttcggaaggagagtttgttcgacccatccagcataaaaaaatcaaataagcaggaatgcaaaggtctaaactgacaattgccacggccctttctgcttgttcaccggtcaccaccatggacgagacttgctgagagaatcgccgatagagacgacaaagtggagacctcccagacatggagacctaacattccgaaactgccacctatcctcctcaatcaattcacagaaaacggggggtactaccggtatttcgccactgcacaggtgcagtcataccgaacaggtaggcaggattaaactcaacccgtttcatgcagttgtgagtttttatatctaacgtttgatcatctgtcttatttaaaaaatttatgaaaagtttaaaaataataaattactcataaaatattatttatgttttatcatttaataaatataaaaatattaaatataaaaaaataaataaaatagatagttaaatgttagacagaaattcacaactgaataggataggggagtatagagtatacacgacgcttggggatgcgtaatccagagtcaaggctccacatggaagcttcggaaatcatcgggacccatgcgcgcgccacgtgtccctgctaccagcactggcgactcctcaccgacaaaaaaacgagagcctcttccccctctgtacagttgtgaatacagtggttttctgtaaaactgcacaggaaatgctattgaatcttacaactacagcaaaaaggagatcttacattggaactttgttgttcttttttataaaaataaaacttagtagtagattaatgttggttggttgcttggtctgtttgggcagatattttaattcctaaatttaatcttaagagttgagtacgaagccaacttagcctgagttcggtagaacaggttgggaactaatctcctccgcacggaaaacggagcggtctattaacgcgtgactaattaagtatttgttattttttcaaaaatggattaatttgatttttttaagcaactttcgtatagaatttttttgtaaaaaaacacaccgtttagcagtttgaaaaacgtgcgcgcggaaaacgagggagacgggttgagaaaaggtggacccaaacacagccatagagcaaccagaatctaccgtcacctttttagttcaatttgtgataacacttcagcatattacagttctttttttttagctgaaactgtttggagaggtggaagttggaattctgcaaaacaagcccttaggtcctgtttggctcatgggatagggaaatcattttccacccactaaaagacatctttaaatcttaaccattcattctccatcttccatttaatcctaaccctcatttcccaatctcaatcccaccccacatttcccattatagtttgtggcttacccaatttttgctagagttttgagggtagttctgaaattaccaaaattttaataagattgtgttcgtactgatatgtgtttggtttgttgtcttgccaaatttttataatgttaaaaatgacaataaagtgaacacaccgtgaatctgacaataaactggatataagctctgaattgctaatagtaggatctgaattggataatttgtggatccaacaagttcatgcaacagtgttatcccagcagcataatccaatcaaatcttttaccagtctcaaactgaaagcattgagaatggggatacaggcatacaagttcagtagcatcacatggtagtactacacaatatcagcagctacagtttattgttagactgcatggataaatcatttttcggagcatactatctgcaaactttgcagtatagcagaatcttctacttcaaagcaaatgaaaattaaacagaatatcagaacaaagccatactgaaactgatccacccatggatcagccaaacccccgccccacccggtacagtacagcaattggtgctcctaaagatcatgacaagagcaaaaactagcaggtctcgcagttgcaaaccctgcaccatgcagagacctccatgaggaatgacaagcttctgatgccttcagaaaagctcggaccacggatcaccttgagttttcttgctgttccgtggggtgaccagtctcccctttgaagttttgcgaaataactgatcgatcgtgttgcctcgataacacgaggcataagcacctcatcagtgtatttgctcacctgacctcaaaaccatataagtgaaattcttcaacttcaaccaccttcatttcctcccgtcagtaggatagacattatgagatgaaccagcagacagccaaccaccagtccaccactaactgcagagtttcacagtgcatgccactgcctgagcccaatacttcagtctagccttcacttcctttgggtcatcacctataagaattcagaacctattgatcagcaaagaacagtatggctttcatagagtagatactattatagtttgccacacacatctcaatatcaaacatctcgattaaacggacagtacatctaatagctacagagaacatgcttaggtactgtttattttagaaataaaattttacattcttgataggaagaatagaatttcttcaaatttgtttttgagagaagaaacatgtgttggaaaggagagaagcataatttcctgtggggctactcttgctttgcttgcttgtgaagactgttttgcagaagacagttcgcacttactaagaaaagagacatcatgaacaaagcaaatctgtcttttatcttgagtgctctacctgagaatgtaagcattttttccttcatttcctatgctaaaacttccattatccctttcctgtatgtgtatcaattcagagaaccgtaactttctaaaaaaaattttagagaaccattgaatttacaacaaccaaaaggttggcacaatttgcagtcttgagtgtctaacatcctcatttctttatgaaacaaagcaaaagcaagcgaatctgattctctccgcctaaacaacttgtgctgtatgtggtacaagatgcaagcgtcatcaagacaacagaaatcctaactccactctcccccaccagagagagagagagagagagagagagagagagagagagagagagagagagaatgattgaatcaatatcctaagaataagggttgaatacaggatacaacaattggtattaactgtgcacgagaaagttggcaaattttcagcggatttccttaaagagctacaacaagctggtatccaaaacatatatccagctggaattgctgttataagtttgttataattattacaactgtgcatcagttgaatagagcaaaccatcaattcatatgcacagggcaatcaaaatcgaaattaggcatccagtaatctccaacaaaatccagggtgttcaatatagcctgtaaactgggcatcgattgtctgcaagcatgttgcttgaagcctactccattccgttatgaatatctcatatcttttattcattgcgagcatcagatttcaggatgtttattcattgttagtgccatcctatagcaaagccacttgttaaaaaaaacagtggtgtaatctacacaggattcaacgagcaatctaatggagaaacccacctgatataatattgcaaacatactctcatcctacctgggtagaacataggataatcaattctttcacgatcaactaagtctatactacttcgctacacatatctcaatatcaaacatctcacacttcaaatggaccaaaaaatccaagagatgcacttgatagtgcattggcaacgggtgtgtggtttcaacccaagttcccgtgttcaattctcgacacgctgacaatttgttcttaaaaaatgtttggagggacgtctctcccttcaaatctcgtttttcttttttggacccaaaaatccaaaccctgcatctgacatcccaaaaattcacctctaaacctctcaaatcatacagctccaacaaaacaacagaaaaaatcgatcacacaccttcacaaccaagaagtaatcaagtatatattcacacaatcccaaacctagaacattatcagaatcaaaatctgcacggggggaggggaaagctttaccggggccagagattctccagttggggagcggcggcgtggcgggcgactccggctcctgcccgggcgccctctgctcgtcgaggaacctccgcgtcatggagtagcagagctccagcgccgggagcgtcccgcacagctcggggatctcgtggtaggcgaacccgaacccgaggtcgaggcagcccttgagctcctccaggtcctcctccgtcaggctcctcgtcctccccaccgcccctccccctccgccgccgctcccggacgccgccgccgcctcgagcatcacgaagctgctccgccgccgctgctgctgccgcccgccggacttggcggcagccgtggcggggagctgcggctgcgaggagaagtaggcggcggtggtggtggagatggccgccattttttgctccgatgctctgcctgatcagggggggctatttataaagaggtaaaaaaaatatttcctggttaaaaaaattgctttaattaggtgacattttttttttggattagttttaggtgagtgctaatttagcaaggatttcttttttggagtgtgtttgttgtgttttatttaagctggctctattttagtcatgcatccctaattgcagttatctgtctctacagtaaagagcagaagttgttttatttttctcatgttggtataaataattgtatcattttactttaactgcttagttataaaggaaaaaaaaacttcggtataagcatattacctggtacctggatgctcccaccgtgcacaaatataacggatttttggattgttcaacacaatttaagcttaagttgaaattgctttgatgtcactaattaagattttacttgattgtaaaattatgatgtctagcgaagtagcgatgcaactaccagtgagcaataatagtggaatttataatcctaattttcgtagataatttttaaatcataaaatgcccaatatttgtatttgtgaagtagagatcacttgatagtgtagtggtgaggatgtgtggttttaacctgagatcttatgtttgatactcaacatgctcataatttcttcttttaaaaatttagaaaattttctccctctaaattattgtttttaatttgagaactgtatatatatatatatatatatatatatatatatatatatatatatatatatatatatatatatatatatatatatatatatatatatatatcacagttgatatgtgcattttgggatattaagaaaagataataatcctagtactaaatctatatgcattcagtgcacgtagatatatgtatacacaccacttgcccatgcgtacgtgccagaaattatgtcggagcactcgaccggaggaaggtgacgtggactgaaaattacgcgcaccttgactgcgcttgtcgtgggggacgggcccacctggcagggagccgggcatcattaactactagtggccgcatgctgagaggcataattactccgtctgttctctggtgacgtggcactgttttccccctgccattaattacatctagtagtccactgtgatgacactatcgacgcatgcatgcactttctcatcgatcttacgtggtactcttagctacagtagataatatacttacacatgtaaaaatcacatattttacatgtacattatacagcattgaacttgtaaatgtttttgttcagatcacttggaattggtatatatactagtacttaatatatagagaaaattccctatctagcataaaaaaatgttgctcttccctctatagcacccaaacttaaaaagttacctatctagccacttataaaatttcccttccctatatagcacttccgttagtttttacacttgacggtgttaactagcaagagaaaagacggttctgcccttatttagttttcagacttgcccgtacatggtcgttggtattttagacgtgttttctcttgatttaacgtaacactgcaaatataacatgtcgatccactcttttgaaaaaaataataattatcctcttgtggtttcacttgtcattaattaacttaagcaattaataaccaacatgatgtataggcaagtctgaaaaataaagaagggcaaaaccatcttttcttctgctagttaacatcgtcaagtgtaaaaacaaacggaagtgctacatagggaaggaaaattttagaagtgtctagatagggaactttttaagtttgggtgctatagagggaagagcaacttttttttatgctagatagggaattttctctaatatgtacttactctctgctttacaatatactagtagatgttttgggttttaagtattaatattttttaccctaaaaaaataaatattaatattttggcaaatttatttttgacaaactgatatacagtagaaaataattaactaattgatactcttgctggttaaccctactttcgagtttcgattccaatatttaatttctcaaaaagaaaatctaatatttaatcacacttaaagctataagcttaattactccgtaatatacgaggactcgatcgatcgcgtgtggctgactctgctacgtgtacttaggtggggcccacgggagaggaaaagtgggcccgcccgcgctacgtggatggataagctcgccggggaagtttgtggcggaggagcggcgaacgccggcgacccctcgcacacggcgggtgtcggcgtcggcggcgacgacgacgacacagcaatgcatgcatccacgtggcgcgtgtgggccccactcgaacggcagaatcttcctctgacgtgccgccctgcgtgggttcgaccaatccgtagccaactctcttagatccacgtcaacctcgctgctattggacaatttagttgatcagctgccaagcaggataaatacatgaatcaatcgcatggataaactcataaacataaatctgttttttttaattagttcacaacaaagactcattgcgtcacatcactgcacacgtaacaccacattcatactcccgtgaataccctaacacacactctaagtgatgaaaatcaacggtacaactttgaccttactaaaattaaaaatacgttgaaaaccaacctgtatgtacgtaatatttgtgaatatcaggatttaaattctcttgggtagagtcacgtgcctacgacaccaccaccatataccaccatatcgctgatgtttcccaaagataaatccattttctactgacaaacttaccatccacttgcatagaacttgctacataagaaacatagccgtagtttttttgttcacttttcatgacgaagtaaaacgatatgattcacccgtagttttttttcacttttcatgacgaaataaaacgatatgatccatccatccatcgatagtgccatgcatactggtaaagtgggaagtcaccatcgatatcaaaaaaccagctgcaattaatcttgtaataataataatccagaaatcgattaatttcagccacgcataaaccggcaagtgaggattcggccccacaaaaccccttttcttgtggccaaaagttaatcccaattttaaaccaaaaaactttaagccaaacgggtcactaccctctttttttctatctccaaaagattctccactggaccaccactatatcactagctatatagtcaaataaagtttgttcggtgaattcaaccttttgtttttgattcgacgaactacattacaatatatataatgtgacgtcgacttgtgcatgtcttggtgttcacaataaatttatagcaatttaaccacaagaccaaataaaaagttgcaaacgctatcaagctagctagctaccaatttcaaacttggaagatttgtcggcaaaaaatggcacctgaatttccttgaccactagcctttttactgcacgagatcaaatgcgtgatggatatttgctatgcatgcagctgttcttcagagatgtgtgtgcttcacaaatctgaagaactcgaatgcatatcttcttcagtatttgtattaattaaactgtcgctgttgatcacacacgtatgtgtgcttcagtaagtgtgaggctgagagaaatcatgcagagagtgagagatcgatcgatcgatcgatcaattgatgcagtcatgtagcctgtatatgtatgtgtactatgaagtcactgtcaggttcagggatatacagaggaataattctcaattacgattgatccgtttcttaattggggttaattaattgcactgatggatggatcacttgtgtggctcttgtagctttcgtcgtgtacagttttgcatggtcatgtattagccttcaactgaagaattgaggtgctagctaagctagctatagcttctgaacctcacttgagagagaagtgtgccatttgaaggctgaaagatggcataaactggtgatgatcattatcacagatcggcactaatcatcattacttccataaagatgccatgcattattttccctgctttaggggcactaattaattagtttaagttcatcgatgatcggcaggtggctgatcaatatggccctatatggtcaacagccaccatatagcggtgctactagtatgtactatcatgtagtgccaacaatgagaaagttttagattttatttagttccaaaaagttcagtaagtttcatgaatatttcaagtttcactattcataacttactgaacttttcatcaggtcctagcaagaagattaatcctttgttatctagtatcatcatagaattttgaattaatcacatattcgtatcttactgaagattaatcccagcagaagttatgagtattttatctagtatcataatatttcaagttttatcaggtcccagcaagtttcagttagcagttgatctgaataatgcaaatgttttacttgtgccaatattatctatactcccaaatctaatttgctatcaacctatcagcttgaaccacattttaaacttcatttcacactcatgacacctctgatttcttaatcctgagctgctaatcactgagatagccgcatgcggcgcatccatgcatatgcagagcagttgatccctgcacattattctaggcaactagtagtactaatcctgaagataattagggattgatactactcaatagcactaataatcaatcagtcagtcaatcatgcatgaactagctagtgctgcagtttttttttttttggttgcgcctgttctatatggttctagctgttgaagtgggtctcgagattgtaatttaagcagcaaatggtgcaagccgttggccagtttcagtttcagtatttaatctgcttgtctccaaatccaaaaccagccaccctaaatccctaaataaatctgttttagtttggtcccatgaacttaaaaactatcatcattattctgccgactttccgttagatacagaagagaaacacaagagaagaaagtctgaatatggattgcatgggcacacataactagataaacagaggggagtagataacgacttcaaaggattaactatgatatttctgagcatcatataaattttattgcataacaagaagctgtataaattttaagaagaaacaactctttctgttcactgaaatctcagagcttatacagttagagctaacagttggtacatgttctctgaaagtctgaaaaaacaaggtcggtacaggtcaagttcagctattaactgttggatgggggatatatatcaatatatcatactgtacaactatatatgaggccggtgcacatgcaggaggatatcgatcatctctgacgtgcaagccaagatatatatctgcaacgacaagaattatagcgatgggccggcacaaaactggctcaactcaaccagactccacctatctatcttgctgggaacttacctgaatcatccattgattgagaaacgaacagaggtcttcttgctagcttcacaagatggtggactagacgatctgggttcgaagcctcatctcttctaattatttgatattagttcattccctaatattcgtgtttttttaatcatccattgaaagatttgtgctacatgctgcatgaactgtctgattttgcagtataataattaatgcattcatgtaatggtttaatgtgcagtgaagctgtgcaaagattttcatgggtctagttgagcccaagaaggcaagagtggtctgaaactgaaagcctgaaactgcagtgatacagtggtagtatctctctatatgttgtgccaagcaaacctcctcatatgatatttaatttgatatctagatatgtatttggtccacctttcagtagtagcaatcacatcagggttagtttagctcagcctgtttagagtggtatacttaattatgcaagccatggccaagacagggtgttatgaaaaggtgtagtgtggtggatgtacccaggaggtagccacattgatgtggaagcttctaattaacggtactaagtaccacactaataaagaaagaatgaaaggtcttttcttgtatgtttaattagaaaggaagcatgaagcaatgattggttgagctggaggagacctaggcctgcagcaacaaaataatgtagatcattggaaggaaactgtctggttatagcatcactgaaacggccatttaagatttcagagaaaatgatatagtagtagtatggagcaccatatgaataccacacctaagtttgcagacatttaatactaaccaaaatgctggtaataccaacaaaccactcgcagaggaggattgttgaaatcacacacatgcatatgctcatcgtttcgcttatgcaggttataagtcataatggttcatcaataaaaaaaatgaaaaaaaattgttagtaaaaccttttgtatatgtgttcttaacgatttaaatgtaaatgctgagaattgaattgcgatgaagagatagagatagagatagagatagagatagagaagagatttcctcccccgcaatcccgaaacaattcaatactaattgcgccccccaagtaaatctcacgccctgtctactgcgtgcgtccgcctccgagatgggaagacggagagcaacccaactggcacgcctttccgcttctgcatccgggtaacgtaatttctgcaatacgttttcacttgcgacgcaatccgaaaagaaaagaaaaaaatacaaaagcttcatgccaaatttgtattaattctacacggacactgaaagcctcttgaatcttgataatataataccccgatatatctaacagaagccaatccagaggcttaattccggcgatctcccaccgtttcgtctcgtaactccggcggcggcggccatgacgttcatagtccccccgccgcgtgcccgccgggtcgacgatgcggaggcggcggcggcgctgctgctcgaggagctctcgatccgcctgatggaagaaggcagcagcgccggcgggcatccacctccgacgagctgcagcgaccacgccttgcgctacttcatccgggtaattaacatttaaacagctcttcaacaacttgaattcacttctaatttattatactctctccgtcctataatataagggattttgattttttttgcacggtttgaccactcgtctaatttaaaaaatatttagaattattatttactttgtttgtgacttgctttattatccaaagttctttagacacaactttttgttttttatatttgcataaatttttgtgcaaacaaaaagtcaaaatttcttatatcatgggacgatgggagtagtctctttcatcataaatactcctacttagggtagattcagccatttttttaaaaaaaatttaaccatcatttttaaatttaaaaatcgagatcttttactgttccccatgtaccgtacattcgcggttcattttttgagggataatttagaaagggaaacaatgtaaacaggtgtagtttggtactcctactttttatagtcataccatctctaactcatcttgtatatactttttttttacaactatcaatgactaagccggaaactttaaggctttgttcttttcccctctttcctaactcactttcccttgttttacacacatacgcttttcaaactactaaacgatacattttttttaaaaaacaatttatatgaaagttgttttaaaaaatcgtattaatcaatttgtaggctaatacttaattaatctcactatagtcgtgtgctttgtttttcgtgtcgggaccgagcacagccttttagactatgactaactactaagttaaggcttttcacaaatgaagtgtcagtttttcacaaaatttacatgatgatttaacacaatttaacaagattttgaaggcaggcctaggcttaatagctgctctaaccctttctccgccacaactaccatcgagctaatcctcgtaattatgttctccttgcgctcgttgctggtttgcgttttttatctattgtaatatttgacacaaaattacatatttaatctttcacctaatcttttaattaagttaatatctagcccacatttttaagtacctggggtttaaaaaaacatttttaagtacccacccacacataccttctcctatagatagttggattgcatcctatcaacggatgtcatcattcccaagcaccatagcaggtctctaaaaaattatattattcttatattactcttcaattaaatgcacgcatatttctttttttaaaagaaaaactcaaacgtttgacaaattattgatagctagaatttcaagaggctgaccaactctttatcctttgttaaatatttatttacagttggacagagtaatccttaacatatcttttaattagatggttaatggaaatcaaattagtgtacttagaaatacatactaggcaaaatttactagaggatcttcaaaatttgtataatttactagtagacatcgtaaaaacgtatgacggccactataaaaaaattggtaatttgctagagaacactttcggagagaaattcttaaaaagacaagaataaccctatggtcaaaagctcttgagcttaggttagagtgaaaattaaatatgatgtatgctagtgatgtacttggagtgatggcaaatttagagttgcataatttctaaatttttacgctaacattatgtttgaagcttgtggccctaagggcattcttgtctttcttaagagtttatctttttaattgagccaaaagtgttctctagtaaattatatagtgtcttttagctttgacacgtttttatgatgtccaccgataaattacataaatttcaggtgtcctgtagtaaaatttgccaacatactatttcctccgtttcatattacaagacttattaacatttatatgaatatgggcaatgttagaaagttttataacctgaaacggaggtagtatatccttagattagatgaatcttggtcacatatcctaatgcaattgttgtttacagggatttacgactattgtcagcttagtaatggttgcctggctaatctatgcgagatatacgaccgacgattcagagcttcatgaccccgcaaagctgtcatttttaattgttctctctcttagtttggcggcattcggcttctgctctacttcagaaactgagctacagagactactagattgatgagtcctagcaaaagtggaacacagtgtcatagtgtgcatggtcctagaaggaaaacttcattgtgttgatatatactctttccttttctttaatactaattaatactagataataccgttaacttttacatacacgtttgattattttgatcttattagaaaaaagctagcgataatttcaccggttgatttgaccaaatggcacaataattttctgacacgtgtcataagagactgttaacaaccaaccatcaactacacaaaacaataagttgacatacacccactaaaaattgaaacagtcatccagcgaaacgcaatgcaaacacaatacgttctgacaaactcaaaatttagggatgatatgtttca

SEQ ID NO: 5833 - DNA, 39351 bp, Oryza sativa
aaagctggtaataccaaacaaaccactcacagaggaggattgttgaaatcacaacaatgcaagctcatcgttttgcttatgctgattataaaccataacggtttatcaatgataaaaaaaaatattgtagtaaacctttttatacatgtgttcttagcgatttataagtaaatgctgggaattgaattgcgatgaagaagacatagttgtacaatatttgcaaatacatcgggttgtataaattcaccattacaatacatagttctacattctgaacagacaccacacatcacacagatataggtagtataaactttaccaactagtgttttttgaagcaaataaaagcaacattaccactactgtacaaagttcttatttttaacagttcagacagctatttcacaatacaaaattaattggcttagtaggggacacgcaatcctatagatgaacatgagacatctgttccaaggatctcacgtttcaattgtgctagggcttagcatccagcttcatgttgtggagccttagcttcctctcgtctgaaagtagctttgcaaaccgtgtgagcatatctgcataggtcgtcacatggtcaccatgaaggtttggctctggctcaatgttgttcttctcacactcttccttgcttagtggcttcttgagaaggttttcgcctatcttaaccaacagttgaagatgatccttcgtcgagaggtcattggatattgcccctattgggatgttgtgatcctgtaatggtgaacaaggtataaatgttttttatacaatattttttagaacatgtcaacaaataaataactaacttggatggcacccatgacaatagattgtaaagcatgggtcgcgtacctgaatgcgcaatagttggtgtgaacatccgattgcttgaaagaggtctgcaacgagagtatcggccatatctgagctggcatgaaagaacatgttgagcaacggcattgtatccttatcaactagccatcgaaaaatgccccatttggcaacatttcttgcatcaaacatgatatcgtgctcaggcagacccgtgcccaaagatatcaccagatacttgcggtaatccaagggctcggctttcgggaactcctcgctcttccgcttgatctgctttgttatctcacccatagtcaccaaagtctgccaaattagagacatcaagataagttagcatcttaaatattaccatgtccagtttggcaacaaaggttgatgtgaagtctatacaaaacacataatgaaaaaaggcatattgcgttactgggtaaacattattgttgaaagacaaaagtatagagtttttacacaggaatttaaacccaacaaaagttgacaatttcagaaaaatgatgaagaaaaaacatactggattgtttgctgccatgccaccatcaataatgttgaagctttgcgatgcacccgtgtgatccacggtttcaaaatagtgtgcagggagaaaggttggtgctgcagatgtaccaatacatacatcagcaagacaagcattcttcaagggcttacgtctcgcctgcattgtagcatatacattagttcacaccactccaaaaaattgtcatgtgaaatccacacgctaactcagtttagagaagggaccttgaatgtgctgaatattattggcttcacacacttcacatcaaaagtgggaatcacaacatttgtcaatgtttctttcatcctcgtctcgccaagaagatcattgattagtctgtgaaggtattttccatcatactttggcccaatggccatctttatgatgcccaggatgttgaagaaccaaccaaaaaatccagtcctggttgcaaaatccagttgacaaaataccatttatattttcatagctagttaaaaaatcaattaacaagagaacagttcaactcagaaattggttgaccataaacacttagatatggtcatagcttctctactgacctcagacagaaacatacaactacataattgcaaagattgttattagtattaactgaagcctgtaatacatactttacctgtgcggaaagatgtggggggaatgcttgaggtaaaatgggacaatatccttggcatagcatggttgattggcattgcccagtgatggagctgctagcatgcctgcaataagaccacctgtgcttgtgccagcaatggcatcaaagtagtttgcaatccgagcatccttcccatcaagctcctagaagagcaaagcaattcaacaagtaagttactgccagacatgcgcagagaaagaatgttacccaaagagaagaatgactcttaatcatgtagtcgaaaggccagatgaaaatttcaaggtgagaagatgttacttagaaaggctatgaattccattaacataatttacccaagcctactgatcactaagctatacacaattatacatgggaagaaattaagaaatataggattgacctgaagtttagattccaggaatgagaggatgacagcaggaatgatacccttcaccccacctccatcaatactcagaattgtgatcatgtttcccttgcttggtggtgggcatgcacaattcttctccatggcagaggcaaacaagtcagctgttgatcacttgcaaatttctctctctggtggtctttctcaacaaaggagagctatttataggtgatgagggaaaagataactcaggatgaaaaaaaagtaaaatgttaactttgaaccacaagcaatgtttgcacgtattttacactcaagcattcagcatctgccaaactgctggcaagcttatccaagcttgttcatgcgttgtatgtatcttcttccaatggtccagtaagatatgaaagtctcatatcttcgaccatctacgtgttttgccacctttaaaacaccacttttatgttctaattttggctctagttgacaccccatatgagtacacacttttatgccctgcaagtcatgttaacaccaaatggaaactgacaatgcaagtaaacattcacacattctgtcacctgctccctcaccctgacctttaatgctctagacttgtcacattgttgcatcttttaacttttttctatttaattttgtatttagtaggggaaaaggaagaaagattgaaatttgaacattcacacccttcatgcatcatgaggtgatgcacatttgcttgggagtaaacctggttaccattttatggctgtttggggtggaaagaaacaacatataaaagcatttgcaattaaaatgacatgggaaacataacatgagactaagccaagttaaactcatttcaacaactggtgtccccagaaaatgtgaatgggaataactacagtctacagagatagcattacactacaagaaggaaaactagcaacacaacaaaatatctgagtcaatttggctgcccagaatagttggattggttaagagaacagatacaacacaaacaaaaaaaaattgcaatacaactagatgtactaagagttgaacatgatcccagtacactgtactacaagagtatgagacctcaggaaattatgttccatattcttccttgagcttcaagtctaaattgcaattagcaaatgtttcatgttcgaattccaagtcagaaagaacatgattggcgttgtgttcacctgtaaaaaaaaaccaataggtttgtttcagaagttacccaaaaaaaataaagatttttcatgcaccagcacacgtcgaacatcccaagcaactttctatacagaagtacatttaactagttacaaggtctgctagaagaaaggagagcggcatgcataaagtttctagcaatggcttgttctctttggagaagaaacaaggctctggattgatgaaagccgaatacagtggctcaattcatttgtagaaggttactagaaaatcattcaattttgtaaattgccagccacagatatacatgtgccagtgcatgtaagaggtgcagaagaagagaacctagtcttgagcttaagtatgacattggaggaagaaattctgtatcaagatccagttctgttttatcttcaggatccaccatgcatgcctgaaatacaaaaatagtgcaattatcaactgaaagtacacaaatgcatactatattactatacattatcatgtgctcatggcattaacagaacaagatcagcttgtacttatcaccattcctacacgctaataatccatcttataagattcacaaaatggtaggtgaggatagaaatatcaaggcagcctaaccctaatgtaattcgagagtgccgtgctaagatacccgctaactagagagaaatgcttaaaatcattgttggcaacaattcaaaacttctcaatgatattaattcattgccactaatacttagggtacttatgaaatccctcctctccattctggcacatcgccgtgattacgttttgccactcttgaaccacactatacctttgaatgcgcatcgatgcggtaaagactgtccatggagagttgcatcgtccccattgccttctccaccttcttctgtatgcctaattacatacccccaataatacacataaaaaaaggcagtagtaagtactacatcttatcatacgcgaatactggcacaaaggcatccataaaagtaaaataaaaaaacagaaacatacgctcttccagcttatcactgagcagtttctgcatatcgttcccagtaaaactggcagtttcaaccccatccttcgcccactcgcagcatttcatccaatcctcatcgctcaggtagctaggcttcaccagattcttaccagatcccccaacactggctgctgcagtagctttccctcccgtggagctcgccggccgagctctccgggccttgctgagatcacctagggctctgcgctcctgccgccccaccctcgccgccgccccggccttcttgccatcgatcccttcgcatcaaagagcaaagaaatcaaagagcaagaaaaaacgctcgccgcggattttcggagacggtggtgggataatcaccgcgaaagatcggcaggttctcgttttggatggcgattggagcccgcgaagccatcctgtgaaacctaccagcaaaacaaaccgagaagtttcagcatttcttggagcatttttggtgaaacagcctcggtgatggatagtgaccaccgtaaattcgacagaaaccgtcaggattcaagaaatcgcaccgattcggtgcgcgttgcgcgaaatgctagtgcaaagttgggaattttttcgaggcttaccaggaggacaggaggatgaaaccgccggagtggagggagtggggttttgctgcgggagatggaaccgggacatgttcactttgatgcgaaaaaaaaaaatcttactaaaatttagcattatcaaaattttaacaagatttcttatatagttaactaaatatagccacttttttagcaactttactaaaatttgataaggttgaaaatatcattaaagtgaatggccctggaagatatcagaggagtggtgaagcgtattgtgtgtagtagatcaacatgttacgtaagcctagtaggaaagcgtaaaactagattacgtgtttctctctctccaattttttattatcgcagggcctataggaaatgcggcccatgcagcccgtgccaactggagtgggctttgcgtgctttgttgggcccaagagggagtagcccatatgcccactcagcccaacactttagaagccaacgtatatggtgatgtttctttggcaggcagcccaggcttagggtaagcacacaacactgatataaaagcttaggacatcgagaacaaattgggaaatataccctttttatcaccggttttaaaatatacacgttttgaagggactggtagaagtatatcattgtcgcaaagcggagatgtgaactcgcgtatgtggatatacaaacaaggtcacgacttcgcatcccaatatgcgaactcacacgtccgccgcgagttcgcattcttgctttgtaacgatagtatatttttgctaattctttttaaacgtgtatattccttgctttgtaacgatattatatttttgccaattctttgtaaacatatttgtaaaaagaagggtatattttaaaaaaaatccaggacaaggcagctgtgtaccagcaggcagagttggatcatggctcgtgagacatagggttggtttggtttgtggtttaaataggtattactaaattttatcagtgccaaattttggcatgactaattttggtaaggcaaagttgtgtttggattgaagccaaaatagcctaagttcactattgaaaaggcctattttcttaggcatgccaaaatttggcttcaaaccaaatagacactaaacactattaaaattgccaaatattgataagcctaatttaggtctcaaaccaaaccagcccataatgtaaatccgtgtgttagggaatgaattgaacacgtagattagtaggagtacctaagggtgtgtttatttgggaaaaaagaaaatttttgggtgttacatcgaacgtttgaccggatgtcggaaggggttttcggacacgaatgaaaaaactaatttcagaactcgcctggaaaccgcgagacgaatcttttgagactaattaagccgtcattagcacatgtgggttactgtagcacttatggctaatcacggactaattaggcaagattcgtctcgtgatttcctctataactgtgcaattagtttttctttttatctatatttaatgcttcatgtatgtgtctaaagatttgatgtgttgtttttggaaaaaaaaattttggggaactaaacgggccctaaaagtggagtaaaaacaaacctgttaggtgtattggcactcccggttggtgctggttgccggcccctaaaagtggagtaaaaacaaacctgttaggtgtattggcactcccggttggtgctggttgccggcacatggagattgattagcagcgctggcaggttgtgcgcctgcctggtaggagcaggaggagcatccgctttgctgctgaataattcttcttcttcttcttccctacaggtacacaggctgtgctgtcctgatgctcattttctagataaaaatacagcacgtatgctgaagaaacaaccaacagcttgccacgtttccaggacaggtactcctccttccggcatgttttgtagtcctgtcacgtcgctgactttgtatggccacaggtagcaacatttttgttttgttttttttttccttttgagcccgtgtcttctctcttacgcagtgcaggtagacttttgggccaatagtttcttttatattttataataaacttatatacaattaaaacttgtgcacaaaacatatttcctccgtttcacaatgtaagtcattctagcatttctcacattcatattaatgttaatgaatctagacattaacatcaatatgaatatagatatgctagaattacttacattgtgaaaaggagggagtattgcttattatttcataaagcatatgctcacgaaaaacgagcaaattaacgcaactgtatgaacacatggtaaattggtgatctttttttttcttctgtgtttaggaggggtttctctagcacacaaaatgaagcatatattagcgtatgattaattaaatattagtaaaaaactttaaaaaaactaatataatttttaaaacaactttccaataaaaaaattctcaaacaagtaccatttggcagtttaggaaacgtgcgagctgatgagataaaatcccaatttaacttgtcttgttatgacttcgagtttgtaagtcaatttgacctaagtttgatactgatatgagcaaattaagccacgaggtttgagttttttttaatgcctagaacatcctagtttggagtaatcccttcatcaaaattcgttgtgttagcagtggttgggctttttttttttttaccgagggtgtgtactaccggctaaccaacccccaacaatgcagggaattgaaggccctgggagatgggagaaggacgcacaggaggacagacgtgacagcaagcgggccccaccacaccgctcggaaacgcaggacacgttcctttctttgaattggtgacagcctctcgggcgaagtaataactgacagtgaagagcctcggatctcacgcaacaacaactccggacgacgtgagaaccatccatctgcaatccctgcagtccagggacggacggacggagaggacgacgcgattgaccattctacccctcccttacccacgccatcccgctgtgttcgggaggcctaggcgcctagcacgcgaaacgaagtactccaacgtttagtatgattttttaagtaactttcatatagattttttttttaaaaaaaacacaccgtttagtagtttgaaaagcgtgcgcacaaaaaaaacgaggaaggtgagttgggaaagtagaaggagtattaagaacataggggctgtttggattagggactaaaattttagtccctatcagatcggatgtttggacactaattataggtattaaatgtagactaataataaaactcattccataacctggactaattcgcgagacaaatttattgagactaattaatctatgattagcctatatgatactacagtaaacatgtgctaattatggattaattaggcttaaaaaattgtctcgtaaattagctatcatttatgcaattagttttttattagtctacgtttaatacttataattagtgttcaaacatctaatgtgacagagactaaaatttagtccctgatccaaacaccaccttatctccaccctaaattataattatttttttagttggatacgggtattaaagaaaagtaaaattaaataagaaaatatcgtgatcaattgacaaataatgtagataaaaaagattatatttgaagttgttgtagatcctatttgacagtcaatgctacaacaaccatagctacagtatgttgctactataggtgctggctgtggtagcactcaacagagtagctgaatgtgtctatattttaagacggagagagtagtataagtacttgagggagtagtatggtagtagtaacatcgaagtccttttgtaaatacttttactctatacaaagaaattagagtaaatttcacaaaactacacgtgtaagtccaagttgtagaaaaccacacacactttaacacttggcacttaagtaaatatattttagtagtgtagtttcacaaaacacactatcaatgaatggattcaccgcgagatgatgtgactattaccagccatcgcacgaaattaataggatgccatgtctttatcctagatggagcgaccacatcatctcgcgggtgaatccattcatcgatagtgtgtttttgtgaaattaaactaccaagatatatgtacttaagtgttaagtgtcaaaatgtgtgtgattttctgtaacttaaaaaatatagtttcgtgaaatttacctttttttaatgtcctacagccaattttgtctaagaaaaaaaaaggaaaacttcacgagggcacgcgcgtaatttcagggtcgcctcgctgccggcagcggcaggccggccggccagccagccgcatcgtgtaccgtgcctacctgtcagaaaagttcagaggaggaggaaggaacaaacaaggcgcccgcctttttttccgaaaagccccctcgtaaatcccctttttccgcaacatgcccacgcatcgatggagaaagaaaaccgcgacgcatcgggtgcccatatgaaatgaatgaatattccgccgccgctccagcttccgctgcagccgcagcttgctgccaaatttaccgtgaggtgaccgttgccttccaccgcccccacctccgccgcggcctcaccctcacctgcggcgaggatcggtgctctactctagtagtagtactctagagtctagtctagtctactctagttgctgccttcgctagcattcggaggcgatctgaggaggaggagtggggagcagcgaaggttttgatcttttgggaaggagttggattcggctttctgggttctgtctgtcgcttgattccaattcggatttcttgctgttgttgttggggtgttcgcggccgatttgaccccggggaatcgctgcttttttatttttttgaaaagataattctacgcggattagatttggtcaagaagtcgtagtacgaacgcgaggtttgatcttggtttcgatccgaagggtctcggttggctgcgtgggaagggggaggaggaagaaggcgacctgctatctaatcctctaccccctctgctgcgaaaattctctgctgtttgctcaagcatcttgctgcttggagccttggatcgaagagagttttagttcttggagttctgagaattgtgttgcttgagccgaattcgatcccaaaaaggctcttttttgggaggctttgaggaggaggaggaagaagatgggggtgatgtcgcggcgggtgctgcctgcctgcagcagcctctgctacttctgcccctcgctgcgggcgcgctcgcgtcagcccgtcaagaggtacaagaagatcatcgcggagatctaccagcttccaccggtatggcgattactgaatcctgtcttggcatttcagccatttctgatgcttagttgtagtctctgcgatttgggtctgtggtcaaatagttctagtttctgcgaattggagtctgtggtcaaatgtgtggagggagtttgttgattgagggtgtgatgttgttgctgtaggatggtgaaccgaatgataggaggattgggaagctctgtgattatgtctcgagaaatccgacgcggatacccaaggtaacacattttgatctcctctctgtttttactagaattgtcgcgcaatctgttagcttgaatagtttagactgaatttccagtatttctgaaagcagtctttataggtaccgagtagttaccacataatggctgatttacactgcattgctttagtgtgatggtgattccttttgccagagtacaaccgatcaactttcgctagcaccgatcactagctggaatgattttaggctgtttaagtaggacttaccgagatgaatgaatttgtggaactcggaactgattttatgtctgcagatcacagagtaccttgaggagaggtgctataaagatctgagacatgagaatttcaccttggccaaagttgtaccatgtatatacaggaagcttctgtgttcatgcaaggatcatacgtaagtgtaaaggctctattctgccagtcaagcacccatagcaaatgtttgctgctgtactgaccatattattcttgattcagaccattgctggccacaagcacattgagcattattcgtactcttctcgatcagagaatgaatgatgatttgcgggtcctgggttgtctaatgcttgttgactttctcaacggccaggttattgacgactgtaacaaattgcacctacttggtttgctagaaatctgccatctgtttggtttaatttgagttcatgtaggttgatagcacgcatatgtttaatctggaaggcctcataccaaaactttgccaaattagtcaagaactaagggaagatgacaaagggttccgcctccgatgtgctgcacttcaggctcttgcttctatggtaagaaaagtttttacttgattctctgatgaaatggataaggtagtcttatatgttgcgagctagccatttagggctaatttacagtagatttgttggaccagaaataataatgtagaacaaaataaggaactacattcaactattatacaatttgttttgcaaatataacatttttttaatgttggttatattgatattgcttgagaattcccaacagataatcctatacttgcattactggttcttgccaactgatgccattaaatcagtctattgattaaatttaactttttaatcctaatatactcatttaccactttgtaatcaggtccaatacatgggtgaccactcacacatttccatggaacttgatgaagtaagtccttatcactctgtgttgggctagaatgttaagagttaagacttaattctcattcatggttgatagatgcctcctggtgaatatttgttctcttgttggaattgcataagattcatctttggagcatagacaagttgatgccattaatactacagatagacttgttgaataagtggaagatatttgattagtctatgaatagaaaaaaaaagtagcatgatagtttcatttgaagtgcgccagaaacagtaattcagtaagggttctgattagtctctgaattcattcttgaacccaggttgtgtccgtgatcgtaagttgttatgaggttaatcaaactctctcaataaaagaggttgtcaggcttcaagatgatgatgatttggtaatcaatggaagtctgactgggttgccagtatctgggcaaaatagtgccaaagtggcatctgatacaatgtgagaatttctgctaatgtaacggcccatttccacactcgatttgtgcccttgtcatcttaatgacttagtgtgttgacaggtctgcatctgaaaatccagcacattgggcaagggtttgcttacgtaatatggccagtatcgccaaggaggcaacaacagtgtggcgtgttcttgatcctcttttccgcctttttgatagccacaactattggtctcctgaaaatgggattgcattttctattctacaagaaatgcaggcactgatggacaaatcaggtgcaaaatttttcacccatgctatttgtttctctttttgtgccattttttttggttttgttagtgtttaacagcagaaagatttagtgctcttctaaatcttgtttcttaacagggcaaaatggccatttgctgttatctttcaccataaaacacatagatcataagagtgttgccaagaagcctgccaagcaaacaagcattttaaaagttgcttcgcttcttgcaaaacatgcaaagttgaaggcgtcggtgacaatagcaagtgcaacaagcgacttaataaagcacttgcgcaaatgcatgcattgtgctgttgaatcaccaaatgctcaaaatgatgttgacaagtggaacagtgcactttatgtggccttggaggagtgcctggtgcaattgacagaaaaggttcattatgctgtattattcctttgttacattactacattttgctttcatcagagagacattaaaggctgttaattcattgaataggttggtgatgttgggcctgttcttgacatggtgggagtaatgcttgagaatctctcttgtactgccaccattgccagaacaacaatttcatcagttttccgcacagtgcaaatagcagcttccatccacaagtcattgtacaaccagaaggcaagttttctagtgtgttcaccattgcaggagaattttgctattgaacaaaagtgttaattggcaattccttgttaatatttcaggcatttcctgaagctttgtttcatcagcttctcttagcaatgatgcacccagacaaaaagacaagggttggttcacatcgtgtcctatccaccattattgcaccttcacttctatgcccatggtcaggcataagttttcctatccctgtgaagggcaatgattcacagagcattactttgttggctctttctgccttttcttctgaggccgtaatggatgaagtccggatcaaaagcaggacccatgaacagttacaaaacaatgtaaaaccagaaactgtagttggctctgagaacggatacacacatacagaaccaaattcaaggaagagccctggtcttggaattccattgaaagatgaagtatgtactccaactagtattcttattgaacttggtattttctggtcttggtgttttcggatgtccagctgacacattttcttccactgaagcagaatcttaagttcatgaagctgaacagtagccaacttgttctcctcctttcatcaatttggagtcaagcacctctagaagataactcaccagcaaattttgaagcaatgtgccatacctacaatattgctttattgtgttcaatgacaaaggtaggtcacttaatctagttcattcttgttatacaataggcaaaaagaattgttcaagtaacttgacttaacattgttctgcatgccttgaaattatcaaagaatagccaaagggaaagataccgtcttttcccttttggcatggagttatttcatattatataatatttttttatactctatttttacacaagatagattctttagaatattttattgatgtaataggcatggattaacactttttttaagatttccctgctagtgtgagtttgactagtgatgtcaacttctcctttggacttgaaattgtgtgctatatttgtgagattgaccattgaattttcgttgcagagctctagtcacgcagcattagttcgatgtttccagttggccttctctctcaggaggatgtcccttaaccaagaaagtaagtttatcctcatttgcctgctctttaaagtttttgcttttgtatatcaaaatgatgatgcaaaaaaaaagtgacaactagctagggattttttccaaataggaatatcattttttctaataccagtatattttagccattgcgtccaacttcaagtttattatatttcctatcaatctagtcatttgatacctgcttgatttattcttacattttctactgtaaataaagatggtttgcagccatcacgtaggaggtgtttgtatacaatggcatcagcaatgctgattttttcagcaaaagttgctgatattcctcagacaattcctcttgtgaaagcagcagttccagagaaaatggttagttgattcctgattttgaatatgcttgctctatatatatctctaatgtgacatttttcaatttactctgaattcgcttattgatgtttttgtaggtcgaccctcatctttgcctgattgatgattgcagactcgttattagttcaccacagtcatctaacagtgggatagtttatggttctgaggaagatgaaagtgatgcacgcaattttctttcttgtgtaaataaaaatgatacacagttaaaagaaattgtgatatcccacttcaaggagaagtttgaaaatctatcagaggtatacattcagatttacattatgagagcgtgttttcttgatttctctgttcacaatcaagaagttatttgacgattaagtgtcttcactgcaaattgcagaagtttaatggtatagaagagcagcttcttcaggagttttccctggatgattcattccctctcagtgctccactattcatggaaacaccacactcttgttcgatgtacgctgaaaaggatgaccattgttttgatgaggtccgtactgattctctatagttaggtgattttttgttatttatgaattgctgttgtattaacttttttggttgcatctgcgtcccttgtgcttccaggaagtcattccttgtgagatggatgatgacgatgacatcgtttttgaacacagtggatcgcaatctgacaggaaaacctctggatctatggcttcatcagatgttctaaacgtcaatcaactaatagaatcggtatgcgccatttctgtctacaacaatggcacatgaagatcactcgctattttctagatctcttacagtcccctcatccgtttgtaatcaaacgacttttttttttcttcaggttcatgagacagcaaggcaggttgctaatgctccagtttctgccaaccttgtaccctacgatcaaatgaagagccaatgcgaagccctagtcatggagaagcaacagaagatgtctgttctcctgagcttcaaacactcgaggaccgattcccgtggctcgactgcagaaaatggactggaaacaaacgaggcatgttcatcttgacaggaaaaaaaaaatctatccatcactactgaaatctttgaaaatgtcctgaaaaactcatcaacatcttgttgcagtcatctgctcggtctgagcctgagacgcagtcgacgaggaaggagcgaatgcgacgcagcgactcggcatcaagcgaatctgaccggtcgttcaggctgccaccggcaagcccatatgacaagttcatgagagctgctgggcgataggctggtgcaatgcaatgcgatggcgccaaggatctgatactagttttcaagcctgtatacagaaatgtttttacagatacaagtcttctaaagctgtttcttttcattgtcgccttgtattttttattcttctgagtgtaaatttctcgagaaggtgtacaaatttctgttactgttgtagagacccagaataaataaaagtataggcattggtgcaatctgatggatgaagttgtattaaatatttaaatgtccagaaaatatattgttggagacatgtcacgagggcctttgaccgagcctacagaaacaggtctacaattgccagggcgaagcacggcggtaaagcgctgactgtcacaaagatagaggttatgggcgaagtcaccaggtggagccaaagacctttgtcccaagccgaaggactcaaagccttaaagggccaaccactcaatgaaggcccacttagcagctcaagaagagccctaaggctaatttgttcataattaccatcataaatatctcatatcatacgagtaaccatgtaaattttgatgtatttaataaccctagggcacatgaacctataaataggccccatagggcatgtactaggggatccaagaaatttccaatattaatatattgtttttacttttccataaagtgaaaataaactatgagctaggtttggcgaggagaggaataagcaaaagagaggataggaaaacaggaaacgggcctgggcctaaagcaaaatgtaattgggctcaaaaaagggaaaggagggctcacgtatgcggcccatatttttgggcctccgcctcctctcgtcgtctctccgtcccgagctaagtccgtaaaaggtcctcgtcgtctccgcggcgaggcgatcccctcccattccaagaaaccttcgcgccctccaagaattccaagaaccctcctcctcctcctcctcctcctcctccaatggagagcaggctactgcgctccgcggcgctcctcgcccgcgccgcgcgcctggcgcgggccgccgcgacctccaccggccgcgccgtcaccgccgagcacctggcggaggtggtggcgagcgccgccggcgaccgcggctttccagcggcgccctgcgccaggccgccctcgcgctggcccggtcttccgcccccgaggcgaggccccgcgccaccgccgaggtcgtccgcgcggccgccatggtgttccgggcggcgcaggaggcggggtcgcccggcgtcgcggaggtcgccggcgacctggcgcacgccgcgcatgactgcgtccgcgccctggtcgagtcgggccctgcggcggagagacctagatgcctgcttcgtctatggcgccgcaagaaccgccacaacaagaacgcggcgggagaggctgatttggaggcacctctactccatccccacgagaggccatcctcctcctcctcgccgatcggggcttctctatcggaggtaagaacaagtttgctcagagctttgtgggatgcagaatctgatgcatgttgcagtgaaaccaaagtcacaagctaaatctaacgcatttacatcataacactgtatagcttttaggcaaaatttgccataggataaggtagattcgtggcatttaccgtgggacaatgtaaaaacatgtctttgccatagaactctctggttttgtgataactaactcactgaaagatactatgatcaatgccttattatgtttggctcaaccaaataggtttttttttatagaaaagacagcttttagcccatgctaagttgcacattagtctgagaaaaataataaaaatatgaacagatgattgtatggtgaattggtgatcacagattataaccatgtatattaaatctcataaagaaccatatctcatacagattcaaactatattagcgttattgatgcacatgactttctgtttggaacagtgagcttaaattgggagtttctacttgcagattgcttccttttcattccttgatttgccaattgtataggtgattgcttcttttccctttcttgatttgccaaatgtagaggagcttgcttcttgttccttccttgatatgccaattgtatagtagtatttagttcttaattttatttgattttcgttttgcagattattgaattgtctgagagtgagagagactttatcaactatggaatgtttggtgcccttgccatcttcccttatttgacgaggacaggcggactcaagagcgcatactcccccttgagcccaagcacattccatattattttctgtacatggtggatatgtgtgggcctcgatgtactttgtggcaatagagggagagccatgatgaagaacatccttgccttcatcttggctttctatgctcgagcatctgctagacttgcaatcttgggcgtctcactgctagtgatcctttacagtcacttagagctagctcccaatgaaatctacacactgtacatccttttgggggccgctacatgtatgcatttactcgtttgggctatggttagttcctcaggccttgtttcttatttccatattgcaggttttgttgttttgtagttacaaattcttttgttctcacaggattacatgagcagggcccccggagatgctgctgattgatcccaatccaattggtatgcgaaaagagaggagtatttggacagtttttgtcaggaccaaaaattaggagtggctgattgttgataatttgattcattctttcattgggatcttttgctttacctacttcttagggtctagtacggtggcacaattactgatacatggcaaatgtagggatcttgccctttaccatcttagtgttctagtacagtggcacaaatactgatacatggcaaatgtagagttgctcgatgttatctcactcttcaaccttctgcaaatgagttgcgaacatactgatgctcgatgtacattgatggcataacagtcccaattcagtgttgatcctacaattgtgattatcgagtgttacaagttagaagtagaacctttgcatggtgtaaaactgcattgcttctggtgaaattcagcagttcatatattattctctctattctgtgataacattttattaggttttctgttggatatgtgcattcaattgtttattacattagcctgttacagattacacacccagacaaagggcgccattgctgggtttgtttgtttgttttgggtggggtgttagtatgtaaatacagcaaaaatttatgtctgattcggtggtagtttagttatcttgtgacttctgagctgattttagcattgcacttggaggaccttgtgagcctagcagcctgtcagtgccatttctttcgatatattctttgcccccctcttatttatgcagtggacccttgtgcagtcaatgaattgttaggattacttctatgtcttttatagatactactccctccgtttcatattataagccgtttgatttttttttctaagtcaaactttgttaattttaactaagtttataaaaaaaaacttaacaacatataaaatatcaaaatagtttcattaaatctaacattgaatatatattaataatatgtttgttttgtattgaaaatatcattatattttttttatagacttgatcaaatttaaagaagtttgacttaaaaaaaagtcaaacaacttataatatgaaatagagggagtacctcacagtgatatgtttgagggattcaaacttttttctccggtgctaaccgtcccattaatcatctctaattcaaaacatttccatcttatatctaaacccagcgcacatctaaccataccttattagtgatgggtattatggtcttaatttctccaaaaacaagcaacttttgacagtattttggggcgttctcagtaactttaggaggaactaatcaatttacataatgccttaacctacagatcttgttagttgttcacttgttatccggtcattgcctaaaaaatgatacttctccaacccccccccccccccaaaaaaaaaaaaaaagagtaaggtttcctacaatgttatggttagccaaccatgttgtggttagcaaacaagggatcctctttatctcatcttccttcgcgctatctctctcttgcttcgacagtactgacgtattgatctgttttttttaacctgacaccaaactacaagtatcttgaatatacgtcctgtttagttcacatcaaacttcctccaactcccaactttccatcacatccaaaacttttctacacacataaactctgaactttttctaaatttctccctaatttcagaaactaaacacagtcatagtgtgtttgcaccgtgcagaaatctgggtgagctcactaggaacatcaaccagtaaccatatactaatagaaaaagattacaaataattttgcatcaacaatctcagaaacatctgtctgggatacaggaagaaaaaccgttgtgtttagaattatagcgttgatttttttttcccgaagggatttactccttttaacaaatactgaatgataaaattcattgaagaaaaaaacgaacgaatggttctcgtgcgaaaaacggattttcttgggttagaaagaaagcaaatgctgcgggagaaagagagatgattattcgaagcgccagtgagtaggaactatcacccatcagactaaaagacaccagtattaagctcgccatagccccaaaaccctgcagaaaaaaatatttaaataaattagaaggtgtaagtatgtccgaatatgtatgaaggtaattgagataactggatttatatttagggtagtgattttcaatcctcatatgacccagaatttggcactaataattactccctccttattatattatacatcgtttgaattagatttgatcaagttaatagaaaaaatagcaacatttgtgacatgaaattagtttcattaattttaacattgaatatattttaaaattaaaatattacctttttttttgctacaaacttaaacaaacttaaaaaatttgaccaactaaaaactcagcagagggcgtaattaatatactagctgctcgtatcggttaagctaattaagttacccggacgaagcggcagccagccttgaccgagaagcaacgccggtcgttggctcgcgtttggtcgccgccggcggcggcggcgtcgtcgccttcttccatccggcggaggagtctctcgagcagcgccgcctcgctgtcgtcgatcgtcaccgtcgtccgtcgaggagcggcggcggcatcgtattgccgggggagcatcagaacgggcatggttggccgccggccgggaaggggcgccgttgagcggcgcgcgctgcggcggatggccggacggcgccggtcggtctggtcgtcgttgacgacgacgacgacgatgaacgcggcgcggcgcggcgcggcgcgtgcgtacgtgagcgatgtgagatcgatcgcctaaagcgcgcgtaggaagcaaaccaaacaagttatatatgaccgatcgcgtagtagtgcgtctcccgtgtcgggtcggattcaaattaagggtttatttggtttggagccaatttttgtcctaccaaaattttgttactgccaaaacattggtaaattttgacactaccaaattgggtggtgtttagtttgaactattgcaaataaaatttggtagcaaaccaaacatgcaattgctactattgaaatcaaacatgcaattgctactattgaagttaccaaaattttagtagggtaataaattggtatcaaaccaaaccagccctaaacttttgtgtttttcgtgaagattttgttactcgagttcgaaccaaaagacgtaccccacccccgttcgatctatgccacgtgcacgtcgagcactatctgaccgtccacgggataatcaatgccacgggagtagaggtacgagcgcacgcgtgcccgagaggccattgggagctaccaaattataatccctacatatcgaaaacggaacgatataataataaatgattaattgattaattatcctctgcctttgagatcaacggcaaactttaccgttgctttcctgtaggccacccatcttgagatcaacagctgcaacagcttggcctcaccagttactaattagcacctacttaatcaataaaaccatgcgtttctctgcggaaaaagaatcaacaaacaaaataagcggtggcagggtgcgcataacaaaagagatcgaattgctttaagtgaacatgggttcttttaactgaataatatgaacaagagctttggtaaatcactttttatagtatgaaagaagctagtaaaaacataaaatatagatttaaaaaggataacaacgaaaggtacaatatggtgacatatcaaataaagagaatattcttgcatcataaggtggtaattaagattaattggctgctccatcaacgaaggatttttttttcttttcatgttatttctaaatgaatggagattggatgttcattcatattgttggcgtcaaaatgcgagagggaatgtattgtgtattcctcgtgctctgtcatcacagattttgtttcttgatttactagcaaacatgcccatgcgttgcaacgggtgaaaaatcgtaatgatatatttttcatgcataaccatgtcgatgacaatcagaaaatcagaaaattgaaacatgttaaatgtaatagcccaacctcgatgatggttatggcaaccttacgatgtttgctttacctaaaataattgaattattcatataacaacatgcatataatctaaaatattcttttaatctcattcttacaaccaatcaaatcctacactgcctcgtatggtcaagtctacacaaaatagagtcactatgcactcttctctaaataacaattagaatatgtttattttctaagattatttccatataacatgttatcaagaataataatagttatacttcaaaaaatagtatgataattatctacaaagatgtgcagggtctccactatagaagaatagatgacgagtcctggagatggaaaaaaagtggttgcaacctatccaaccagctgtccataaatttagcatttttttctaacggttcttttcctcgtatgcttttttttttttgcttttttctcatgtgtttttttggactattgaacttttttttctagcgtgttttcttttgcgcttttttctgacacttttttctcacgtgtttttttaaaccgtttttattttctcgtgcatttttttctttattaatatacggtagaaacatagttacattagattagattagagataaagaagagatataaaacgacgaattagactttttccgccgcgctttttttcgccttttttttctcgtgcatttttttacgaacggttttttcaccactttattatagtgtcggacctttctagatataatatgattcgatttgttttttaccgcgtcacatataattcctttttctttagaatcagacattttatttatttttttcgccctttttttactgcgtcgacgaagttggattcgtttcgatttttcttccttttttttgcctttttttggatcggacatatttgtttttttttcgcccctttttttatcggaattttttttattttttagcccggtttttttcactcggttttttccctggtcgatttttttttaccgcgtcacatgcaatcaggaatcggataattttttcgccctttttttactaactcgtttcgtttttttgtgccgtattttttggagcggacatttttttctccccttttttttcgctccgattttttttggtcggactttttttcaccgggttttttcgccctttttttactgactcatttcgtttttttccccatattttcttggagctgatatttttttctcctgttttttcgctccgatttttttgatcggactttttttcactcgttgtttttcgcctgtttttttcgtccggttcgtaatttttgggtcggacagttgttttttttccctccgtttttttgatcggacatttttttctccatttttttatcggactttttttcgcctgtttttttcccggttttttttacggacaatggaagcacgtctttatttttaagtagtagagattttgcttgagaaacatctaattttatcaattatttagctgttaattaatcactgtcatgggctcaagccatacaccgttgattctactatgtcacgcatggataaaagcaacggcaaagtttgccgttggtctcgaaggcagaggatgcggacccgtagaactaccgaactaatccctacgtatcgaaaacggaacgatataataataaataattaattgattaattaagtgtcagccaaaaataaaaaataaatgaaaaaaaatgaattacccccataaatcgtggtcgatcaaattaccccctaactcaaaaaccagatattttacacactcaactatgcaaaccgaacaaattaccccctaactcaatccagagtggtttcggtcctacgtgacagttcaatcagcatttttttccaaagtcggtgggccccacatgtcatactcttcctctctccctgctcggcttgattgtagagagagatggaggggagaggaggggaggggagggagaagagagagataggatggggattgaggaggtatgggataaaggggagagaggaagggtatgacatgtgagtcccaccgatttttcaaaaaaaaattgctgactagactgccatgtaggattaaaaccacaccggattgagttaggggataatttgttcgatttgcatagttgagggtgtaaaatgtctgcttttcaagttcatggggtaatttgatcgacggcgatagtttaggaggtcaattcatactttttccaaaacaaattaatacgatgcatgtgtgcgctgatcttctaatcgataaatataagggattttaaacaaatgaaacatatatatctcatccatacaaaatcctccctcgtttcatgctggtgtatgctgctcttctaatcgaatcgtgtcgcgtcgcaagcaaggtttcccaaaccgtcggggtcggggttaccgcgccctggcggtaagcacggttaccacgcggtaactgcggaaaccatgaaaaaccgtacgaaaccgtgcaaaatttatcaaaaatttaaattactttttaaatttatttgaatttaaggagattaccgcggtatttcttttaccgtaccccgtggtaaaggagataaccgcacggacggttaccgacgttaatgtaaccctggtcgcaagtgaaagggtgtgtcagtcgttaggctgttctctgtcttcccatctcgaaggcggacgcacgcaatcgacagagacgccgatgccttcttcagtgtctctactctgtagacgatacgtgagatttactggtgtgcaatgaatagcctatcggttcaggattgcggtggaggaaacgatgaaaaagaacaaggtgaatgcgcacgctcaatcagaagtaagcctgaaacttttttttttgtttttcgctgggcggccgaacttgtattaaggggggcaagtaaaaaaaatacaaaccttgcaagttatcagttttaaaacgctgaggatgaagcatcccggcttgtaacttgcatattggtcacacactcaccggtcaaattaacagccaacaatcaactatatccattaacttgatgttctaactacggagtatatcagagaaaacatgcttctattaggaaaaaataagcactgaaaaatacatattgcattattatcgactgcaatataataatgatgcactaacgaacttgatggatatggaagggaatgctttttttactaatgaccaaaatatccctccttgcaataaatggcaaacgattcaaaatggagctaacgggggcagtttagtaataactttcaccatcaccgcaatccagcaatacgctggaaacgtgaagattgcaaataatttccatttgccaccctacttatcccttatttaccaaacgacccctcgtcttccacctcgagccgcgtcatccaaaaccgcaaaatcgcgcctctccgccattcccaaacccctcgcctcggctcgcctctccccatccggagctccttctccgcacacggccacgccattgccatctagcccctcctccttagcctcttcttcttcttcccttgccccccataaccaaaagtccgattgaaatcaagaaatcctcgacgaccggaggcgatcaagaatccaccggaagaagatgcggggtttccccgttccggtgacgagttggagctccgccgcgctcctgggccgctccatctcctcggccagggacgcggccgaggcctcctcccccatcaccgccgcggagatggtccgggtggcgaaggaggtggccaacgccgccgacgcctgcggagtctccggcaagaagctgctggaggctgcggaagcgctgtccaggtccgacaccgacgcggagccgaggcggcgcgccgccgagcggattttcgatgcggcgtccatggtggccaaggaggccgacgcgtcaggagcgtcgggtctctcagatgcggcccaaaatctgacctgcgcgacctacgcgttctcggtagccgcctcgggatgggggtccttgccggagtccagcacgagcgggagggacgccggcgacctcctaaccgagccccttcttgggtcatgtcaggacaagaacgagaagatgaccggcgagggcaaggacttcagcgagatgaggaatagtgcagcggactctgatccacttcagcaatcggaggtattcaacaatgttttcttgagttcttgattgtgcattcaacttctttctcttgagttcttagttgtgcattcgtcgggtcggtatcttgagttcttgattatgcattcaagactgttcaaggagtctctgcattctgacactttttgcattctgaaacgattgtctctttcttctaaaaaaattgcattatgaaacacctgttctgaaatgattgtgcctatttggtcctttgcagattaaggagtcgtccctttttggaaaatgcaaagaactcctcaattatggttttcttggaggtcctgccctcctaccctatctaggctctggactgaggaaaacagtgtcaccctgcagcccgtctgtcttccactacatcttctcgtcgtggtggatttgcattgttgtcggtgtgatttgcagcagctcagggagagcaatgtgtagagagagatatatggggcttgatcttatccgtatatttagaagttgcttctcgacttgccatgcttggcatcactttgatggttatactctataactatctggagctagctccaactgaggccatcggattgtatatcctttgggggatagctacctttctgcatttagctctttgggttattgttagtctcattaattgtttcttatttgcaagttgcagtttatgttacaaagtattaacaaagaaaagtttttatcccttttgcaggatcacatgaacaaggagacttgaagatattacatatcgatagaatcacttctcatccaaatgataagtagcaatgaattgttaggacaattgatcttgctccctcctactactactacagtcaatggattgtcttgtgcagttaatgaattgttaggataattgaccttactcttacttcctcttattgctgcagtcgatgaattgtttgttaggataattgactgcagtcaatgaattgttggtactattgctgtcccttttttaaagaacagcaagttaatggatatagttgttgattgtcggatggagttacagattgccatacatgatacatgtcaaactgatgttcatttacagctgcttcagaatttatagaatattgctaaagtgtctcatttggcaatggtttggaaagtagggaactctaggtcagagcatgcaagtagaaggtcaaggttcagcaagttttgagtcagtttttataatgccttaaactacttatctggctagctgttccagtcattgtccaaaaatggatgttgtcccagaaagtctgaaaacacttctccctagtatttccaaccttattcttctgaacacgccttgaaagccaatgggagcagcttactaacacttaaaggtttcttagcattcattgtaagcctgtaatatcgtggtaggtatacaaggaatcgtcttccgtagttttttttccccacagtaacgatgcattgctttttagctgataccaaattagaaaaccctgaacaaagcgtggtgtgcagaaatcccagctcatgttctggtcattgagcctactaggaacgccaaccagtaataaccatatagtagtaaaagatttcaaagttgcagtgcaatgggaaaacattttgcaccatcaatccctgaaacatatcgccgattggaatgcagcggaacaatccctgaagcatcttttttttttaagataatggattatattaacccggcttctacaccttagaaagatgtacacagcccaaaccacaatcaagagtatataaacaatccctgaagcattctattggagttacttgttcagaaattgaaccttcaaattttctacagaagttttaatttccaaaggtaacataaatatgtttgctctcacaatgagaaacaagggaacaagtagtctttttacaaatgctgaacgcaaaaaatgaaaacaaatgctggatggtgttcatatgaaaaccggcttttattgcgttagcatcaaaacaaatgctgcgggaagaagagggaggacgattagaaacggcagtggtgggcaggatgcagggtttgtacgatacccgatgataccaaaagacaacagcactaagctccccatgaccccaaaaccctgcaaaagaaaatttgttgtatcatactcctttcgtttcatattatataagtcatttttatctttttttatcaaacttatcaagtttatagataaatataacaaaataaacatattattaaaatatattccctctgtttcatattacaagttgttttgtttttttcatagtcaaacatttttaagtttgatcaaacttataaaaaatatattaacattttcaacacaaatcaaacataatatcaacatatattcaatgttacatttattaaaactaatttagtatggtagatattcaatggtagtatctttttcataaaacttggtattgaatattaatttcaacaaaattaatttggtgttggagatgctactatttttttttacaaatttaatcaagctttaaaaagttgattaggaaaaaagttgcgacttataatacaataaaacggagggagtattaattacgagttgtaattaactaagcatatctgcaaatgtacgagcatattgctaattacgagcacttgcagtgagagaagagaactaacgagacttgggatacatataattggcgaacatatcctatgcatgcaagcttcccatatacaccaactagcaaatgtcatgaaaaattctagaaaaaattgggcatttacttctagtactactacacatatatgcaaagtctcatattcaaacttattatattttgagagaatcccttatatgccactagaatttgaccagttcccttatatgccactcaaaattggcttctcccttatatgccaatagtttaagttttttcacccttttatgccactcccaccactatagtgttagttgactgttagtcaaaggttagtttttttcgtaaatgaccaatatgccctctcaactaaaaaaatgtgtaaacttcaaaaaatcataactaatttattttaaatcctttttgagtgaacaaaattttgtcagaactagtgaaaaatgctctttatattaaaaatattgttggaaaactgcatgtttcatgcttacatttaaaatttatttgtgatggtaatggctaaaattgcatgtgatgtagaaaaaatcaattttcatatgttgtatccaatagttatattagtactaaaatacctattattggttgtatactaattctcaagggcaaatgcgtctttttcaatgaagttaacgatcaactgacgatggactgacggcaatggcataaaagggaggagaaacttgaaccggtggcataaaagtgagaagccaatttaaagtggcatataagggagtcggttaatttagagtggcatataagggattctcccttatattttagtcgtaacaaaaaagtgaaaaaaaatgacagttttgagggtaaaaatctatcataattttattctttttattatggctaaaatataatgaatttgaagataatatttcacgcgtagttcggtaggtgtaatactattataagtatttgtacatttttttttctaaaaatttcagtgatatttgctagttagtatgcacgggaaccttttgtgacatttgctagccggatttgtttatctgtaattatggactcgggagattttttcgatcttcatgtggagcaagaaaagaacagccttaatgaaataattactagctgtatacatcggttaagttggtttacccggacggagcggtagccagcttcccgtgagtagcaacgcctcggagtcggagtcagagtcggaggcgaccgcctttggtcgccggcggcggcggcggcggcgccttcttccatccggcgcaggaagctctcgcgcagcagcatgtcctgctcgccgccgccgtcgtcgtcccggcggtgtcgccggaaaaagaagtagtgcatcattgcaacggccatggatggatggatggatggctagctaggcgcacgccggcggcgagcggatggccggccggggtcgacgacgacgaacgcggcgggccgagcagcaacaggagaaggagagatgagatcgatcgcctaacgcggggcagagcaaaaaccagcagcggtatgtgtatatgtgatgtgatgatcgcgtacgtggtcgcgctcgtgtcggattggaatattggacccgataacgagctcggtttcgggaggacacgaatcgaaggagtccaggttgttttatgccactgccacgtactccgtatgtggtgaccacgatttgaccgctggctaactgattcatgtaccatgttgaatcacacgggaaatgctccgaacacatgttttgatgtatcacatgaaaaaccaagaaatttagagctcatttggaacacaggattttgaaaacgcagtaacattaaggactccagcgaaacatcatatttacaaacgaaaaatgatttgtaaataaaacctttatatacgtgttcttaacgatctaaaagcaaagactgaaaaataaaccgcgatgaaaaaccctaaaatcaactcaaaaattcaaattttagcttataagtataatcataagccaaaaaatggggctacaaatatgcaagattatgatataatgttctacacaatcctgcaaggttccaagccaccgaaatactaattttggtgcattttggatggtaggaaacaaacatgggaatttaaaagaaaattgttcgtatgagctcatgttcattttcctatacaacgggggaggatgccaatctatataagtgttggcatctctattcatttgatccgaagagcccccatagggaagttcatctaaggattccaatcctttattttaaaaattcttcaatccaaaggagcccttaaaatttacgtgttgatttgttagaacaaggataaggatagaaagggagagaatggagtttcaaagaaaattgaaaacacaagattagacctcatgctagcattcctacgaaatagaggcaacttttttatcctatgtatttcctttgaagcaatcatataaagcaaatggcacgcataaagacaattcctttggattaaattcgtccatttttcctccaaaatttcttcgactcaaatttcgttaatacaccatcaaatcaaaccagtcccaaattgaatgtcttctgtttgtgactcgaataatgtatgctcttcaactttttggttgcaatcaaaatttaattttaaaacttaattttaatgttttgtctgtccatattcttatcgctggatcatatcaagtagttccgcttgatgcgcttcaagagtcatgctatgtacatgtggtggaataaaaaccttcgcacgagcaaggcgggggttgaaccaaggacctctcccccgacgagcatggcgcatgccgttgagccaaagacatctttttgtttagtcatgcccgatgtatagtagttacgttgtaactataatacaatgtagttaggttcgaaagttttttactcaaaaaacatggttcgaaagttttttactcaaaaaacatgctaaagacttttagacagacccataaatacaaatatttatactctaacagttgagtcaagttggtcaagctgagtcaagtcagagaaaatagaaaaaaagagaaagccaaccaaagcacaaccagagttctccgcggggtggagcgctaagaaagagaaaagcgttatcgctatacgaaatgaagcagcggctagcacgctaagataaaccacttgaatatatagttttacgatagacagatcaaatacgcgtagttatgtgaaatttattctaaaaattattatcaataaattattcttttagtctctaataatcgttaacttgtattactccgttaaaaaagatacaaccttagccacgaagctaatcatatttatgtccagattcgtagttatgattgagttttttttttttaacggaggggtacgtaattaacttgcatggccgagcccggaatgttccgcccctctctcaaaattcaaaatactacacgtactccacgtatatactacggggaaagaagagtcacgcacacgtgacaggtctcagctagtcaagcgagcacgaagccaaccgcagcagttgggagacggcgccaacatctcgcgagacgatccaacggtaaccacacaccacaccgcctcaaacccattacccatcccccatccaacggcgctcctccccccacccccaacacgatatcctgatattctcccggttttctcgcgagcggaagcccctcttcaaaaatccgctaattttacattaaaccccctccacccatcctaaaaaagtgaaaaacacatccacaccctcgccctcgtaccaacggtacgcacgcggagagccccgcgcgtaatttgtcaattctccaggggctaaattgcgaagcgtgcagcacttttgcttcgctagctgcctctcctcaagtcgctgcgagtgcgagtccacacaacactgtgaactcccccctctcgagaaaaaaaaaaagatccaaaattttttcgcccttgggttcgaaatcttcgtgccttcctcctcctcgcggcctccaattcgaacgccccagttgctcgcgccgccgcggattccccagatcccacctcctccccagctcgcgcggcccaattcgaaggcggttctagggtttcccggcacgaatttagggtttcgggggagcttcggggggtgttgttccttgttccgcctagggtttggaatttggggggcgtggagagatgggataaggagggtgttgggagggtgggagctttgcttggggtgtgtgtgtgtttgggtggtgctgagctgagctagggtttggtggtgaggtgctgaggaagggaggtggggggtggaaaatgttctactcgcagttcatcttggccaagaaggggcccctcgggaccatatggatcgcggcgcatttggagcggaagctgcggaagaatcaggtcgcggatacggatatcggcgtctccgtaggtgggtgattttgctgtttcacaagcttttttcttttcggatctactaccatttttttttgtttctgttcgagcatgttagggcctcacacgtagactgctaaagcattgtctttgctaatgctcgtttgtgctgtaggagggggaaaacattttttttctcgcttatttatggttatatgtattcttactgctcatatgttgcgattaattagtaaaagatgttagcttttttgggatagtgttagttcctagttgacctagttgttgctggcagagcaaccatatttttacaactatgctaatgagctgtctcttcatttttgcttatacgtgctcgtctgctggattatcactgttgtactacagtaataggaaaagaaaccacctgtatcaatgcagtcgctgattagcttcttacaactgatagattggtaaaaagtttcaaccttgagttgcactggtcatttggttgttagtattaatgcttcatgtggattttgttatgccatcactagagttgtaaaagctatatgcttttagatgtctgacaaattgcggatatagtgtttttgttctttctcggggacaaagaaaacactaactccctcactagttacaagccacttgttcactaatatgacacaatattttattttattatgtgcttttacagtatccatcgtcgtcgctagttgttttatagatttaatcgtaatagttaagtacagcttattagattgagaatgctggtagcttgccttcaagcagaactactactggactggttttatcacggatatagtggtagagatgagatctctttttttcctctgatgttgctctgttgctaatgctattatatgcaagtcaatccagttcaaaatctgggtttacgatgaccagaattcaatacttctgtgaaggtctcagacaacataagtgcacagggtctgtagagaaggaagcaaaattgtagcataggatttgattgcatgatagctgataatgcatttgtacacagtgaagcttgtgttaaggattggtatctgtgatgcatgtggtatgtaaggacttggttacggaattctagttgaagtgtagcaaacatgagaaagaacatcttttttttagtgccatgatcatgcaatattgtgaagttggttaaggctccgtgatattagctgtcaagtcgtgtctctacacagtgaagcttgtgttaggaataggaatgtgataatttgtaaatgaagcccagcgaacagaaagttatggaatttagaaaagtgtaaagctagttaaatgttgttttgaccaaaaaaaaaaactacacaagcatcattcggacaaatttcaagtaatattggagtgtatatggggaatgccatgagctatccatagattccattcacaactggattggggtgtatatgggaattttattgaaatatgcaaagaggtgcgcccaactaaacaatactccaattcactttcaccatgtacatcactttcctgccaaatttagaaagatatgaggattccaaatacagattaaaataatgttccaaaggtaccaactgatccgtctcattattttttaaagcataccatatacggtcaatatagaggatgcgaacccgacaataaagatatagagagagaggactcaagaaaacctccagtagctgtgtcctgtatgcatgtgcagcaaaatgagtaaaccagaagcttctttggttattttcccatttatttaaaggtaaaagcaggctagagtggcaatggtttgatggagatcaaggctgataacaacattatttccatctccttataccaaatttaatacgtgtctgtttcattgcatgcatattgaagggtgactagtatacgacttgaaccatgtaatttgtaaaataaaataaatacgtgcatgttaacccacttcttacttagaagatcactcaaacctacataagtgtatgtagcatgtaagagccatcgagcaatgtaaggttccatgccatatatgcatgagttatatattgaagaaggaaaagaaatcatgttttgttcgcatatgagaaaaatgcaagctgtcgttgtcttctcatttcgttcttaccattttgggatatatttgttttctttcgtgcaattactgtgtagttacttttatgttcctagcctttttttttccgtattgcttgcatgggttttagtaatgcctgtgtcaatgcatgctatgccaattggttgccagctatctttggtagcctttaattttctccaatggaaaaatgtgatcaatttacttttttatgaatgtaaatattccactacatcggaaatctagtggtgcggtgtacgcgtgaatgcctttggccttgtccaggcactacatatccttccagctgtcctacatcatcctgtagctgcagctgcagtcccacattgctcagtagatccacccctggccaccacatgtccttacatctaatatgttaatttcttctaaaaggatagcattgatgatagaaagcgctgtcacgccatcattgggcaagcaaaccagcttatagcagttaattggtgaaaaacattcaactccattcctttctccaaagataaaaatagaagtacttagatgccacatgtgtctgttatgattctaaatagtactccactatttagtagtataaatacaggaaaaggtttccattataagtttattataacatcaacacatggacttaaaatcttagagcagctgaagcatggcattaactctgcccatgatacagggcaaaccaccatgtgcatcactaaaacactcactagtgcaattcacagaattttgtgatggaaatgttatgttttcctaacagtggtcatatatctgccatatgtctttttttttttcattttgagcttagtattaataatcatttttttcctgcagattcaattatattccctgaagttccgattgcacttcgattatcaagccatcttatgcttggtgtggtcaggatctattctcgcaaggtgaactacctattccatgattgcagtgaagcgttgctgaagataaaacaagcctttaggtctactgccgttgatcttccccctgaagaatcaactgctccttatcattctataacacttccagagacattccatctggatgattttgaattaccggaggctgcatttcaggggtaagttcattggttttgttgtgataagtttgttatttaaaatgtgcccttcaactctcttaagattttccaccatgatccagtgacattgatcatcatgtaagcacaaaagaacagatcaccttgcaagacaacccagagaaaactggatactcaacatcccaatttggcttagatggttggtccttctgtattcacgccatctacttttcgtcatctacttttcaaaatttgaagccagccatttaatcatattaagcatatctctatttacagaaagatttggtgatggcaattcttcacatattgggttggatttggaagaggtaatctcagctaatatatcttttctccaaaaattcattgaaatgtttgtggtcttcatcctgcattatcttgtatgtgctgtttggatctttttttatcatctcagtcttctccgcattatcatagatgtacttccagagtaaatatttactgtcatgctccataacatggcagttcttcacatattggtttgtttttaggtcataatgatagggaatgcagattatgcagatgaaaactcattttgagttgtacaagaatgtttagagcatgaacattgaacataacaatgattttaccatgtaccaattccttgcggccattgtctatgccttgtcttctggttgtatatttggcagctttggttcattacctgttagtaatcaatatttcttttgagtatagggtaacacatggctaatagatgactgattaatggaagctctctatttctggttgttgtgttattgtgtcctatcacttgataaactgcaattccaaaacaaaactttgtatatcttcagcagctaaattttatttgtttccccctcaggaattaatgctgaacaaggaccagtcaattcaacttgaggctgatgatgggtaaaatcacctcttccacttttttttataaaaaatagctattcaagtcccttggaaattttatctacacgtctctgctcccatataaagggtctttgatcctatctaaaggagcctttgtgggttttcacagatgaggttaagtttctctaggcaattttatgttttcctataacttctgaccttatattgtacacttggactgagtctgaatcaacccagggtctagttactactttctcctgatttgagtccagatggccatactggggtgtgacactgatatatttgctacacgtgttgtgatttttttccatgacatttgaaagtggcagcatcttgcatttgcctttttctgtatttttactttatttacattggtttgtgcctctcttcagcattattattcaaggtcgatcagcagttcatcctaccgatatggaagttgatgataaccaaaataaagatgaaagcgctgaaggatacaacatggaggatggaccttccagtcacaacaaactaaatccgttaagtgcagatggtctagtaggaaacagtcttcctaattggcatacatacaatgtgcaaacacctgatctgaatgatatgctattgaacaatgatgggaatgcaggaccatcagcttcatactatcaacctagtcccttcccttgtgatgagcctgcatcaccagagtttgtaagtgcccaggccccggctacacctggcctaatggaagagactgttccttccagagtgcatgaaagtcctgttctgagtccacagcgaaaagcttcaccatcaagcaatgatgaaactgcaaagacagctgaaaatgctaatgatcttgtgggtgctgaga

SEQ ID NO: 5834 - DNA, 4375 bp, Oryza sativa
aggcccagaccagcaagccttctggatggcttgcgggctgggacatcagcgccagccataatggcgctgaccgtgggacactcagcgccagcccacctggcactgaggtgggacttggccgcaacccccaaggcccagaccagcaagcctgctggatggcttgcgggctgggacctcagcgccagccataatggcgctgaccgtgggacactcagcgccagcacacctggcgctgaggtgggacttggccgcaacccccaaggcccagaccagcaagcctgctggatggcttgcgggctgggacctcagcgccagccataatggcgctgaccgtgggacactcagcgccagcccacctggcgctgaggtgggacttggccgccgtttcggccgtggcccagcccagcaagccttctggatggctgggctgggacctgcgctgagctgagtttggacatgtcagcgccatttagcatggcgctgacgtcccagccctgctaaactttagcaaaactttgcacacaacagaggcaaacatcaaatcacagaaatttacaggcagtaatatatccagagaaccatacaaaacatacatccatccatcaatcccaacatcattccatacatccatagaatgcatcaatacatccatatatgaagtccatatatataagaaataaaaacatcccatcgatcctcgtctatacatccagtcgagtccatacatccagtccatacatccatcgaaccatgcatcaagtccatccatctatccatccatccattgaaccatgcactcacctcctcctacctctagtgcgaggacgaggcacgtcgggggtgtacctccagtcctgcgaaggagcccgccggcgtcgtggtcgagacgggccgggctgcgagatatccggctgtgacgactctggtgcgtcctctagctgcgagggtccgagctcatccgcctcctcttctctgtcctcatccccttcttcctcctcatctccttcctccgcctctttgtcttgctcgccctcctcgtcacccacctccccttcttcatccccctcttggtgggcatgagcatgttcgaccacatcagtcgacctgcagccgagccttgctgccaacttccgacatcgctgccgtagtctctgcataaaaaataatccatgttaagttatcgcttttggaagaaaacaccgtagtttcatctctttccaacgattacctgtagggcgttgcggagggtgccgccctctccttcggagccaggagccgtgcctagcgccactcccgcgtcgttgacggtccgcaagagctctcgagcctgtaggattgaaatgaagtaagtcacaacatatatggcattgaaatgaaataatatacaacattaatgctagaaactaaccactctgtcgcgaacaggtcccgtctcgaccgtggtacctagacgggtacgagtatcgtactcgttctgctcctcaacatcctcggggtcatccgctatgtcggctagtgtccaagccggacgtaggacaagacggtaggtcctgtggagccacgccaagtacaagtcgaactccgtcccgttgtgctgaccctggtctggtactccattctcctcgaacttctcccattgcgtgatatgatcctgatggtagtaagcccaatcagtcaccttcttgttcttccgacggtccaccctgcacgtatgcaaaatgtccaactcaaatatgtagtaaatgttgaagtgactgattgggcaagcaaaataaattgttaagtgaaattactaacttgtgtaggtcgatactcgtggagaaacggtgcgggattgtttgaagcctcccgaattgccgcatcacgcggtgccacatctggaactccactgcatagaagcagatcagtgggcaccgtaaggtcttcaacgcatcctctatatggcacatgggattcagttctagctcgagcacttcctgtgcctgatatggcatccacaccacctgcagcaacaaaaataaaacacattgaagcacatttagtactatatagtaagaaaccatcttcatgtgtgatagaaccccgaatagcttacatgttctggctgtaggtagtccatctcgtttgtgtagtggtagtacgccaaattcctgcggcctactactggagatgggaccgattcccacaggtgagctacagtgggacgtcggtctgcatcctggtgcggccaagcctgatgggtcctccacatgggccgaccaactggaagcctcatccacatccaaacctgcgtcacatacgttagcttccaacatgttagcaagaaattgaaatgttatgaaacataacatgcgtgaacttacctgtagcaaccaaacacagcctgctaggttcgcgtccccgccttgccttcggcaagcatcacagagttgccggtacaaccaggctagggcagccgacccccagctgaaggtacccgcctcgtcccagtccgcgagcaacggcagccacatccaagaagccatgtttccaccagagtcagggaacagaatacttccgaagatgtacagcacgtacgccctgcagtatcgctgtactatagcctcgtctgcctcagcgggacactgaccgaagttggctcgcaaccaactcaaaggaacccctgatgtcttcgtctgcctctgaccatcaggtgccactggaggctccagaccaaggtactcctcgaccctctccctccagttccccgacgctgtgtcacctgtaaccggaaattaaatggaatcattagtaattgcaaaaaaattaacaaatgaatacgaagactcgttagtaattccctgacgctgtgtcacctgtgaccgcctgaccccggataggaagacccaggatcatggcgacgtcctccagagtgaccgtcagctccccgcacggtaggtggaaggtgtgtgtctctggacgccaccggtccactagggccgtcagagcagcggcgttgtacagaggcaccggtcgctgcgccatggtcacgaacgccaagagcttcgcccgccgtaggtacgggacgtaccggtcgtcgaacagtatgtgcgccgtgtgacctctgactcgaagggtcttcaagcgctgcatcaatagacaaacataataacataaagttagcgacaatatatcatatacaagggttgtggaaaatacatcatgcaactaggaactttaattttgggattgagcaagaaaactgaaaagaagatctatgtgtttacatgctctgctttgaggctcctgaactttgatttgagatatctctatgatggatgatctatctatacaaactaaaatcaaagaagaaaaaataaattcgatcataaaaaaaatggaatattgttgatgctaacctctccgctggcaatctgtggggcccggtgcttctcctcgtagaaatcctccaaccccggaaagtgctccatcctgcaaatgaaaatggaatcattagtaattgaaaaaatattaaatggaaaaatcacaatgagaacggaaaggaggacaacagaaagtaaacattgatgcaacaatatgaacttagcaaatgaatgtcatccaatcccacctgtgtgctaccctcaccacctccccccgtcctacggcgctttttcggtcgatccttagacttgtctcgcttcgggcacctagttttcttatggcctagttcgtggcatagcgagcatctattttgcatgactggctctgaatttgtattgttcggcttttgtgaccgtcggttggctgagcctttgtatgctttgtccatatcgttcttgaaccttcttgtccttcttcttcctcgtgtgttgttctttaacgacaagtcgggcacgaagaactctccatcataacttggccactgcgatggatctaggtaaggttcaaacctaggggagtacgagtcctgcacagccttattggaagcttcataacacattcggggggccacctccacatccaaacctcgcaacttacaaacggttatcatgtgggagcatggcaagtgatggagctgagggaactgacaactacatgtgttatctctcgcaaccacgacgtagtgacgtccaccccattgaaccccagccgccgtgactccgccttgctcgctgacctcatacttcatcgaagggaaatcaaaacatgctgctctttgccccaaggttcgtctttgctgctcctccaaaatgtccttaacttttgtgggccacttctttccacacaggatatctacagttgcctctttgtgtctatcgacaaaccaactattgcacttcgaaaatgtgtatgccccaatagctgtaaccggcagtttccgaatgcctctcaa

SEQ ID NO: 5835 - DNA, 7105 bp, Oryza sativa
  unsure (1)..(7105): unsure at all n locations
ctcctctagcacgaatgtgggtcctgcctgagactaaggaactcgtagctaaagttggctactcggacctgagcaagttccgtgctttgacgatatggtatggaatatccgttttttggtgtggaggctaaatgccacaaaacctaccgtgaatggcctttaaggcgcgaccttctccacacgttgccgatgacggaattttgcgagctcagacacacgcgtcggccgatagtgcaacgaccccacaacgtacggctgtactgcagatcgacacggcaatgtggtggtgggggagcgacggagagttgctggttaaggttgttggcgcgtcacgtcgacccatcggatcgcccgatacgacgtctaagctcaccatttttcctttttcctttttttttttgagaactgtctaagctagcagagctcacctcgactgcccagtgcccgtcattcggtattcccgtgggacaccacgcccgtcgcactccctccgttttgcgcgacgggaccgggtgagagcgtgcggtgtgggatcgagccggccggcgagcgagatcgcgcaatgaggagggcaggaggcgcgacatgtaaagtactgacttgaagacgcggaacggccggttttcacacgagaggcagaccggcttcgacgacgaggaaaacttccagatgacacgaacgtgcgccggcgtgggacgttgacgatgcggaatctgagggagggagcacaggtagtccgtggtcggtaggcagttggtcaaagtaaaccgcgcgtgaaaactgtactagtgcttccaaaagattgatcatggactgcacatactaagcagttttgatttgtagtgactaagcagttctcttttttttttttccttaacacgccttgagcgaaaacaaaagcttatccaacaacgaggacatgtcattgccatatcaaagtatggaaaacccctatacgatgcttcaggctaaatttgtgtacatgcatcttaatctaacatttttttaagacaatgatctaaatctaacatataaatcaggaaaagaaatatataaatatcatctttgcttccattaattgcttgaagtcacaaggagttgcacctacctaggattcaaagactgataacagttggcagctataccgtacgcacgagtactgctgtactggtagtacagtactaacttactgcactgcactgtcacggggagggagtggtgacgctcaccccccgcgacatcgccgcgagcaccgtctccgccgtgagccgctccggcccggccgaccgcaccatgagcgtgtgcgtgacggcgtcgtccgacaccgccacgtccgacgccacgacgctgatctgggattccctcatggcgtggaacaccctggagatggggtgctcgtccaggggcgtggtcacgcgcagcaccacctcgtcctgcattgccttcacctccacggccggcccatccgcccgcgcgggcacgggcgcgtcgcccctgagccgggcctccagctcctggatgtacgcgatggcgtcgctgagcagggacgccttgtccatcttggagatcttgggcaccaccgcgcgcagcgcgtagaacctctggttcagcttctcccgccgctgccgctccgcctccacgtggttcagcggctcctcccgcccgttcgccggcttgcgcccacgcttccgcggccgccgctcctggccgccggcctgttcctgcacgttcgccttggagaagtccaagctcttggggggctcggctggtttcgccttgaccacctccttcttggctgggcgcaccggcgtggtttggacaacgagccgcggcgtccatggggcgtcgcatcccatgggctgggacggtcggccgggtgagagatccttgccgaagattctcatgaaatcttccggcggagctggcacggcgcgcatggcagattggatggcgcgcaagacctcgggggtctcgcggatggctacgacggaaccgagctcgagaacgccgcccttgcacgggaggaagacgacggtgcgtaaccccgcggactgggcgagagacgagcgaacgtaccaccctggcgcgctaccggagccggaagggtgggggtctacgtccgcccaggcgtggcggccggaggccagagcgcggcccggtccgcccgagccctccgggaaggagaagtacatggacgccaggaagtacatctcggcgccggtgacccggtccagccggagcgcgtagtcggcgccatcctcatccccgcctccgtacagcgcgtgcagccgcagcagcacgcgcttccgcgccacgctcctctccgcggcgccgacctccccgtgtccggcaccgtcgcggcagtggccgtcgccccagccgagcacggcgcgggcagcgcggccgctggcggcaccggcgccgcgggactcctgccagaagatgccgtacgtccaggcccctccctgccgctcgacgaggtcgtgcaggctcgcctgcagctcggccgacgacggcgacccctccggcgcgtcgaggtgcggcggcgtggtggccaggtgatgcgccgcgtcgtgccccagcaccgccgcgaacagcgcggcgtccgtctcggaccacgacatgcccgccggccccgctagctcgccgcctccgcctacgcgcgtcggtcaaacaaatcaaccgcgtgtgcgctctcttttttttggccgagacaagatgcgcgtggccttgtgaattttttaccagcttactacgcttttatatatagcgccgagccgtcgagcacgagacgtcagctcacgggagcttattggccacggcaagttgcttggctctcggctagctcggctgccactggagtgtatcggtggcgagtgctcggaaccagtgaagcgtgtggtgtggagtggatgcgcgatgtgaagttgcgatcgagccgggggctaaaataaggggggagctgacgtacggcgaggtacaggacttggagcgggttcgatgcaccaaggacgcgggggtcggccgccttacgggattgtgcggtttttggagcgaggcgtcgcggcatgtgattcatgttggccttttgggtggttcggccgtttcctttccgtcgatatggatgttgtcgcccctcgaccaaaatcgctatcctaccgtgaatggcttcagttcccgtgtagggaataccgtccgatcggcatagagcatcatggaccgtttgattctctatgtgaggaaggagagtttttttttaatagaactgaagggagggttaagcgaccatatatagtcctcccgcctttgctacttgcactctagagtggattttaaactctctagatattttcattgttttttatgtcacttaaataattataatcatacaacttaaaattcaacttttacatgccgcaaaaaaagatttgattgtaaatatacgttaactagtttaatttgtcttttttttggcaacatgtagaacttgaattttaggttgtatgtttgtgaaatgatatatcacatattaatatatcttctctttttttcaaatatttttatagctatttaagtgacatgtaaatgacaaaaaaaatatcctctcgagagtataaaatagtttccctctgcgtggtaccccttttttttcttcctgatcaagtgcacccccttgtcagctgtcacgcctctcaatcaccctctgatgtgacgaggaaataaccaacgtgtattctaatggctgttaaaacatactcatttcccaaatgggacaataacgcataaatatacttgtctgttcaaggtaatttaaatttgaaagttgttctagaagttcgtttgttgaaagctagctaggtggtcagcggggcggattcataatgggggcggagaggtcttgaaaccccactaccgttcccgggacagtggagacccccctaagcccccactaaatttttttctatagatccataagatgtggggactggaggttcgatttatactgatatagtttatttagcttccactattatttttttctagatccgtccctggtggtcagtgtggtcttaatgcacgacccataaaccgtagttatgatatgaacaaattatatgcatgatggttacgacaaaccgttcgttttgttgtggctggccacatcaagtcactcgtacaagcatatcttctagtgttacctatctactttagagatctcggaccaagtgataccccgactacatataatgtccatgccggatcctagcttccttggacttagcctcctagtgttatttaacacataagtcttttgctaaattgcagcgaggtgttcgacattggtttgtagggaacacaacacttgcgtttcaatgggatcaaccattctccttaggacgtttcatgtaatatatatggctgaaaattggtggacgagagacaattgtgattttggttaccacggaaaaagatctgttctccactagtgattgggagaaccgtttctacttgtagggcaacaatcatatttggtgtatccgtgcattaccatcttttcaaaatcataataaatttaaggcgtcattttcactggtttggaaaaaaaatgcaccctttactttctcctacgctaaaaaggctagaaaatgtttaattaggactacgattgcctatatgtttgcatgaaaaggaatttttgctcgagtgtcgatgccatcaggctcgtgagaaaatacaagggatggaggagatgaattgtgtgctattagcctattactgtgttcagcggttaacaaaaaggcagacccttttttccgtaggatagagttattaaccttttggtttctttgttgtaaaagtactcactccgtcaaataatataagagattttgacattttacttgcactgaccactcgtcttatttttaaaaaattatgcaaatataaaaaataaaaaattatgtttaaagtactttggataataaagtaagtcacaaataaaataaataataattctaatttttttttaattagacgaatggtcaaacggtgcaagcaaaatgttaaatcccttatattatgagacggagggagtaataaatatatgaatttaaggttgactaacccctcaattaaaatacaaatggtataaaaactcataagctaaatcttctactatgctggacacaactggaattaaggagcactggagcacaaatcttatcacataaaaaaattctaaatatatatacaatcagatgggctgagaatagagtggcaagtgctgtggaaggttgtggttgttgcacacttgcactacagtcaggcgtgctgaaaaggatatatggtcgtcgccaataatagccagacagtgcagtgaactggcggactcgtcgtcacctcagtgaggtttggttggtggcctaaatagccttatcaaattttgtcaatactaaattttggcaagttttgacatgactaattttggtaaggcaaagttgtgtttgaattgaagccaaaataacataaattcactattgaaatggcatattttcaatccatcagatccggatccgtcgtatttggcccccttttttgtccaacgggagagatgcgcgcacgagagggattactatttgacatcagcgcggctccggccgagaggggacagagagatgaagacggggacctccgcctcctcgacctcactgtcgtgagaggcgtgcgcccgcagcaaacccccctcgcggtggcgcgcgttgcggcaagccggcaacaactgaaagtggatcgtacgcgagagagacgcatacgggggtgggccagcgtgggatcggagcatgcacaggggggggtatgatcgctgctgccgttccgggcacgggaattcaacccccgtacgggtgcagtctggtccttttgaagatgctaatgatccagcccatgtgagagtatagtttcttcgcaggcttgcggatttggatcagggcatctttgcgatcacttgagattaatttcaacctttgcgtctggcgaaccatgattctttcctctttgtggtgggggtccagcatatgcagtccaaagactccgaactcgtccagatctgagcttggacacaggtgccatcatattcgtatatatggcttgatattttaggctcaactttgatagaactcctacttagtaggccaaatttcaaggattccaatccaatcgttggttaggagcggtaagaacaattggatcgcgcacgaatatcgcatggccgccagattgcacctatcagcttcgacatggcaacagatcgaccatcctacgttacactttgaactccacagtcagaactgttgctgctgctaatgaccttattaattggaagagattagattcaacatgatgatgattgatctatccctaggaatagagaagagcggcgccgctgtgcctttcaaggccgcgagattaggatcgttcccatggcacacgtacaacacactaaaaaagcatttttcccaacatggaggtctcattttcgcaagcggacatgacctttagagtcaaatgatcgtctacaaaaatataaattaaggtgaaatttacggtcagcatgtgaaaatatacttgaatataattaaatagatttggataggagtagattttttctaaggctccacacttcacccctctcttcacccacttcacccctctcttcacccacggccggcctctcccttccccacacctcacggccggcctcccctcacctctcctcctctcccctcccctcacctctcctcctctccctggccaccagaggggggagcgatggtggctacggcgcggggtggcgcggaaggcggcgtggccgcgcggctcccctcactccctcccctcctagatctggccggaggagggatgggggaggccggcgggggaacaacggcagctacggcgcggggccgcggcggtggcggctcccctccccctccctcctagatctagccggaggagggaggggggaggccggccggcggcncggggcggcgcggcttcccctcccaacctcctctcccaaatctggccggaggagggaggggggagg

SEQ ID NO: 5836 - DNA, 9485 bp, Oryza sativa
tgggaagaactccatccactttttctgcaatggcaatgaaccaatcaatcagcaaggaggcatacgtgtatatgaacgaattcattcatgggcaagatggaaaatgcttgtggcgtcgaacagcttggagaagatgctgtcgtaggttgagggtctcgcgggcgtcgccgccggacacgccaccgctggggctcttggaccagatgtgttcgcctgcctgcgcgaggcggatcagctcgtctccccgacgagccgccgctgaggaggtcaaggtctagcgcggccagcacagccgggctcgtctccccttctcccgtcgacgcgggtgacgacctctcccctttctcccgccaatgcggtcggccgcctctcccgccgacgcccccacctctcgcgtcggcgcgcctcctctcctcctctcccgccgcctcgtcacgccgaccgcctccgcttgccgctgcagccgcactcgccgacgcccgccctagcagccgcgcttcccgccgcaagccgcgctcgcccgccgcttgccctcgcagccgctccgcctgcctccgcccacgcccggagaagaaaaaagaacaacagaaaaatgtgggtcacttatatgtgggccccacatatttatttttattatttgtgctaaccagatgtcacgtcagcgaaaccgtttttgtatagtttaggggtggagatttctggttttgtggttaagcaaccttaaaaaatctcgctgttaagttgagggacctccggtgaacttattccttagcgccgaatatgtcgggccggatagcccaggagtctcgtcctcttcccctacccccatcgacgcaggcggcgctgtacagcggttaggagttcgacagagtggggagaaagccggcgagggaagccgaagcatcgccgccttccgccagcgccccaccggcggccggcatggacgaggagacgcagaagaaggtggagtccacggttctggagatcctccggggctccgacatggagtccctcacggagttcaaggtccgcaccgccgccgccgaccgcctcggcatcgacctctccatccccgaccgcaagcgcttcgtccgccgcgtcgtcgaggggtacctcgaatccctctcccaggaggatgagcaggagcagcagcaggagcaggccggcggcgccggcgaggaggggaaggacgaacaggccgaggaggaagaggaagaggaggaggaggaggaggaggagcggggaggtggaacgaagagggagtacgatgacgagggagacctcatcctctgccgcgtgagttcttcccctcgcgtgaaatcgctgatactcctttgtttcgctagatttcgcggtgggaatcggtgtgatgaggtttgcttttgcagctttcggccaggaggagggtgactcttcaggagttcaagggcaagacgcttctgtccatccgagagtactacttcaaggacggcaaggagctgcccgccaaaggtgatgcacatattcctgatttgttagctgaaacattggatttctgctattataatagaggacttgtcttagaactgctcggttaaaatgcaccttaatattacacatatatctcgaactttaccagttttattatgggtgggactgctgcaagtcagttgggttagattttgtttagacctcagaggaaatattacactctaccaattctgacatctgtataatcgaattgcatcataactgtaaattctctgatagctcgatctgtttaatattttgatgtgttttctgtgcttatctatcctcttctttcttggtctatttgatcacactctcaaatgtcacggagcatacctaggttttgttttgcacatgtatgagctattgtttatattccagtgttgttataaggatcaagggtgagttgcttaaagacaaaggggtgatgataagaatatagggaattgtgaattgggtatgaaaatattcttccagcttatcagtcctaaaaatattaacttcgtgcaaatttccctagttttttctattgtacttgctaatatcaatcttgagtgaggccgacctgtcacttgtctgttgtcatttgccatcatgctttgattgtgtcagcgacactatttttgtagatctgtgctattgccaatttgtaactgcttgattatggttaggattctccatttgccaattctgcaaatatttatcgtacagtccctgttatggcttacaagttgttgttaccaatttgacttcttgtctttactcttagatgattcatattggtagtactaggatatctattttaccttgggtttgcaccatctaagtctttagtgtggtttggaagttgttgtgcagtttgttttcttattatttgtttagtccagctgaacgtagttgctgaaaaagttaaatatgatgtcaggttctaactagtttataggatatttgaataggtgcaatgtgattaaatcttatgcaacagctacccagctctatttatattgttgtccaaatttagttttatgggaggaacatttaagcttagatgtctagctgatcctcaaaagtatctcccaaccttatgaagctatactacaatcttaggcataagcgaaagataaaagaaaagagtcacagttactccatagcctgtacacaggatcctaatagtgtgttgatttataatgtttggaatacgacatcacccctcagattgtacttttatcacaaatccttatattgaagtctaacatctgacaattgtttcacttgggacaccttccttcctaaaggatgagcctttgtaccatgttttttattttaccaccaaagatgaaaaagttcattttcagtttgctttgtgcctattgcatcctcttcacaggcattctttgtgtagtggtgctaatgcaatgcagttttgttttactttcatgacgtaactgtacctttgcgtgtgtgttgatatgtttgatttcatgtgcttcatttcttattttgccacgctgctgaattgcagggataagtttgacagttgagcagtgggaagcatttcgtgattctgtgccagcaatagaggatgccattaaaaagcttggagaatcatcggactgaaagcatgtttcagaagccccttttgcctgtatcaaatcaagaaggcctttgttctggccctttacttagggccagtacaggctgtaagtccgctatggagggtctggaggtactagggttcctataaacttttgtaaaacttatcccttagtcaagctgcatgatgctgtgtagggtagacggttggagacttggagaagtaatttcttcatatgctcgtcttaatattggagttagtgatgtacactgacatgcatctggctactttagaaaaatcagacatgggttccagcaacaagcctcttttgtttggatcatgaggcactgtcatcggactaactcatctttatgaagaattagttctccgccgctagatgttagtgtttttcgttcatgcccttacacttgacaattgcgtctttttgtctggaagttgcaatactgatatgttttgggcaggtgatctgagccctttatcattgtttctcgaaactgatttttaattaatctcacgggtttcacaccttctgccatcctgatgccaggataaaggttgtactataaactttagttggtactccatagtttccagcactagactttgtttctgatttgagcgtcacctccctgaccaggaaagatatgctcaaaggaaacaaccaactaacatcaattatttgcgtacgaattatagggaactatgatgtgagcttatggtattgataaagactgtcctagagtagtgaaggaagaaacggttgattttatagtgtcttggtagtatcatccaactcgatagctcattatggtctatttggaggagcttaataatttgagaatctgctagttgatagttaattactgagaatattgagaagctgagttatcttgagaagctgagttatctagcttctggcttctagttcattttctgtcttttacaactgcatattcttaaaatctgggtgacaatctggactatttagaggagctgaaaattctgtgagaaattgcagctgctagaagctcttccaaacatactctatatatgatcatgtagatttggagtagcgatatgcatatagatttggagtagcaatatggggaaaacaaagttacatttctagtttttgcctaccagttcatttatctgaattttgtagctattaattctaagaccaattgttacaatatgttctcgccaagaaagtgttgcacagttataaacacatatccctagtactccctctggtaaaaaaaaaacttaaatcctaaggatgaacatagacacgtactcaaatcctagggataaatctaaacacatatgtgtatagattcatgcctaagatttatatctttttgggacaaaagagtactccctccgtcccataaaaaaccagtctagtactggatgtgacatattttagtactatgaatctggatatatatatgtcaaattcatcgtactaaaatatgtcacatccagttttagattcgttttttattggacggagagagtgcagacgagacatgagacgaggaaccgaacctttgcaacttgtcaaccatcttttcaattcttaccaatacaccatcctcttgtaatgctacaagttgcacgttgctagaccaatattgaaaccgccacacgtcatgtcatgctacaattattctggagtgtacgtccaaggcccggaccacaaaaaatgaaaaacatttgtggaaaatgacaccgggaaattgctataactggtacaactttaattagacacatgatgataagtagtatgggcccccaacaaagttctcatagctgtatgcccaaacaagcgaaacaaaccaacgatcacgtaggcgccacacccagtcggcttgctgcgatgatcgatgcctcttatagctatttatggacactaaaagaaatgaccgttcgttgcaacgggaataaaacatgagaatttaagaaaaaaaaggagaaatatttacattacgtaattaattaaaatacaaatttcagcatccttactataaataaactacatatatttatatttatttcatccccactacatataaaatcgcagttacatacgatattacgaaaagaaaggatcatgaaaatcaaggtaaatgtgggtaataaattttcccaagtaataaaattaatttttattaaattttccatgattaattacgttttatgaatataactgttaaatgtagattaaattcgacaaactaaaaacgaattgaaagggaaaattacagggaaaataagaagaaggagttgggaatcgatttttgccattaattaaaggaggaaacgcagggaaagacatgggtataggttcagattggaatagataaaaagaaaatcgaacaaaaagctggcgtgcgcaagaaaaatccgattccaaaaaaagcaaaaaaaaaagaaggaaaaaccgattaaaaaagataaaaatgattaatccgatcagaaaataaacggtgagaaaaaaaagggaaaaccgataaaaaaagatggaccaaacaaaaaaccataagttttattttaaagaaaaaaaacgctcatcagcggagggcggtcgcatgcgcaccctcgtttcttccagccccacgcgcctcatttcttccgcctgaccttatcctccctctctctttcctctcgctgtatctgctccgcccgcccgccatatctccttctctccttcaccttttctctccccaagcggcgacgccttccctctccccaaaccagcgacgctgctctccctcctcctccccccacggcgacgctgccacccctacccctcagccagggtgccctcacccgcccggagggtcttttccccggcgggtggcgtcctgcccttggaaaccgacgctttagctgtggcgccctcccaaggcgggcggcgcctcagccgcggtgcctcgtaccaccctcctcctggccggcgatgccctttccccagcgggcggcgttctctcctcggcggcatcaccttcttctccggcacaatggcggcaccttcttcatgggagcccctcggcggcggcaccctcctcatggcgcacggcggcagcacacgcgccatccaccacgacctcgggggcagcggcatcctcggctccaatgagtagtggtgccagtgatttagttttttgtgatttaattttcttgcatgattttgattcattgttgttggatttgtgattttgtgattaagtgaagttgtgattttgtgatttattctctcttttctgtatgatttgacatctagttcaaggggaacatgtttgttatgtacatccgtatgggacggaagtgaggcggacatgtatgttcggccacgggatgcgatctcgcgaacggccggatcggaatcgggacgacggacaaaaaaaaaatcacggaaaccttataaattttttaattaggtatagatagatatagatatataagctggttaataattaaccatagttttcgcagtactataaccttcttggcttcgatgagtggctgcacttggtttaagttctaatctcttcgtcttcatgaacattcaaaatcacatctaatacgagattaacttttatcatatgtgacgaaaggcatatagtactcccactgtcccaaaagtacttggtttaagttctaatctcttcgtcttcgcgaacattcaaaatcacatctaatacgagattagcttttatcatatgtgacggaaggtatacagtattccctatgtcccaaaatataacaacttttggttgtatgagaagtcccatccaaccaaaagttgttatattttgggacagagagagtactttctttgattcaatgactgctgcacttggttaagttctataccatatatgaactgtctcttgccttttacagtactacctttcttatttttcatggttacatgttatgcacgtgtgggcagtggtgataacactaccctaggatctagctaacaccctactagtagtaaccaccatacgtacatgtcatgacgtggtggatgcatcctgcacgtgcgactgtgcgagtgaataggaagagtaaaatattccaaccaacacaagttgatacaacaaagcacagaagaatgaaaggtatcggtctatcggatgaattacttttctactagtagtactactaaattcattcattttattctttgtgtaatgaaataaactaatactagtcaaaactgcttatgacatttgtggacaggcaggcgatgtggcccattggtacgtcgcctggcctctagctagcgttcgtcgcgacagaaacgtacgcgtgatgggtgtgccgcaggctctgttaggcatgtgtgatgactgatgagtgaccgcctgcctaaccacgtaccccttcttgtgtcattgtgtcatatgcaatgggagtatcaagcgtgacatacatagtatcgcacgtgcgaatgaaacgtctgtcttgggtgaagtgtttgtgtggagttgttaatgtaccaatggtgatcaaggatttatttactgtatctagtatggacatagcaacgctaattggtaatctcattttcaggctgatgttgtatgttctattatctccatcttaaaataggagacgtcctagtatagttgagctaaattagccaaattagtgtaccatatgacgctaacttattactacttcatccgtcccaaaatataaaagatttagggtggatgtaacatataatccagatttatagtcctttgatatatcacatccatcctaaattttttatattttacgacggagagagtagttactttgaatgaccagaataagcaatcatttcaaaacaaaaatacacctgtcatttctaccatggaaggaatcatggatgaactaccatacatgataaaatttgaatcgtacactgctacaccgaccccacgtttctgcttcttactaaaacatcaagcattacaggacaatagatatgaagtaaaatgccaagtatacgggacagagggagtattgtaatttgcaaatatttgtttaatataacaaattattatattttaggatgagtaaagtcatatattactagtttgctgtatctattagtctgttcggttggatatgggatgcggctgcagccagcacggataaaactttactcacagaatcagcagcatgcagttgtagcatggctgccgaacaggcgctatataagtatatataagtgacgtgacgatggggttggaaattcatgtctatctttttttttcttttgataactgctggaaattcatctctctcttttttttgtttgctaactgctggaaattcatctcattctcatttctcgagtgcagggcagttggccgctgctggcctggtgattacggagtacatgcatgtgggtagcaagctgggaaaacaaggtacgattacaaatgctggcactgcatcgacagatccaaccgaaccactgcaccgacggtgtgcgcgggtgctacgagtactttactactagaccgatcactctaacagtgtgttttttacaaaaattttctatacgaaagttactttaaaagaccatattaactcatttttcaagttttctttactaatacttaattaatcgtgcattaaacaatcgcgttgttttgcgtgcacgagagggagggttcccaacccatgctaaggaacatagcctaaatgtactgctctgaccgatcggtcgacgaccgtcgtgcaattagggcattcatagtgcgccactattatttgctcagcctcacgcgccagctagatgaggaacaatgttagctacatgtgtcacagtgcaagttgcttcttatgggtcccaccattaccatccttttaccacttttttctctaccctctctctttcctgtcttctttccctaccgcagtgagcaccgagcgcatcgccagccgagcagccaagcggcaacggcgccgaccggaggggcggtgaggcttgacgctcgcccgtgcaccaccctcctcctcctcctccccggaaaaaacgacgagcatcggtacaacggtgcaggagctcagcggcggagggcttgatggcggaggagctcggcggcggtcgatctgggacggcgccgggcggcggggcggtcgagcggcaacccgagctcctccgctcgagctgggacggcgccgggcggcgggagacgacgcgcaggagctcgacgacagatctggccgacttggggaccgccgctcgtgctagaggagaggggacagggccgaggcagctgaggaggatggccctgagctcggcgacgcggagacgaggaggtcgacgagcttgatgaactactgt

SEQ ID NO: 5837 - DNA, 13667 bp, Oryza sativa
gaaagcaaagcgtaacaagtatatactgcatagaagcaccaatccttaatgaatgaatcctcttacatgttaaggctcatcacagcaactgcaatataacaaaaatagcacaatatcaaataataccacgcagtttctaaaattgtaagtactgattccattgtagcagagaacaaaaacatcataacaaatactcactctttgaaatgctacaaaacagtcagaaaatcagcaagctattgaagcagcagcagaatttgcaaacttgaaaccaaaaaaaaaaaaacagaagcagaagcttataagcttctttttgcatcttaatatgttaggactcatcaaatgatcacatcatttttataagcttgatgtgagaatttagatatccaattaaatcaacatgaaaaacaattagacaggctgacttaagcaccataaagttctggtgctaatacctggttcttgacagccttggccattttgcggaactccttgcgcatgacagacttgtggtagaggctagcaggcttgttctgcttctctgtcttggttgtagagaggaccactgccgtttccttaccactggcaggctggaccgtcacggttttcttgtttgccaggcctgaaaagaccaaatgaacagcacaaccagtcaagactcaagagagtgccacgggagacatgcatatcaagagaagcatgccaaccaaccattaattaccagaatgcttgtaagagtggacattgtacaggttgttgggctccttgctgaactgaaccttggcattgccattgccgaactgcttgaccaggaatgaattgttcttcttgacaagctcccagaccagagaatctggaatcgtggccatttatcctaacctaaagaatccacatcaacacccggatgaaatccaaaaccgaaatggaacaaaacaggaacaaatataagactcctaatataagagctgtgtccttctggcagatgggaattcagacagatatcgccgccatgtctgatttggcgactcttcagagccccccctccatcccaaccaagcatttcagagttttctttcttctctgtttttgggggctatggaatcaccgccatgatgtaatttttaggggtatgcaaaagtctcttcccctttggtagccaaatgtttagatgaggcctccttatgggccgaaaggctaaatgtaagcgatcgtattgtggtttccgcctggaaggaaaccatctcttcctccctcagaacctcttccccctgatgtaatttgtatcatttcaccgtaacctagagcttgcttattcttgtagcaccaatggcgttctattcagaggttggagcaattagctccttaacttaccgaagaagacatccatttagcatatgattaatttagtattaattattataaacttagcaaatggattcgtttgaatttttttaagatatatatatatatttttcaaaaatatcatttagcaatttcaaaaacgtgccggcaataagctagtaacccaaaagctgaaaagaacatggcctaaacgagcatatatatgatgataagaatcgaacacacaaatcgtagacctgaattccaatttccgaacagaccagtgaatatcccattagcggatggtgataaatgatttatcactggacccacataccatagacacatgaagacccacatattatagacagcgagtggtaaataattaattgtcacatcttgaaagtggccaaaagttaaatgtccccacaccagcacgtctcaagcgactctaagcatttgggcagtaacaaagcgagcgtagctacgaacgtcgaatgatctaattcaagtaaaccaccagcactggatggatggagagggcaaagctaaaatcgcaaaaatggagtctaaactgatcaattcatgcagcgaaacgaacgcataacaggctaacgccaacagaagttacagaacaagccatgctacgagaagattgcaatgagtggtttcttcttaccggagattggagtgacgcgcgccgccgatctgcctccttccggggtcacgatctcgcggcgctgaaaaaaaaaccctagccttgaggtgggtggccaattcatgggctgtagcctgtagtaaggtggaatgggcctgtttggtagcggacgatgttggatgggctgtaggcccacgttagtgggacacgtgaactcaagtttccagttcaaagatggtacaagggggtcggggaattaaactccgaccccgcttgactgtcgtttgcacgaaaaattttagaacaatgacagtaaacatcgaatgatattaaacaaaattataaagtttactaaagtatttctagaattttcagtccgcccgctccaaaggaaatatttttggcttcaacagtagtgaaacctggatgaatctgaacataatttgctaaaattcagaatttcgaactttttggccgaaaaagcttcctgttggtggcttggcgctactggtagggccgaaaaaaaacgggaaatttcagtgcaaaatctgtaaccctggtcaaacctacacattatttttaggtcaatatttgtagtaatatcatttttcacctagtgaggatatatccagaaaatatgcattacgacttacgacaatgctgaaggttcattatcatttttatatcattacacaactaatgcatgaaatcgctcattcgtgtgactataaccatcatgttataaatggtgtgcaagataatatattaacgataatatgaaattaaataattagttattcaaaacgtataaaacatctattcgaaacctaattggttgatataaattaaattaatcatatggatatacacttgtatagatatacaattttgagtattcttaaggttaggaatactcatgtttaattaaatctgtagaatttagaatactatggttgcacagtttagtttacaattatctgaatttgaagacatagttgtaatataaatataggcaaatgattgatttgtacttatacaatttattatatgactaagtgcaaaagtagaatcacatctctctacatcaagctccatgtgtccacatgtaattacttgtctccttatatacattatgttttgattaaagtaagcgactatatatctctatttgtaaattgcaatacctttctgccatctcaagcaagtagctctttctattacctgctagaagctagaagggtttatcaatgaacaccatatgtttttttattactacttgagttccatcctataatcaaaatttgttttagctttttgtcatttagtgaatccgataactaatattcattggatggtgtggcaaattctaattacatgttgagtttcacttttcattagttaagatacggtactgtatgtcaagcagtaaaagtccaaaacactgccaactgctttcctgttggctgccagttccaacattttctgaaagcatccaaggaatttctcaaatctcaaatgacatgcataaatcaaatctcaaagcactgccaactgctttccagttggctgccagtctcaatcctccaaggcttgcataaatcaacaaaaactagctggacagataaagctggatatgttaatcaaaactcatgttgaacaaatgtagtaagtactagcaactagctgggatggtatggaatatatggaaacaggttcctttttcaaacagaatatatgaaaaaaggtaaacctcttaagttctgtaaacgtctgtacatctgactgcataatgtgcttattacacgctaacaatcctttcataatgacaatacctaagatgtgatgaacatgaggccaaaatagaacgaaagaataatagctcgccaaaaagaccaacatataagaccgagtgctatgagttgatatactgtacaaatgtcaactcgaagctatagaatgtatgtatccctgtgtttgtaaatacgacttcttcacatgtaaaactcaactggtatgcgatcataaaactagcggcgattggtccgaagagacataaaatgtgcagcaaacgaatcatagtctgtcggaagcttggggtgaacatgcgacggagcagtttttgaggtgctttctttcggagtttctgctgggctttctgtgttttcctcctttcctgtgacagaaactgtattcagatcagcttcttgtgacttccctttgcccaagggaggttccacacgcacaggttttggtgaagttcgtggtactggaaccctggagtacacaggtgagtctctcctttgttcagtaaacctagaaaatgacccagcaggtgatttcgcctcagtttcatcagcatgctgcactccaactcggacaccggtttctttctttgtatctgatgtcatctgagtcctgcgtgattgaatctgctctctagaccactttgtctggacctccttgcgttgtgccaattcgtcctcgctatcatctgaatcaaagtaacttttggcagtttttgttgtagttcccctgcgggctccagcacctggcttttcatggtacagatcttgactggaatttacacctccagaactcttattcatcacagaacttggagcattataagattgctcagataacttccctctatcaccttctgacccatagtaattcctcatggttgatctagcttccacacttgctccaacactttgattttggtcatgaagttcactgttgtaatctgcaccgaacgaactcctggccatacctgtagaagtatttcttgtatttccaaacgaggtatcctcttcagagtgcactgatttttcaatggcggtaggaaccttatgcaacgaggtattcccagaatcctttatgtacggaggaggttgccggagtttgtttcttagtccaggagttagccttccaaagttcaagcctggatcgccttcatcatagtcagcagatgatgttgaagtttgcctgcctaaagaaaacagctgattcttattttctcctgttgtcaatgatgatgcaccttccaatttatgtggcactctttcttcttcaagatctctgatttttgtacgatccaattccccatcaacccatgagtaatcagatctaggtgaactttcactgtagcgctccttattgaatgcattagaaccagatgaattaaggtaattcttcctggacatggatacatgatcttcaatattttcattaacatcatggacaacctttccagaaattatattttctctactctcggaaaaatcggatcctctggaatgagaccttaaagaccttgcatgcatgcctgtggtcatttcctcatcagaactaacaccatccgagtcaaatgtaggtggcacattatcataagaatgaggtgaggaaacatcttttctgtttgcttctgttcctgaaaatagtgttgagctgctatgattaactggagattcatttctatgctgttgaccccaatctgcacttgagaatcccttgtgatcttcaacagtgggttcttcagtgtgctttgaagagaaaggatccaataaattttcttctccgacatcagaatcatattgatcaaaaacaacagctgaagaatcaggtccagctttatcattctgactgtcccaaatggtactgctgccatgggtgaatgtaccatgggaagagctatagttgctgtagtagttgtctgtgttctcttgatcaaaggtagcatgcttgctttccgtgtccttgatgttgtgcccaccaagttgagcctcggacaatctttctccaggtaaattaaactgatgatcctcaggtcttccaaagttgctttctttctcagatgaatcatcagaatattgaggatcgggtgaatgagaacgatgcggatcagttggcatgtcatactcatcactgtgaatatgagggctatatggtggggattgacccaaggaattagttggcatattctgactacctacacggcttgtttctgttctccccccatccttcctagcatcattacttgagatgagtcttggatcataagcccctgaactctgctcattagaactcctctgcccatccttcattaaatgttcagcttgttgcttcctgggtgtagtttcatgggtataagcaggtgactcaaaagctccagtattttgctccgcagaaaggtttccacgactagcaagttgggcagcagccctagcagcaatactagccatctctgcggactctgctgctgcttgtgctgcagatgttgcatccttgaattctatattccaattggaaccactaactgaagattttctctccctagagtgattgaactcttccctcctggacgctgtatctgaaaataacatttaaactaggaatgaacaagaaagcactaaaaaattggtaatgttcagattatatgaccttcacctgtatctggaactgttgcaccatattgggagtaaggtctagaaacatttgaacctccagcagtatcatgagagaaactgttaggaccatgctgggacctaggggacattggagcatcagaaccccttctgttttcttgggggaaagcattagaattggcagtgacatatggagccctattgtctggaacctcagctgatgaatatgaatgtgccgtagacatgtgagaattggaagattccatatatgaatgagaaggtgcagcaggctgtgaagttggcatgccagaattagaagcagatgatcccctagttggaatatttcctcccggatatgttgaggtcacatgctaaatcatcaaatgattaatccagttagaaccataatacttgaacgcttaaataaacttttatgtcagctaatttaccagaagatcatcattttgcttcggcaatttctcctcaaatgcttttggctcccatttgatgttgtgctcctctgcaatagaggtcaaggttttgattttggtctgtgtatcaggtgctccagctgacagcttctcaatgacctgtatccaattattacaaacataagctataatcatggcatatatttattcaggccaacagaagtaaggaaattattttcccatacaaaatacttctaaaagcagcataaattaccagtcggctgacaccactgtcaggtcgcacttcaagagctgctgctgcaaactcttttccatacttacttgtgaaatgcttgcgaacatctgcaagttctgtgacatctgaacacctcattgatgcaaatataacactggctatggcttctttcagatcaatagggcaagtccttcaggtaaaaaccacataaacaaggaaaggaagagaacagatcagttccaggggaacagaaaccataaaaccaataaattaactaagaaaaccaaaacaatgcatagttttcaatcaatattaatctcaatttattttttatctaagctcttttcttcctgtcattatcttaaaaggtcgcgccacagcacaggtcctagataactaagatgcaatgagcatctaacaccctggacattagtatgttataattagacaatcgatttgtatagttttcgtttaagaaagcatagaagcactcatcttagtggctattattttgtatttcttaaaatgagtgtgccaattgccatagagttggtagcacttgacttaattagactattttagaatagtttgattagttaagatgagaatgagtaaatgggaggattcagctcctttgaaaccatgaaataatacttggagcgtaaaactcatgtctaggctaacttgatattttcagataatggaagcttaattgaactcagctaaataaggctaacttgatatggcagaattgagtccataaaacattccactctggaaccagggaagtttcaattggaagacataaggaatttacatttatctccagcaagtaactaagtagtatatgactgtgccacaaaaaaaataaagtgggttcagtttccagattacactcacgaggaaaaaaaaagaggatgccaggattataagcagttttaggaggcccatatcaatcaggcaaaatcatgctttgcttataagaaaaaagtaactcttgtgatataagaaacaatctgaaggttgctaataacatgaaaaaaattgtttagtatcaacttaagaaatcatatcgacaagaaataagctatgttagaggtagtcctccaactaacaaaatatgcttctgttatctatgataatgaagcaatttctgacataagaaacataaatagaccagcaagtaattggctatatgcattatatacaataaaggggaaaatggcttacttctgtgagtcaataatggacatgcgtgccaccataagttcacagtatacttcaattaagtcatatgcttgcatgaacttctcttcccttatgacatgttcaacctgtggaaaaagataagcaaaacgggccaaaaagaaaatagatgagcctttggtcaggaagtaccatcaagacacgttaggactgtgtgtgcgtctttgattcactaacaagtagctggtcactctgtggctcagaacccaacaggatgccctaataatatactcacagcaagataatacttgacacatgcattcgcaacaagcaggcatgtaaaagtaaagaaaaaccaaatactcaaatggatggaactaaaaaacgaatcattcgttgtaatgtagctaccgagaggcaaaaccaaacacttgtcagataagaatccaatactctcatggaattcaagagttcaacggagcaagtcaatacagtgaccaaattgatggcactgctacagaacgaattgtaaatggtttctgtcaagacataaaaatgaattgcatttgagccagcaggcatatacagggccaacaggcccaaggacttctatggcaattccacttataattgcagtagttcatcggcatatccaaagcgagcagatcattcgtaaaacatcactactactagtaactaacaaaattttcccatataaacacctaaggcacactaagaccaagcgcaagcggctaaacaattgatgctagcatccaaagcccatctgattccgcgtcaaggcaccccaattacccgattccgtcatcaattgggggagctaaagagacaaattgagaccgcgatagagacggaggcaagggaaggcgtaccctgatgcgtgcggtctggtcctgatcggcctcgagcagctgcgcgacctctcgacgcatctgccgcacctgcacctccttgcggttcctcagcagcttgatccgcgccagcgccatccgcagcgccgtcttgctgcggcatccacgagacccaaaaaaaaaaaaactgttagcccttgcaagcacgcgcctccgcggcgcacacaaacgcgcgcggagagttagcgagggcgagatgatctcgggcaggcgggcaaactgaccacttgtcgggcttgaagcccttgtgcaggacgccggacagcttcgccttgctcctgttcatctccgcctccgccgccgccgccgctgccgcttccgcttctctgtgtacctagattcgaatcgaatcggctcccgcgaggcgcggggggcaggcgaggggtagctgggcgcgggcgtctccggttggtgcaggtagattggaaaggagggaggaggatgggttcacgcggatgcgtgtgctgcgctaccgaccagggaggaagaggccaaggagagagggggggagactttcgctaggcagggaggaagagaggagataggaaaacggatgcggttttttctcggaggattccgtgacgacgaaaccgcagacagaagcccaggcgcaggcggcttcttcaccgcttccgtcacgtcgattcgggagattgaccttgaccggtggcgcgcccggttcgagggcggggcgcgtggggaggattcgcggggatttttgggggtgatacgcgccgtttctgctggggtgtacttgggttggaaaacccgaggaacggaggcatatattgttacaaacttagtaaaaactttctaaactgatcatattaagtagatatataaaataaggtaagccattaatatataattaattaaatattaactattttaaactttaaaaatggattaatatgatttttttaaagtaaatttcatatagaaatttattttttaaaaaacataccgtttaatagtttaaaaagcgtgcacgaaaaaacgaaataaaccaactcactctcacctcccctagaacgcagtacaataaagtaagagctagctataaacacatatcgagaaaataaaagaaaagagaaaaacaacaagctacagattcgtagtcagctgcagcatggactccaaggcaaaacgtgtgtatgataagtgggaccgattattaatattgtagtatatgtttataggtaactattgtatgtattggctatatatatgatttggtgctagttgttaactatactattaaacttgctctaattacatctaaattagtagtagattctaaaccttaatatataaacatgagaaattatcattcctcgtaccatttccacaacatttcactcaaaccaaatctatccataatttaacgtttaacaaatcttcattcatatatctcacggtaaagcgcgaggcattatatccataacatttcacttcaaaaagtctatccatcatttctacgagatatatggttctatccaccatatatagaaaaaatggttatatacacctgagagtacctgccctgctcccgatccaccattgatcagtgcaggacaccgattgagcacccacgaccttgctatcagatccaccatacatgctttggttttttcttttccagaataaattgctggaattgttaattatcccttacggcttgactgacaactggagagaagaggattgagagtttggagtagggaattgatgatgagattaacatgggaatttgatttttaattctaatatcttgtttggtagagatggtgggaattaatagggagtttagtttgagattagattttaaatgaaaatggatggtcatatttgtttaggcaaagtaaaggaggaatttcctcccaattaccaccctatacccaaaagtattgaagagggagttattactttctcaattccccattatcatcctaccaaaatcttccatatcttccaccgaacggaacaattaatagcctcatatctctaagctcctaatcacttgtaaaaacccctcctaaccaaacgtcccgttaatgatcggatctagcaacggcgctgagctgctagcatatactccctccgtcccaaaatatagccacttttgtttatgaatctaaaagtggctatattttgggacggaggtagtatactcttgtttcaaccgtggcgatgggttgcggcgattcggtcgatctcccctgatatttcccatgcgagattcggctgctgacaaatcgatccacctcatggaagaaacatacatggcggcacgacatcgtgtacgtcatcgtgttcggcatgcttcactagacgatgtgctttgttcgctcaccgtgacttcctcgttaacaggcggcggcggttggaatatgtcaacaccagcatctagcctttctacgcgtacgtgatgcatctgctaactccattttttgatggatgatgagcatattataggcgcataaatctttttatcagcatgcattgtgtaaatatcatccttgtctagaatatggtatctgtaagttctggtagttcataacctataatgactaataaaaatatctatcatacaaagtactttttatacattgtttccattgccaagtcaataagactatgaaaacacaacacagataatgatcgaggtcgctcctcgaccgaggaacacatgttgagatagtagcgcggtttctgagtctcactattactaatatctgatactatcattcactcatcaatgacgaaaaatggtaaatactgaaaagttgcagaaaaaacttcatacacaaaattataattgatttcatcctcagaccaccaatcaatcaaactaggaaggtcaattgttttgtgaccttaagaggaattattcaaggcatgctgccaatccacaccccttccatatcatatcttcctatatagttgttacccactaagaatcatttactcctataaaacaagacatgcaagaagttacatcatcaataattttaagccatcggatcgcattagtatagagttatcacccgttggatcaagaagttagctactcatccatctaatttaatcattgattactcatccattcacctccctttagctcataatcgcgcgtgacattgttatacattctgcacatccaaatcctcaaagacaatactaatcttttttttttctaaatacaactccaattattacataagatgtgagctttgttttgttataaacaattggataacatacaataactaggtatcattaatccaaactcatttttgaaacatgcttgagatgaagcagataagtgctacactacctaattgtaacgatatccagattgtgcatgaaaacaactttcacatatcataacaatacacaatgatgtttcaaaaaataaaacatgaattatattgtaataacagaagctatatatgaagccgcattatcatttattttgtatatacaaagagttgcatctaatcatttaaaacattgattttattcgatgataaaactagcaaatcccgcagcaaggcgcggggtgccaactagtaaacttaaagcctaatggcataagaggtagtaattctgatcaatcttatgacttgctgaactcatcctaaattcctggaaggcaaatgacaaaaattacagcaaaattttcatgatttgcattgtacaaccaaatgatatagaattatctaaaggtctggtacacgttgatttaccccttaacacatttccattataaaaaaataccagaatatatgggtgtgattgtacccttcaggttgctgctcctccattaagagcattgatagcattgtttagatgcatcttaagttgcttcatcaatactttattaaatttaagaaaatggattggatttttttaaaaaaactgttaacatcatacattacctaatatacattgcacaacaagatacactacgtcaggacaggtttatagtaacacatttttgtgttacaataaccccaaaaatgtattactagtgcctacagtaacacaattatgtaatgttactatagcctatgttactatagctgggtataccgtaacacatgtagatgtccttaaaaataagaaaaggtgttaccaaaaaaagttatagtaacatatgttattttgttacaatagatcatagtaacacctttgtgcacttatagcaacactgtaacataacacgttttttctagttccagcaacaaacttgtaacacctttctatatactgcaacatagtaatagtatatgacgaatggtgcctttaattcaatattattataatagtaaactgctctgtattatcttcacaaactttggagaaggaattagcaagacatcacacaagggcaatgaccacgaatgagtagataac

SEQ ID NO: 5838 - DNA, 18825 bp, Oryza sativa
  unsure (1)..(18825): unsure at all n locations
taagaaaatttaaatataggtactatttacatcattccataacatccataacaaacttgaagatctttaaaaggagtatatattttaggcatctagctacattaaaaatgcaaaaatatagaaaatatatctatgcctatccaatctctatgaattcccatgcttcttgattagatcttgagtaggccactgaatcatgatcatttaaccattgatcttttgaatctgcaaaaaattaaagtaggatgtcatgatagcacagacataatatgatatcaatgattcatcaaagtgtggaaatatatgtgtatgcatgcatgcttacacaaattgaaggccaagcaattgacattccttcagcatgaacatcaccaatgtcttgcaatgcttcattggccttactagctcctcgttttcttgaagaggatgattaacaaccacttttgtgaattgattacctatctcaacaccacccactttctctcttggattactactcataaaagtagcatatgccacatgttctttgttaggatattttgcagtcatcaaaattactgtggtacctgcctacaatatgattgaataagaatcactagttagttgcataaacaagaatcgaactgtactatttgaccttcatcacagaagaatgcatcctgtttgaaaccatgggatgtgtagtcctgttcagaccatcctttttctctctactcttcatagtcttttgttatagatattgttatcggatgaagggatagtaacattgttatatatattgttatcggatgaagaaatgaccaaaataaaatttatagatattgatgagttatacaactttattgttgatgactttttcagttgaaatcatttagtacttgaaaatattgtctaaagttgtcactatttgaaattcaaattcaaattataaaaacaaagtcatatagcaaaatgatcaaaacaaaatttatagatattgatgagttatacaactttgttgttgatgactttttcatttgaaatcatttagtatttgaaaatgttgtttgaagttgtcataatttgaaattcaaattcaaattattcaaacaaagtcatacagcaaaatgacaaaaacaaaagttgttgatcttgataagttatacaattttattattgacaattttttcatttgaaatcatttactaccctaaaaaatatttgaattgagaggaaggaggcattatagacttctcggcgagggaggagcaaaagggctgggccggcggcccaaagagggaggaggggaaggggaagccggcccatggagggagagagaggctgcgggctgtgggctaatagtgtatactttataccttatactatggtattttgctgtaatttttttagaatatttgttatgcaaattatacgaagttatagaagaatatatttttctgttgagacttaacaattagacttcatataattgtgttttatgatgaattgtagactgttaagacttgagaattgaacttgacaaaagtttgaagctcagtttgaggggtttttgtattccgataaattttcgttaccgtatccgcgccggttcgttttcgcttcattttcggtttcgataatattcgtttccgttttcgtttctggggtttccgattccaattctgattccgaaaaaaatatggaaacgaaaacgataaaggttgttttcatccgtttccgtaccgttttcacccctagtgctatagtgattcgtgccaaaacatgccatgcgattcattgcaggcagtgggtgttcacatctcagtgaggcagaaaaaatacgattggttattggagatagccaaagacacttctctcgaagatccatttgaaatgtttgattgatgacttcatgttgttgtgagggagatgcgcgtattctgattgaatgtgccccttttttgtcatacaacttccttaatatagctgctgtaattgcatttgaacaaagttgttacctcttgtacctgggaacccaaactgctgctcccggtacacccgcttattggattttaacacggacttggaattagtatgcacactaactttgcatgcatctcatgaagtcattcactgcataattccatcccgtcaattttgttcttccgagctctctgtttcatctcgcctattgcttttttatatattgtgggacttctctcgcatgttgctgctccagagtatcttatataatgtgcggaggcgcgtgcgcagctgcgcgtaatagaaacgccccgtgtttctatccgttctgatttgagatcggttgcagtcccaactacaactaactgcacgttagaggtactgtacacaatctcatccattttttttttcattttttttcgatcgaaagtacagattagccttgctatattaattgtgcggtgaatgcctaaagaaaatgagccaaaaggaaatgatttacctaagtttgagtttattcgtgcatgaaatagtctatcaattttgtggaacagtaacatttactagggaatgtctttgcaaaagcagctaagcatattgtttgtttttcagacctacctacctagcgtctagcaggcgaaaccgcataacagaggttcacccgtatggccgtatgcccgtatcagcaccacacggctgtttaaccagacggattttgcatcgaccataatgaaaaggacacacagcagaagagaaaccaaagataaatatactcgtataacaatcgacttggcagcaatgccttagtcaattcggacgcagataatacacatcaaatgggaacaaagtttgttctgagcaagttcatacaaaaatgaatatcgactgccactataaaattcattccttggtgaaacagagataattggcagatatagcaaaacaaatattggtggtagtaatgttttgcatacagaacagaaatgctcacaacttcatccctgataagttcaacttaataatgatagtacagaatacattactcatgcaatattcagaacctaaacagcccaaagtcttgcatgtagataaattaattcactagattattaacagctagagtttcagacctctgtggtcaaaactcaaaaggatcactacgagataaatcagatgctctttggaagctccaactgccgccttcttcgagaagggcatgtgtcgagtacactacttgacaatttttactcgcaggttttacagaatccagagccttcaaaaccagcttattcttctccaaagttgtgcaacttgcattggtggaaataatatcaatcttttgcagcacctgcgccctctccatgacaaacttgatgaaggcaagctcactctgcttcccttggaactcatcgaaaaccatctttttaacatgtgacttgatacattcaatttcaccagctcccttccagaacatggccttgtgctccccagtggcattgttgagttcgtcagctttgtcagactgaaaattaaaccagtgcaaggcaatcatggatcatgtagttaaaaagcaatcagacaccgattacgactcaaatatcaagtggagcgagtgggttcaccttgaggtgcagcgtttcgacgttgggaaagcactggaggaaactgcacaacatctgggcttcgttgagggtaccaaagtacaccttcaatgctaagatccgcacgcttggaaccatggtacttggggttgctcttgttctagcctgcaacaaaatccaccaaaaacagttcatattttggcgaaactgtcagcagtgggaactaacaaaagagggtttgcaccttgatggtggtggtgccgatctgcagcaagtgtcgccctggctccaggtatcctagtgacctcaacccctgggcaaggccgatcttgatcctcgtcgagaattttctcccttccgtggcccaaatatcgctcagtaagagccgatcgaggcatggggcgtccacagctgcaaggtccgccacgcaggagaagccgagctgcacacaacgtaggctgtggctgacaaagcggaggcgcactacgttctggctgagaaccacagtgagtatctcaaggacagggctcctggagataatggattcgagatcgcggtcctccatgagtacacagcaaaggccaagctccagcaggtgcgggaaggcggtgctgcattgggggaggccagcggtgttggggaacctccatacgccgatgtagaggcgtcggaggtatgtgcagctgaagagcgtggccgggaggcgcaggttgatgggccagggacggttgacgaagacgagctcctcgacggctttggcggcgaggagctggagccagcggtcgagctccgggaggtgtgcctccatgatgctgcaggacaggtcgacgcggtggaagggtcccgggtgagcagcgaggacgcgcgagaccgcattggtgacggagatggggtgggtgttcttgttctctctcagccacgtgagtcgtgaccgattcggacggatagctagccggcccatatcaatcagtttcggttcctacctaaggattctgaatggatcatgtccatgatcttttttttttgttttgggattattaactgcagtttaatttggaaagagtaaatctaatgtccctcatcttatcatcgagttataaaattatccttaaactgaaaagctagatatatgacatccctcaacctaccaaattggatcacttaagatgtgtttggttggatggatgagatggccgcacgagttttcgtgcggtttggttggagggcagggtggatgggacggcccagaatagggaatattctctcaatatactggatgagtgcatccggtcgatttggctggatgaaaccattcagttttgttattctgattggctgtggttggtttgatttcctgttaagcaaggttcaaacgatttttttcgcctaaaccgtttatctaatttatgatttgattacaccattatttttgttataattaaatctttaaaataagatctcggatgattatattttgataaaaaaaatatatatgacaaatgggtcccactaacttttggcttttcccatccatgatatatcccttcaaccaaagaaaaaattggatcgccatatccatacaaaccaaacaaaaaattggatcgccatatccaacaaaatatggattgccatatcttgtccatgtatgaccgtgaatagagatggcaacgggtgcatacccatcgggttcctttgcctcatacccacacccgcaatgtctaaatattcccacttaaatacccacacccgtgcgggtaacgggtatccatacccatataattgacttgtagcatttatatagttttgtactttaactagctatattagagttgtaaaccatcgatattttctctagcaacaatgctattaacattagcgttcaaaggtgagtaaaaaattatacaaccgcattatataatcaagaaatcaaataaaaattttatataactagactagaacaatgcttaagatgtgaaaggagttttatgctatgatttagtagtcgttgagactcatattgctaatagttttaggttcaatcaacgggtttttttttcacccacgggttggtgggtacgggtgggtaaagaacggaccatacccatatacccaatgggtaggagtttttgctcattagtggacccatgagtataagagttagaacacgattagctcctaatagagtaaaaacccatcgggtctcgggttatgggtccccagtgccatctctaaccgtgaaccaaacagacccgtccttaggcagttttgttcaacgtgacagctgcgtcagtatgacacccatgtgaaccccgcatgtcaatagcctcttcccctcatcttctcctcttcccataaggaagtaggtggagaaagcaaggctagagggagtaggcagtggcgggtggcggggagaatagaggtaggccaccatcatcaaatccccatccttcctcctccaccgacatcgacgccttcatccacaccgtcgtcggttgctgccacccgtgccctatggtcggggcaatgggatcttgcagccacccctaaaatagaagctaggtgagtggtcgagagcggggatgtcgtgtggtggccaagctccggtcattgatgctccagtcgtggtcgatgccaactacggtggtggcgagaggttcttgcccgagggcgagagagagagaggagcatagagcagaggaggaggtgtggagcagtggatgcagctaggggtgggcacaaaatcaccgagccgaatcgtcggttttttcggggctcggttttctcttcggcttttactccgttgtagttcgatcgttggtatcttcgtcggttttacgtcttcaaatactgaactgtacgaatattccaaacaaaccgatcccaggccaaacaaaccgatcccaggccagtgcgggggcgtgggcgagcgcccagtggccagtcaaccttcccccttaactccctcgaggactcttaggccccgttcggtctccaaaactttgagagaaatttttttcattagaagaaagaaaattatttaaaaggtattaaagaaacaaaaggggcttaaattacaagatttgtaaccaatcaaggggcttagagagagaattttgttgcacgtaaaatgaaaaacctctttagcacataattaattaagtattaactattataaatttaaaaatagatttattctttttgttaaaataactttcatatataaacttttgtaaaaaaaaatacaccatttaacagtttgaaaagcatgctaatgaaaaaaagaggaagttgaagttgggagttgaagaatagaaaaggacatcaatctactatagcatttcattatctttaatatccgtacagttctttttttcctaacgagtcaagcacatctcgccacgagaataattacaatgcgtgtcagtatcagtatcacagcatgcagcaaaagccctggatttcacttgattaaccggacggacaagctaagtgccggcggaaaacattacgatgtcctcttactggcttctagcactattgatcctcaagtcttctgttgctacggcaagtattcgtacgtacaaccctccttgcgagcaagataattttcggctacaagatgatcgatcctcatttgtatgaggtcgtcatcgacctgcagcgaagaaaacttcgtcatcgacaaagaaaaatgaattaaaagaaaatccaaagatcaatctaattttgttctacacaagcagtttcgttctctaaaacgaccacatgtgcagactaaaaaaaaatgcaaataatggacatcttttcagaagttgcactacatatggccagaggacgtgcctaaaaaaaatgcgccagaaagcaattaaggaaaactgccacaagcattctttagtggaggatatactgtagtatgttagtaccttgaaataaggatcacacaacttcttgcattcctccacgagtttctcatgatccaatgtcttcctatccttcattatacgcacaattgcgcaatcgacattttgcttccggtacctcctgacatcttccatggtctcactggcacggaaatcacccctgtcaacatgatgaagcggtacctgcagcacacattacagtcacctcagagagagagagagagagagagaggcgctaacagaagttctggttacaaaaggatcacctttatctttcccgttttaacactgaagttattgttgaactcaaatatgtcgtctggagcaattgttttgttgctcggctccttttttaggatgctgtactttccacatgataaagaatacagcattacttttgcatcattgtccatgatttccaacttagccacaatgtcattataacttaatcgatcatcttcattgaatagcagcagcaatgcagcctggcaaaaatagatcaagggcataaaaaggtcatgcttagcccatgtgggcgtggctctgtgttcaaacttaagggatttgaactcacctgcattggtgagacaatcatctcaactgatttgccttcaaagtttccaacaatattgcaatttccaagggaatagatccaggtaagcgttctacccctcctatttcctgtcgcttgtccatgaaactcttgatagaacttctcgaaagcttcagcacaattgagctgagaaaaagaacatctcagatcttaccttattagaaatatggataaccaaaataactccataatgaactagaaaatggttaagagaggcaccatatcaggggggagcgataaatgctgtttttgttgagaaggaaaatgaccctgtttcagaaccattgtgtccatgtccaccagagtatttgattctgggttcatgctcatatagtctttgaagaatttttgtagttcttttgaaattgaataatcttctagcatatcttccaggattgagacgtccaagactagttttagctttgtgataaagcttgtctcgacctcaatgttgcaaccaatggatagtcttcctaagagcctgttcctgcaatacattttcagggggaaaatggattcctcaaacttcagttgtcttctaaggagtcaaacaaccatagctcccaagttaaagaagcaaccacaaacctgtacagctcaacaaggtaatccttactgtgcaggtacggtagaagcttaacgacctgaaaattcagtatccacattggcaaattgtttccgtaagcctagggatgtgagctttagaattgcaaaaacaagccagtagtagcatacctttgcaagggtatcttcaacagagtcatcgtctagcttgccacatgtacgttgttcaatgagtctctcaaggaatattatgaaaattccccatcactaaaatcagcaatgtttctgttgcagatcatcctaaagttctcatccagggcctgcacaaagacagaattccctagtaaccaacatcatactatcatgttttagcaagtaattacaatgatctaaggcaatgttcaaagtattgactatcgagtcattccaaccaagcaaaccttgcgaaacaaaatgtgattgtcaaaattattgatcacatgcgcttcgtatttttgaagaaccttcatgattctcaatacaaatacctaagatcaagatgctatgcattagtaatccccctaaagacgtgtgcaagcacccacacacatgaaangggggaggggaggggggaggggggagttccgtttaaaccaggattctacaaatgctgacctctacaattgaatttgatggttccttaccctgtggattgcacaaaacaaaataatatgttatttcattgcaaaaaagtggcgcatataaatcataataaactggtggctaacatgattgttgcatatattaagatagaagaattatgttaagtaaaacacaagctaagtagcgaactaactggcaaaactgtcactttggtatcaataaatgaaatagagagcctccctctgttttccaaaaacaaaacaactaacacgtaaaacaatcaagtaaattacttttatggtaatagcagtagcagaacaatgatatatgacaactcttacaaggagaacaagcaatatctcttaagtcatatttacctaggttagagtagaggtttatccaaactttaaaaagcttattttcataacatctagttcttttttatcttatccttttttttgtatgtccatcatgtacttttttttttagtaaatccatcgcgttagtatgtgccaataggtgtggaatcttgtgataattatgctctttagcagttagtctcaaagacggctaaacatgcaatacactgtttaacaaggtatagaaaagaatacaatatgcaaggatgtattaagtaagaaaacaaaacagaacataaaacaacatatggtaaggtccatgctctgtttcatacgataaaagcaatctgtgttatcatataggtgctcccacttcatattaaacacatttaaagaatttgaaattaatttttcgccggacaaatttgaaattaaataataaggggaaagtttcaacttacaagaaaaatatcatagatcagtcagtgggttatcaagataggattgatgattatgttacacacaactgaaatcttcacaattattttacacgtcaagctattgaaatttggatgttcagaacaccaatacaaggaacatgaaactagcaacagaaatcatccatcacggaaaaggccacatgaagttgaaacaagaatggatatgaagtacaatgtgcgagcacaagatgcatcaccttttccatgtgtgcagcaccaactgcctgttgcaggatgtccctaatatgctgcagtgtacaaaagtaacatattaaggtcactgatcttgacaaagaaatatatatcattagcataatgtgaagtatagcttacttgctggaaggctatggccatgacaataaaccaccagaaatcctggagaaaactctgaacatcaagttcagttcgttaccctgtagtaagaaagacatattcatttaaactgattctacatatttgctcatatagtaaggctttggtctctttctatcaaacctttccatcatctagcagatcattttctgccgcaaggatacctctaaaacctgatttatcatcatcaagtagccattcagcttgcctggatactaattccaggagtactgtctgtaagtattcaatgtaacgggttggaagttaaattccaactgagcaggcaatgaatgcgtacatgataaaacaggcttgtgaagaaaacaagctaacaaatgcacagaagaaatgggaaaataaataaacctatcacaaacctttgacagtcttgcctcagtccatggcttcaaataattctggatcctttcctcttcctcttgtatagattttatcacctgcagaacataaaactcatgacaaagaataagtggtatgctagattacagagaatattgcaaggacttaacgtagataccttgaccaaatatttagaacaagaaccacgggacacccaagcttgggcctttcttcagtaatgttctgctgtgtttttgaggaacacttcttcgaaaccttcataaacatccattccattaccacctctaccaagttcagcttagacactgagagtcatcttgatcaaattgcaatccataaccttccctgccctgtcctcctcaatctggtaaatcaatgcaccagcaccattgtaacatccttttatgcatcttggacaatcggtcagaaaacgaaacaagcaggaggaagatattaccatttcgatgatgatttgtcattttcttatttaactcttcgaaaacctacaaccaagggcagtaggcagcatgggtttagctgaaatcttttgcacagcagaatacacgtgtaaacttcagaatatgcttcttaccacgttcttgaacaaattcagagcaatatccattataggtggaagtgacctctgattagtgaatgccaatcgcaagtacatgcagacggatttgagccatttcatcaacaccttgtggttttcccagtgatgaacgaagttctttaaaaggggctctccctgcatatcctggagggacggtagcacctgcatgatcaggtaacaaagacacgaacataaagatatcaacagcgagcgttctctcacacaggtattagctaagggcaactgcaggatgcatcaaacacaagctaagcaggttgggaacagattaacagatatcgatcgatgcaactgagaatacttcacacattgattaggtgcgcagaataaaaattgatgataatcgcgggggcagggggaaccggaaaaggcggcacatacctgataaacgatgtgatgcctgattgtcttatcccaccgatcatacatctccgcggcgtgaccggcaggactctcgtaacacagtttatatgtgatcctacgccgcggaagacgccccatgtcaatgtgtgttagattaaaccccaaagagaacagaaaaaagcaaaaggaagtcgagaagaacagcgttccatactggagaagctcactgtactcggcacccgagaaggatagcctttcctccccgtcgagaatgcgcaacagtttctggaacccggccgctagccggcgccagccgtcctcgatgtccatcggaggcggccgcgctatcgccgtccttgtcattgatccgagagaatgaaacctaggcagccgcgaaggaggggagagtgtcgtgggattggggatttgggcttggggattgtgtcaatatggggtaaaggagagttgtaaaattggaacttggaactggagatggtgcttgatattgctcgtgcacagcgagtgactgaacaaagccagctgtctagagcaaactcaccgctttcgtgggctgaatgcgcggacaaatcactcacgggcccgaatccccacatctcgggctgtggtcggaaactcggaatctgaggacttgtgcacttttcttaactcgccgttacaacttcgtttttcattcgcatattatttaaattattaaatgatgttttctttaattttactatatattttagatctattttaaaattttataataattaacacttaattattgggactctctgtatagcgaatccctaattattaatgtgctagtattttactttattctacgtgcaactaaaaagttaaatctaagtcggagattccaacagatcgcccaatacgtcaactgatgaacattgatgtatgaaatactaatgggctatatctgtaggctgtagccaaacattctttttgtgccccaagggttctagggctgttctcgatcgaagaacttgtagaaattaattattagtagtactatctcaatttcatattataattactccctccgtttcacaatgtaaatcatttaatctagacatatatatatatctatctagatttattaacatcaatatgaatctagaaaatactagaatgatttatattgtgaaacggataaagtagttttgacttttcttaagtcaaacttttttttagatttgatcaaatttataaaaaaaatatagcaatatttttagaaaaaaatatgttcaatattaaatgtaatgaaactaatttggtgctataactgtttttatatttttctataataaatttgattaaactttgaagtagtttgacttaaaaaaagtcgaaacaaagtacaaatttcaacgaccgagatcatcaattacgccggataaccctattgccttcatggtatttctctgagactatgacctcgtttagggaaagctgaagataagaagtttctccatggctccgttctaagaagcagctgatgaatagagccagttggtgacaatccaaacatctggaaacagctgatgagtatctaaaaatctaggtttcaattagctagtgctaatctcactgtctgcatcatatagcaatgcggctgacagagtgagaatctaccttatcaaagagggctagagattatgagtgtcaaaagctttctaaacagttcctatgcagctatgcttctttcccatacttcaaattctagtcaaatagacctttccaacttcaaaaaatctaaattcatccaaggcaagaggggaaaccaaacaaaatcctacccaaaagtaaaatcgaaaatactagaagaggacagtgaccctttatggaaactccgtgcattgctatgaaaagttacgtgaaaaatggtaggataaggtagataaacatgagcggcaatgtagatttgctttgtacctcctaggcatttgacaagagaattcttgacaaaccaaaccacaagtatggatcatggcacattatctcccaactagaaaatgagaaaagtacaggagcggtctaaattttgttcaaaaagtaactgtcaagtcatcatgacaggtgatgggactaactgtaaaaaaaacaataatatggtcttagtaggcattaaaacaacagatcagtttttttagatattgaaacaacagatcagttagcttggcacaaataacatattgtgttgttccttttctgaagttcgtcaacaagtccagcatcctcttcccagtgtccaaaatgcttatccaattgcactttcaagctccaaatgtagacagcttttgacatatcctgcaaagcacaaaataggttttatatttcgagacagtacagctgtttgacagtccatgtaaaaagtatgtggcaaaatatttcagaagccgcaaatatgtggcaaaatatttcagaagccgcaaataacttgtgattcatgtccacaaagtacgtaacactgatcgatcacacacaaatagcaatccgcaccaatcaaatattcaaattacatggcatacaacaattgatcaactaatctaacattgtctgtgaaggctgaacaactacccaaaccacacaatcatacacacccttgccccaatttcatctcctgcccccaaagccaaaattaggtaaatgcgtagtcagaatagattcaatgactggtgtttaatcaagattttatctgactgcaattatttaagagtccacctctatcaccctctcccctggcccggtctaggtgtttgggtctggttctaactatgcttctaatgagtctggccatccgtccctcccttcctagtcagaattggttcgatggctcatgtttaatcaagatttcatctcactgcaattgcttaagagtccacctgctatctccctttcccctggcccggtctaggtgctttgatctggtttttgtaactatgcttctaatgagtcccaaatcctaatcgagcagtgataaaaggaaagctaaacataactattagctattttcactaaacaaaatcatggaataaataatagtcatacagcaaatgacaatatggacgttggcttcaatcaacaaagcagttagcaagtatcgcaaaaatgagaagagaaattctgcataaaagtcattggttagggttacataaattagaatgatgatattcatgctgagcacatccacttgagctgagtaaatcgaatgtgcaaatctagaattcgtgcagaaatcctaagcttgacctaaaaaaataattgctaggcaactgaaaagtataacaagccatgccttattgaacattcaacattgaaaaaagcaaaacaagcaccacatcatggtccagccaacactgaaatataagttacctcatggtttagatgctaagtgatcggcgtttagggcttcttgtagagtccatgaagactcagggcatgcacaaaagttcaactcaactgtggcaccgagcatggctgcttgtaaggaagagtgtgacttgttgattactaaatcactgatctcacggtcatagaatatcgtcattttttgcagggaagggagcctctgcaataacacggatgctaagcataactcatggtcagaacctttaaaagcctcatatacaaccatcatgatcttacgatcttctattggctcaaacaagtcaataatgcgatcttctgttagatctatagtgacattgtccagtttagtactctgcaaatcaagaggcacgtgtcatttaactcaggcatgatggtaccaagcaagtaaaaaaatatgttatacctgtatgtataggttctccacagatggaaagtatttcaatagacgccgcatggtgtgaaactcattatcatgcccaaacccaagttgaactcccaaagtcctaacagacttgcaagattgcccttcactcaatagtggcacatgggagttcaggtcaatgtaacctaaaacttcaagatccatatcgatttctgagttcatagataacaccatggttcgatggtcgccaggatcagggtgctcatcatggggctgaggctcagaagtgccaacattatgcaatatgagtctgcatagttttggggccacaattctaacactgtctcttgcagaataattccagagcaccatcctcttgaggctattagactcaaagtgaatcttggtagaaaactcgagaaaagccagagataacctttcgagctttgggcactgtgcaaccatcttcatcagtgtatcatggtggaactcacaattgacaatccccaattccgcgagattcggcaaatggaaatcaatggttccagaggggtccttgaacctgatttgacataaatacagggtctcgagcctccaccacttaagaatgttttctggcacaaataaaagtttagccgttggctgagctctattgagaaagatgaacttggtcaccttcttcgagttaaagagattaaaccaagacatcagaataataaatgcagactcatcatcgtctgtacagaagagaaaattagaagaatataagtgcatgatactttaagcagcgactcatctttaacaagcaaattgatgcaaaacgaccaaagcttcaagaataattacctatgcaatgtaattcctgcaccccaaatggctgaaagcacaagttggtgagcctcaccgtagggaaaggcccatcttgtgtggaaaggactgacccaaccctctcaatgagatccacttgctcgccattctgggggagcagctgttcgtcgtcaatttccataacggtggatagccaaaattcgctggcgaataagggacctaactcccgcaccatctttaccgggagatgactgagaacgtccctcatcaccggggtaccacggatatttgcagcgactggagacgagcgtgtggcaccggcataattgaggttggtgacggcggcgggggcggggtcggagacgacggccatctccatggttttcctgcgggcgagcatcttgcggtgggtgatggtggtcgccggcggcggcgggaggcaggagattagctcctcgagctgcaccatgcttacgagtttttcgatcctctctctcgaagaagcaacgtggatacgagtataggattagctttgccggcggcgggctagggaggcagcggcgaccggtaggggaggggacggtggaggcgggacagtgaggagtgaggagtgaggactgaggggggacttgggcctagggttgtgacttgtccgtgcggatcgacggcctttacgggattttcttttcgtccttccatgtcatatagcccatgaacaagcagaccggcccaagtcactgttctgaagccctgtctacaacgaataagttcactgtgagtccctcatctttgacgacgagtttaaatccatcctaaaccgtaacaccagcagacttgagtcttgaccccttaacatgcaaaattaggttaaattagttcctttaaaagtgtagatggatggttttgctaatatggtaagtttatccggggccactcgtgctgactagacgtttacgtgacaagaacaaaaataaaccccacatgtcatacagtcatactcactcccctccactcttttatctccctactctctctccccctcctctcagtcttcttcctcatctctctccgtgtctcccctctcttctcatctctctcctgcctgacaaaagcgaagggaggcggtgtatggcagcgtcacattattattattattattattattattattattattattattattattattattattattattattattattattattattattattattattattattattattattattattattattattatgctgaaaatgatgccacatccgctaaaacagccgcccatattaccaaaggacctaatttagatggtttttccaagatgagaggcgaatatttctatattgcggtttaaggatacaaaattaaactagacataaatataagggaactgcaagtgaacttattctaactggagtatgaaacaaagaggcccagcacaagcatatgacggcccaattcctattggcccagtaggcctcatcacacccttagcgcagaggaataagttcaccggatgtccctcaatttaacagcgagattttttaatatcatttacccctaaactctcacacaccgttcaccggaggtccctcggcactcggcagtatttttgcccaattttgttgacgtggcatcctagtcagcaaaaaaaattaaaagaaaatatgtggggcccacatgtcagctgcacttttttttttctctattttcttctcctttctcctcttttctccgcgtcgggctggccggacagtatccagaagaatcaggtcaacgccgacgacgggcgagcgcgggggcggagcggcgccgggctgcaggcgaagcggaggcgggcatcgaagtagagcgtgggcgagtggacgcgggagagcgacgtggtgttgacggcgccgggctgcgggcggagcgcggcgggcgagagcggcgatgggcgggcggcgggcgagctccaggtcgctccgtgcgcgccgcatcaccaggggcgcgacgactgttgggtgtgggcggccgccctcctccggctttgccccctactccccgcacatctccacctcctgccggaggcaggcgggcgcggactgggcggcgatgacgacgactcgcctcctcctctccccatctcccgccggcctcctctcccacttctcccgccggtgcggtcggccggctcccccccccccctctcccgcgggcgcgctacaggttgacggagacatcggcgatggcccatagcccctgctcaatgctatgagctttggaga

SEQ ID NO: 5839 - DNA, 52148 bp, Oryza sativa
  unsure (1)..(52148): unsure at all n locations
ccatcttctgcattataaaatagaataaagctgccagttgagcctgaaaggttgaaagcagcatgagcagggaagctcataccccggaattcaaattttggggcacgtttataattcaaatccaaagacgaattggactcctataccatatatctcccgcgtgctgtatcctgtatcccccttgcgtgcaccggaaatagctaaatcgatatgcgccgcgcgaaaaatcgttggcttggacgcgaaagcgaaaccttggagcatcttggaaggaaccaaaggagccaaactcacactcttcaccagccgtgcgggacactataatttctacccctcgccgagtcgccgtataaaacacccaaactccccgccgatgtctcaccggaaagccggcggcgacacatgtcggtcggcgagaaagcggccggcgacggccagccgaagccgccgtcgcgcagcgcgcggttcgaccgcctcttgtccgggctgggcggcgggccgctcgtggacatcgagcccgacaaggtgaagggcgagctccggcggtgggccagggcggtggcgacgatggtgcgccagctgagcttcggcgcctggccggagaagggcggcggctcgtcggagcagcaggaggcgggcgacggcggatcgcctggctgagccgccgatggcgttgcttcacttcacacgcgtcaatacggaaaaggaagcactggtgcggttggcaacagttgtgacaagcagcagatgatgcacattccagttgattcgttacattgattacatttattcgttcaagcgacaggcgacggaggctgtagtatgtatctccaaatctcttctccattctgccagacataacaaatttgggttgcataaatcatggcagtcatgtgaatagaaataaacacgtgcatcgcaattctcatgtaagttgatcgaattattgtattccaaacaaaaagactctgcgcacaccttcattgaatttacctacgtatcaccatgcctgattctttctgtgctctaatctttgttagtgaaatctattctaatttcagataatacacagcacatacatggggggatacatccccagttcaactcaacaaatatatatagttagaaggaaaggaacacccttgcattcttacattgatgttgcagtcttgcaggaccttataaattatatagcgacatctacatttaccaattggaacagttagtggttgcacgatgttacctacctacaatttgtacgtgctcgcacaagacacatttgtgcactatcctaatctacaaaactactgccgccttatataaaacctggatacctcactccaatttcgcatccagttttgcaatgcttctcaggagttgtttggagcagacattctgcgcctgagctacatatcgcccacgatttgctttcacccatgcaggttcctatttgacaaattaagtcaagaaaccacatttaggtgctttagctatatagagatcagtaaaaacacaaagataacacataaagaatagaaaatcacctcgggaacaaagtgtgagaaaccaaacttgattaagaagagagcatgctccattatgaggatggctgccagtcctggctcaattttccatttaccctcctcatcatacagacaaacaagaagcaagcagtttgtacagattgccataacaaccaagaactgaaaagaatttttcacattgagtattacaaggcatgagacatgcaagtatatctatgaggaatatatattaaaaaaactgctaatgaacctggaatatgttcagccaagctccaatcgtagctgcatcacggggagcaggtcttttcaacatgaccaacaacttcaatgcatccgctctaatttcagtcacattattctgtcatgaaaataatttaagataagtttagcacacacaaatcaaacaagaacacacatgtatggcatgcgctcgacaagagggaaggacacaagaagagagagaacacaaatagctgtgatgaaccacataccagagcagcaaagcagaatatcgacggaaatgcacaagcaaacatcatgatcatcccaaactgaagagttagctcaagaaaatctgtgatggactcaacaatgtaagaacataacacagacatccaaaagaactgagaatagacaggatgattatttattgctgttaccatcaaataaaccatcttcaagttcttctccaatgcttgcagtatacgagggttttagatattctttctctactcttgtagataaccgaactgacttcccagctggcgattctttctcatgttttttcttgctacaagatggaagagatttcttacatctctgaattggtctggaaaaagaatagtaggacaaacagatttggctgcagaacttactgaacagctctatactttttatagctataattgaggtaaggaatggaattctcaatcagattttccaatacctgcaagttaatatgtatcatcaaaggaagactagcatttatgattataactaatgatggaataattacaatgcagacatgcctgggacacaatgagacgcttgattaggacttgccggagtgccataatgttgcggtgcagtgaagcatggtaaaacaatccaatatatgattgcataaagtaaagaccaaagacctgcatttgccaaaagagtaagaaacctaacataaagcgtgaaccatattcttggcatcattgtgtttaccttataaaccaaactatcagcactagactgttccccttggttgttttcatactttattagagtgacagacaccttgccacctatccttgtgtaatactgaattgcagcaagatacactgcagttaacacatacctgcataaacatcagcaataagaactgatgcttcatattttagtggtaaccataaacaacaaaataaaacataaggaatagatataaaacaattaggagaaaataagcttcaggtcaattgcacatcgttgataactcaagaatcatgaatagatcatagtgatattcctacaatcttaccttagcgcctcagtttttgtaatcgcatatagatgagcataggccaactcaaatggcagctgaagacaaatgatagccaaaacaatgatagcattattcctaattctaaggagaacaccaaaccactcatttctttgtactatacttttctccttgggagcaccaaatttcctnnnnnnnnnnnnnnnnnnnnnnntagaaaagcttaaagggtccagttcattgcccatagttttgtattccgaaaatgaataatttataccccatctgttgaaaacatcacataaaagaaaggcatgtttgtgagcacggtcttgaatatgtttcaaaggaacttaattgacttagatatatacagattgcatagaaaattgcatgctacctagcaaggacagctgaattcttccgtttccaaaattgcaaaaagaagacagcccaagaaataacgaagaaaaagaaagctggaagaaccaaccactgtaatgacctgaattcagacagcagagaaaaacatttagctgacgacaacaataaaatcccaatgatattttctagatgagaggtgcatacccaaaatctatcagctgggttgcaagtccaaaaacagctggaaagaacagccaacgtgtatacattccgaggaaagaaaaatatattgcaatctgcaattccagaattaaattttatggagtagaataaggtgatacttgatttgcttcagatagaatagttcataaattaaatatggtaggtgtaacatgtgcaatcacgctggtctacctttgttccaaagtaagagtaaatttcatcaataggttgccatgtgaaatcaaaccacttgagtgcccagcttctcaggagttgcttccttttaatttcatctgcagcaaaacagttggttatctaatactaagaatttcaaaaataattcaggttggtttaccatgcaaagggaagactagctttacgattccttcatcttccagcctggttaagagtgactcattttgagtccagtggaactctttatcgtcaaagctgagagttatatcagaatcggtcttgttcacctgcaagtctccatatctacctactgtcaaataaggaaatatgaagcacaacaagactaatcactttgtacattagctatatgttttattcatatctcatgtcaagcgaaaagaaaaactttgagacttgagagaataaccatagtataagcagaaatatactaaaccactttcctatttgcacttggcttgtttcttaaatgcaaatataatagacaggtcatctgatgcataatgaactatacttaaatctttgaatcagcagtgctgcaaaaaaaaaatcaattttgcaaaagccaggcaggacatacatgccatccgtgaaataccggtactaacaacgaagcagtgctggtctagaaaaatgccaacttagtgtggaatctccaaacataaataactataactacaatgtgccgaagtgggtaacaggaacaaaagcaactacaatgggagacaactgtgcacttacgatgctgtatatcaagtgccggaagcaggcaaaccgctctcgccagctaaacagggacccgtcgggctgcctgacgaatgctccaacctggtcccattcaaactgcagttccattcctgacaagcagagaaataaaccatgaacacatcatcaaatcacccattctgaaatactcacaggtggattagatcagttaccgatataagttagcttcttcatgttcatctccgctgcaactctccccagggtccccatgggcgcagacagctgaattcaaaatgcaaatccacaaacattacaacaagctcatggtttctcgccacatgattatagcgaagtgtagtgctccctttcccctaatcgcctcctcgtctcagaaattcaaaatcaggccaccgtgccaaacggcggaattcaaaatataataataaaagaaaaaaaaacaccggaccttgatgaactccgcggggacgccgcggacgcgctcgacgatcagccctacgtcctccagctcccgcaccagccgcgccacgcagttctcgacctcgccgcacccggccgcagcgccgcggtagagcttgggcacgacgatcccgacctcgaaccccgtcgcctcatccacggccgcgccctgcccctcgcccgctcccccttccctcatcctccacaacgacgacggatcagacgcggggaatggcggtggatgcaagggagcggatccgcatagggggaaagggaaatgcggcgagcgatggaaggaaaatttttttgcggtctttgggaaatgagaatggagtgagacgaggccaaaggacgcgagggtaggaagagcagtttctattgtaagtatagtaattaattagacttactattttgattagcacttaattaacctattgttagctgttgccaccgatgcctgtgggcgtagttaaactggcgatttgggaggaaaacgaggattaaatcgggaggtaatagcgattttgaaagctgtggtggctgagcggccagcaggtgcgcctagccgcctaggagtcctgggctttccacccgtagagtattttgacaggtgggcccacgagccaacggtccacgtgacgcgagagcaccgaacgaggcgtgggtagctgccacgagggacaacaggttcacgtttcgacaaaagagcgcgagctacgaattacccctgcggctgacactgggccacgggtgatggctttcgccgtcgtgccgatttgggtcacgacgtatgtctggttgatcgctggttcggataatgtgttcgacgtgaaatgtttcttccaacgctaatcttctcgtgatgacaagattaaggtttttgttagtgtgtaatttgctgcttgctggtgactaccgcgcagtagttcgatttattagttacgaatcaatcactgtttattccgcagaaaaaggaatcgttttgtctgcttatttgtagcaccactcgaacggcttcctcttctgctgcagctgatgcgctcccgagctgctgccgccgttcccgtagacgaaagaccggtacgccatggcgccgcgctcctggaccacgtcgcagagcgtctccgggcgcagcgccgcgacgtgcaggccgacggcgtcgaggtgccaccacccgctcctcccgctgaacccgaccaccacgccgccctccatcgggtactcgaacggcaccccgtcccccgacgcgtccccgaacggcccgtgcaccgcccccgtgctcgtccggaacgtcagcgaccgaaccaccgtcgatccgccgtgcgccaccgggccgcaccggccgccgacgccggtcaggaactcgtacgggtagtccagcttcacctgcatcgatcagagagagagggagagattcagagagatgcacattttttttggtagatgagctgacttgcaccggagcacgcacgcacgcacgcacctcggcagtgcggcttgttctgccgtcgccgccgccgccgtgcttctcgccgtggacagggtggccgttcctgtcgtactccaccctcatcgactcgaggaaccgcccgtacgtcagggcgatgctccggacgccgcggtgcgcgccgtcgtcccacgggctcccggcggtgcctccccacggcccgaccttgatggccttgctcgaagcaaccatcctcctctgctggtaatgacccggttgctgaaagagcaagaaaaaaaactgtgttcagctgcgttcgtcgtcagaaatgttcagcacgatcgagaattcgagaccacgacagttgatgtgccttaccatgtccattagactgacttgcttgtcacctgaaattcggagaagaacaggaagcacctggataagtggttgtatcctagtaggagtgtactatttttcgttaacaagtaggagagtgcacttatatagaactgaaatactcacttttgtaagaggtaagtggagagtacaaagaattagataccggatagcacaagctagaccatgatgttcttttaattttgtgcttcacctggggcaacaagaaaccttagcacataataatgtactttaatctgtgcttcatctgggtcctgggacagcaagaaacttagcattgtttatttgaaagaacctcagcattgttgctaatcacttttttttttgaatttttgctgctaatcactttgagtgttctcgggtcttagataaagcaggtatggctggagcgggcgaataagatgctgagcgattgtgattgggttctggcatattaggtggggaagaatcaaatgattggcgtatacttcctccgtcccaaaaaaaaaagtcaaaccatgattttccgtgtctaactttaactgcccgtcttatatgaaatttttttataattcgtattttcattgttgttagaggataaaacatgattaatattttatgcgtgacttttttttaaatttttttcataattttttcaaataagatggacggtcaaacgttgtacacgagtttttttttgggatggagggagtatgtacctggaattttctcgttcccaaaaactttttctggtctgaacttaggactgatcagtttgtccggtatcactccccgtatctgctatggattaatttatctgaatttgcaagcataagttcttttgttctgtgttcaataatataagcagcgtcgtagactgactgacgagctgatgaggaatcagaaactcttgtcgtatctgttgctttgtgcttattgctactgaaccaacattctggggaatattagctagtagctacggtacagattttcgcggttaacaaacactttcaggacagggccacaagaacatagaaactcttttaaaactctttgaagtattcgggtggatgttcatatgtttcttccatgtcaactaaataattaaaaaaaaaataaaaaaagatacattaatatgtaatatatcacttaacatgcatgttcaaaattaacttctaaaggttcgaaaaaataacaaatttagctataaatatactacctgtaacaaataatatgtaatatactagttggagtttattttgttatttttgttacaactcgtgcaaggtggattttaacttgcttgtttgtaaagtgatatattaatctatcttataaaaaatatttttttcataacaatttagtttgcagggaaaaaggtacatatggtgaaatttagaatccatctcccaggtggacgtccacaagaacagtccaattggaaacacaacagaaggcgaatgataatgctatgcacaccgcacagctcacctgcttatataattcagatatccagtagtggtagtttacactttacaaccgagcaacccccaaggctcccaatgcgtcgcaatcttcctgtcattaggcatgaatcggctcatttccaatagcaaatttatcagactagctgacactctagcagctatatgttttccactgtttcttcgctgagtaatcatggacacccaatcagcttcttgttcacgctgtcaaagtctcaaatgctatattttcaggaatgcgggacactccaacgcatatccactgttagctggggccttgtgccgtgctctaaagattcttggacacctcttattatggtgtatccggacagcagcttaactttgctcctacgtcaattatcagtagctcagggtcaggtgaactatctgtctatttgtgcttactagctttgactgaacggatcaggacatggcagctgttcttttcttttctctagcctgttgcttcagccttaacgtcttagcttgcactctgcagaatgagatgaaaccaacaactcaactctttgtgacttgtgagttgtgaactgttccgttcacgtcgggttcacctgcgatcttcggttgagcgcaggtcaagctgttcctgaacacgcctgcctgatcttgcggtctgacgagcaattcacgagggaaagaaaacttcgttcggacaggcggctggacgatgagtgaaacgaaacaggggatcaatcaaacgaaacggcgccaaaccatgcaaggcatgagggcgacggccgccccgccccaccggagcagccatcattggggaggggggggggggggggagcaccgaacgctttgcgcgcgcgcggcggcaacgatcgatcgcatgtggtgtgcggccccactctcgtcgccttcgaatgagttggctcaatcgaatgatcgaatcaaggttcatatactgttgctcgaaatccgtctttgagaacctaaatctcttcgtttcaatttcttgatgccatcgccgtgtatttgtcactcgcagcagtgcaatgttaaattcgggaatgagtactacggagtttcattccgttagccatcacctgcaaaaagccaagaacacgtaattcttgtaaacactaaaccaagaacaccggtcgttttgctcgtgagctgtctcggggtaggcaggccaggcagacagactgtgaaaccaagacctcttcagttataacagcgcgctctcctgcgcctcatcacacacacacacacacacacacacacacaccccacgcattcaagcagccctggtgttgtacagatcatccgaggcgacgtttctcgattcgatcatggccaccaagatgttccgcgccgccgtcgtcgtcgtcgctgccgcggtgtcttgcctcgccggggttgctctggctgccgatgggcccgcgccgagcccgacgtccggcgccgccgccgtctcgtcctcggtcgtcgccgccgttctctgcccggccgtggcgctcctcttcgccaacctgcgctactgagttggttgaggtcgtcgcagcgcgcgcgtgtccatgaggctggctccatgaacgactctgttcttctctgcttgatcactcgcctagtgtgccttctttacccccctggttcttacctgtacttagcttcttccttccggtgcgctagattaaccgttcttgccttcttgtgatacgcatctatgtgtattgattcagatcatttcataccatcatttggaactatttattaattgctccgttatatgccggcctgtgaaattaatcgtcgtggttttgtttcccgacggatatgattcaataacctgctacgaatatcacggattctagacgaatattgtggattatacggaggatgaactcatgaacaccaggcgattttcgctgtaactatcgtgtgtttctccagttctgtttcatttccaattttgttttcttttggctgttgtcactgggtgcaagaccgtcaatttgtaaacatttggttcactgatcgcctgaactcttcttctcagataatttctgcgtgcgtgcagcttatcagctttacaatttgcaccgcgctgggccgctggcgccgcatcgaacatgcaatcgcccattctacattcctacctaggttttcgtcagaatgccaaggtcgagcccagaattccttacagtgtaatcgtcgatgacaaaatccgccgcggatacctaacctcgaccatcttgagctccgcgaaccgccgtgcgcgtgggctgaacagagacgccgccggcgccgtggcgactcgacgtcgccaagtcggatgcaaggcagatgcagcgactggacgaaactagagttcctcgtgagggtgcgagccgccctcgcgccggcgttcgtccaggtacctcatggcgaggctggcgtgcaacgccgcgccgtacgggagcgcggcgtcgtcgacgcggaagtgcggcgagtgcgcgaggtgcaccagcccctccgcctcgttgcgcaccccgacgaagtagaagtgggacgccggcacggcctcggagaagacggcgaagtcctcgctccccatgcacggctccatcgcgccgaggaccgcggccgaggcgccgagcgtctccgccgcgacggcctggaagtgcgcgtgcagcgccgcgctgttgatggtcgggggcagcagcggcctgccccccgcgtggaagtccaccgccgcggcgcaccggtacaccgccgactgcgccacgatcacctcctcgatccgccgcttcagccgcaagaagccctcgttcgagaacacccggaacgtgccgccgatcgtgatcgactccgggatcacgttgagcgcgtcgccggcgaggaacctcgtcaccgtcaccacctgggcctccagcgggtcggcctcccgcgagacgaggccctgcagggcgaggacgacggtggaagcggccaagatggggtcgacgctggcgtgggggtgtgcggcgtggccgcccttcccggtgatcaccgcctcgaagaagccgcagccggcgagcagcgggccgggccgcgatcccaccacgccggtggggagctccacgctgacgtggaacccgaagatggcctccacgttgtccacggcgccggcttccaccatcctcctggccccggtgcccacctcctcccccggctggaagaggaggaccaccgtaccctgcaaaagaagaccagactttgcttaggctgtattgggggatgcagtcaagcaacaatattgcgagttagtacttagtactccctccgttcgttttctaagatatgacgccatttactttttctcacatatttaactattcatcttatttaaaaattttatacaaatatataatatataaatcacacttaaagtactatgggtgataaaacaactcataacaaaataaattataattacataaatttttttaataagacgaatggtcaaacatgtgagaaaaaatcaacgacgccatctattaaaaaacggagagagtacatgattaattaagtactccctccgtactcgtaaagaaaatcgttttggatagcgacacggtctccaaaacacaattttgacttcttgtttctataaaaatatttattgaaaagtgatatatgtatacttttatgaaaatatttttcaagacaaatctattcatgtaatttctacattttcaaactcaacaacatgagagttattcgtgatttatattcccaaggtttgatttacacattgtcctaaatgaattcatttataagtacggaaggagtattagcttaaaaaattttaaaaatagattaatattattttctaaagtaattaactaggtggcgcggctagcacccatacaaaattatctattttttaatataatttatttaaaaattgttaaatagctctttttttgtcttaagactttgaaagactaaaacttatcatctatgtgtttctaattttttagtttttaaaagttatatgtatttgctaccccttattttttgtcacattttttatttgcttgttcgatctatcactgtttctattcattttcctcagatcctttcaaaattagaccttacaaattttagagtttattgtctcgttgggtttcgtttttataatttttaggtgtcccgtcaaacattgccattatacttatctattacccgtccgttgtcttctctctttattgtcattgtgattttaaaaattgattttttttaactttcgaagacccgccaaaccatcggtagcatttccattgtactcctctacggctgtccgctgcctcccctctttattttcattgagatttcaaaatcgaacatgattatcattaggggtttatttttttctctctagaagtcccatcaaccgtcgtaactgctgcttaacagcctgtctgtcatcccaattttaatcatcattgagattctatttgaggttttgtttataactattagatggctcaaaaacagtcaccactctactcttctcttctctttattgtcatttatcatcattgtgttctaaatgtttttttaaaaaaattccatatttcttgttttgatattttttatttttaaattatattcatactttaacttttataatattttttctatttttagaatttattttatttgttataccaaattttagttaatcttgtcaagtgttctagatggtctcttctttcaataatctctactttttattacgaattttagttatttataaattgtattcctagttgaactcttatttttatttttataatttcagaattaattttgttttttatttcgaattttaattaatcttttattgtgttctatatggtctatccttttaatattccttattttgttattttcaatttcaattgttttaaaattgtattcgtacttaaactctcttttttatttttcaaattttggattttatttcaaataaacataaaatggattaatgtgattttaaaatcaacttacctaaatttttattttaaaaaacacaccgtttaatattttagaaagtgtgctttaactttgacagccgctgcgtcactcataataagtgtaccaatatatatagcaaaccgttgtctaccatattcagaaagtatattaaacacataccgctgatgctttcagctgcaaaatagagtactgaacaatatgaaactgacatcaccataggtgttcgcccgcaagaacaagcctctaggaaaatttacgacggttcgcctgtccttgtttggattctcctccaattcactgtctctcaggtcaggtgttgcttcaatgcatagcatcagaagggacataaattatcaaattgaagtcaaattattttttgttttttttgaaaaaaaaagaggcaaacttgaagtgcagtaactgattttggaaacgcctattgcccgaagaaaaaagtacgcatgctgctcctagattccatttggccgggataagcactctccacttctccagaagaggactcgatccgtccgcaagaaacaaagctttgtgacttgctgcaatttcatccacaggatgtcaggaacgacttcgctgacagacattactcgggctgaatacgttgacagagacgcccggcgtatcccgtcgaaaatcttgtttgatgttcacagggtgtattcactacgtagtactccagaactcaatttcagcgacgcttacgtatgatgtcaaactatccaacatgtctgcaatcgttccaataaaatctgaccattttaattcagtacaataatgctaaatatgtttcatattaaatcgttgtccccgtttactcacggggataaatttaggaaacgtttttaccccccatcgtccactaacgtctttttctaggaaccatgtgtcgttgacagaacaaagttacaaatctgataatgctaatcattttaattagttggttagggtcgcagttgaaaagcaaaatctcagcacgattttttcttttgagagaaaagaaatcgaagcaaagaaaagggaaatagagatatgattaaaatgaattataacaggctgatgtcgttgcttcaactgtgaacaagaaatatttgaagaatctgttgggaaaaagacaccgcaacaaacaaatgatcgagctaactgatatattatagcagtgcacagttttcccttttttttctaaaggatctcgcggttctgttccaaccacatacgccatttttttaaaaaaaaatcaaatcaaatcaaatcagacatctaaaatattcaagcctataactgttcaggggatagagatcacctgcagttgtaatgtggactgcaactttagcagtccttacgtgaccgttagatcaaagaaaaacatctcatattcggccagaacactgtagcacgcgtatagtcctgtagcgtactgtagcatatactgtagcgttgttagcttggttatgacgtggcacagccatctgtcgttcatcagcttgatccgacggttgtgaagggatgtgactgcctaacttgcagtcaatgtaataactgtaacggatcttgattcctgttcaggtcatcaggtgcactcacaagctcacagcgcaagggttcgcatctctcatctcatgcactctatgactgataagccgcaaaaagaaaatcaacgaaacaactgaaattatgtactccctcggtcccaaaataagtgcagttttgtactatttatgtctaacgtttgatcgtttgttttatttaaattttttatgattactatttttattgttattagatgataaaacatgaataattttcaggtgtgactattttttttattttttttataaaattttcaaataagacggattgtcaaatgttggacacggatttttacggctacacttattttgggacggaggtagtataaaacttttatacttaaatttttattttttaacaattgaaaatcaatgctaaaaaataaactataataaaaaatcaaaattaactaaaattaagtataaaaattaaaatttaactgtctctgataagccaacaggcaagctattgagcaagaagagcaaactttgaaagagataacagcggatgaggagcaagagggagtatagttgcaatagtaacctgcagctcatggcgtcgctcctggaggatcctggcggcgccgaggagcatggtggtgtgtgcgtcgtggccgcaggcgtgcatcttcatggccaccttactcttgtgctcccactgcacctcctcctgacaagtttttgttgaaggcttttgcagatcagtatatgaaagatagaatgaatatcccaatattcttttggtgcattgaacaaaacccagcagaatgtatctcaagctatcttaacgcttaagtacccatgttgcaaactttgatttcaatccacaaattattgtgtcaatagaatagactgtggaaccgtgtgtataaacattttgctgttgtggagttagtttttcatcccttaagtggtcataaaaagtctaacctatcaaatagtcataaaaactcttgaaaaaaattgttaagatttatacaatagtcgtctatgatgttctttttttttaaaaaaaatcataactatgtaaataacatgtaaagtatgggaggacatccaatcagaggatacaaacttttttgtgattttgttactaaaaaataagctcaagttaaatgtaagggtgtgtttgcaagagcaagctcccaacactccactttcattttagaatcaatttagcaattctctcaacttttgagtagaagataaaatcaatcataggtacgcatatgacttatgcggtgggacattataatggttaaacattttatttttattactaaaatgaaatgaaataatgtctcaaaattgacaacattttaaaatagatgtagtcaaacataaaaacaacttacaaaaacacaatgatttgacaaaaattgttatggaaaatgttttcatatggttataagttaagcatgttatagaatgcatgattaaaaaaacatgtttattggagacttgctgttgttttagacatcgtgtaaacaaagagatggtaactcactccggccatattttggacataatttaagtaaagtaattcgatgtacaaatgtctatatttgccctgaaaagtacataatactctaatttttatcaagtttattaaacatcaacttatagaattagaaggtgtggttagatttctgtacaacctaaacataacacaactcttctaggttctatgttactgtgcctctactgctttattaaacacaagcttgcgccttgcaacggcttaacaattatagctcgttgaaacgcaataattttgtaggtgctcataattttttttattttattcttctaaaaattcctttgaaattgctccattctaaagggaggctcgatttatatgcactgatgcctctccactgaacacctgaatttttcatccaattcacttaaatttttacctgagaaaaacataacacagaaaccctacagatcgattccgtcattcttttttttccctttccttttttttttttttgaaaaggcaggcagcaggttccatcattcaaatgactactccaaccaaaacgcttaacagataaaacaagaattccaatcaatacgtgcataagaaatcaatgagccatggcaggttgcccccccgggctgtctcccacatacgttacctgcatcgggagtgcatccatgtcggcgcgcagcgcgacgaacggcgggcgcccggtgcctacggtcgcgacgacgcccgtgccggcgaccgggtgcctgtacgcgacgcccatggcgtcgagctccgccctcaccagcctgctggtctcgatctcctcgaacgccagctctggccgctcgtggatggcccacctgacgcccgccatccacgccgcgaactccggccgcctcgcccgatcgagcacgtcgacgccgccgccgccgcccgccgacgcacctcggcacgcgagacatagcgccgccgcggcgacggcgacgacgacaacgaggtcatggctacgcaggtgcggaggaggagcggcgcccatggcagacgcacgcgcacgcgccatggcgcgcggtcgcgaccgaggacgagcggtaccggccgcgggtacggtaattggtaagtatacacgcgatgcgatgtcccccggccggcgcgcgcgtgtggcgggttatatatacacgtggacgccgggcgcgcgcgagcgagagcgacgtctccgcgagacgactccgcggctccgcctcctcctcaacgtgaggcggacgctgattacgtcgcgccgatggccgcgcgcgcgcctcgcgctgggcgcacgatccgaacgttcatatataataacggcggcggcgttgtgtgcagggattacagcatgtacaataacatattattagccagctataagataaaagataagagagaatagcaacgaactacagatatgtagccatgtgttatggctccaagacacaatgtatataaaacaagtatgatcatatattaatagtatagtactccgtaaaaaacgaattagctgttagatcgactataaataaattggagatagtactggactatactactacctctgttccaaaataagttaaaccgtggatattcgtactcaacgtttgaccattcgtcttatttaaaaaatttgtgaaaaaattaaaaatatttagtcacacataaagtactatttatgttttatcatctaataacaataaaaatactaatcataaaaaaattttaaataagacgaacagtcaaacgttgaacgtgaatagtgtaaaactacacttattttgagacggagggagtattaaacttgctcttagctagcggcatataggcgaggagaaaagacgtgacgggacgcgcgcgagagaggctcggggatcgttggagtggtgttggatcgactcgatcgtgggtccttgtgtctgcgcgagtattctcgcggatgaagaattcaacggctcaggtcaggtcttgccttgacgatcatcctcgcggccggctgggccgcaagtttagaatgcaacagttttaacgttttaagcgggtatatagctctacagatcaaaaggttctaaacggggcaatttgtccattaattgttggacatggacgccctcatggatattggagtcaaccgtgtgggttcgttttcgttttctccggtactggtgtcttcgtcagatcaaggcgtgtcacacacatactggattactggtgtacagtactccagaagacacgccacgtacgatcaaatagtaataaagcaactcattagaaaaacaacgtcaacgacgggacaaatataccagtgacgtcgtatgttgtgcaaccagccagcttattattaagagtatgaccgtaagctagctataaacacattttgagaagataaaaaagaagagagaagaacaatgggctacatatttgtagccagctgcagcacagactccaagttacatatgtatatgacaggtgagaccagatattaattatgtaatactccctatgtttcaggttttaagacgtttggactttcctcaaagtcaaaacgctttaagtttgaccaagtttgtaaaaaaatagtaacaaatttattacgaaaatatatttaattattgatttgatgaaactaatttagtattataaatattattatactccctccgtttcaaaatgtttgacaccgttgactgtttagtacgtgtttgactattcgtcttattcaaaaaattaagtaattatttattcttttcatatcatttgattcatagttaaatatacttttatgtatacatatagttttacatatttcacaattttttttttgaataagtcgaacggtcaaacatatgctaaaaagtcaacggtgttaaacattttaaaacggatggagtatttatcaataaacttagtcaacttaaaacagtttaactttaaccaaagtcgaaacgtcttataacctaaaacggatggagtatatatttatggataactattgtattcatggttcaagaaggcgctaggcgctagttgggcggatagggggcgcctagcgcctaattggcgcctaggccccgcctaggcggcgcctaggtcgggtcaaatagttaaattcaagaaattagtaggcatattgcatagaaattagactatataacactaaaatagcaataaaatactacctaagtaatttaaccgcctaatgcaccattgaatgcctaatcgcggcggctacccggcgcctagcgcctaatgggcgcctaggcggcacctagggccgatttttagaacactgattgtattaatgggctattaagttgactatatatgatttagagccggcagctggctatactattaaacttgctctaagtaatggcttgccttggctctaggttactacttgtcaaagcaaatttttattgccaaagcactttctaataattcctatattgttaataaaaagatatggtatctccattgattcgataaatcataccgtatatccgaaattatcatcgtaggtaacgctccaaacctatttattttacacgagatgggaattgagattctaaactaaatacaacctatagtctttatttattttaaatttcagacttgtccagacaaaaataggctacaaaataatactccagaccaaatacagctcgatcggcaccagttaattataacttttaaaaaatattaaataataaattttttttatatttttatcaatagcactaatatctgtgcattggacgaagtacgagtagtatgggctggtttggtttgtgatctaaatcgaccttaccaattttggcacattttggcataattaattttggaaggcaagttatgtttggattgaagccaaaatagcctaagttaactattgaaatggcctattttcttaagcatactaaaatttggcttcaaaacaaatagacactcaacactattaaaattaaaattgctaaatattggtaagccaaatttaagccacaaaccaaaccagccctatatgtccaattgaaatcgagattgctggcgcacgcggcagcatgcgcggaactatgcgcgtcgtttcgttcaacccagcacgtgatcttattaaaacgtctcgcttatcttaactctttttaagcagtcaaaaagaagccgtcacgctccaattaagttggcgattgcatagtttgagagatcagcatgaagaaatggcgttcccttttgacggagctatcatgagacatgtcgtttcaactttgtcgtgttcggattaaacgtcggccctagtaataagcagcgcatcaaattaacctgacattgaaaacgtgcatcattcatcgtttgctacggaggagacacaggacacaccgtggagcactgccaaaaatttagtgctagtacatcacaatcactgcttcgggggtgtttagatctaaggtcggaaagttttggtgtgtaactatatagggtgtcgtataaaatgttcggatactaatagagaaacaaattgtataatccatcaataaaccgcgagatgaatttattaagactaattaatccgttattagcaaatgtttactgtatcactatattttcaaatcatagagtaattaggcttaaagattcatctcgtaaattagtcgtaatctgtacaattagtaattttttagtttatatttaatattttatatagaagttcaaacgttcgatatgatatggcgtaaagttttagcataggatctaaacctggccttcgtctgttatcgtggtacaacgattgtacgggcctgtgttttttctcgagatgaacaaattgtaccggcatgtttatctcgctcgccgttggtgtggcgtcagaatggatcacacgctgggcgcttcgcctcgcacgtgaaaatattggggtttttgcagtttcgcacgctatcatgtgggctgtggcctctgccgcctgcgtggctgcgaccgtccgtacatgcgtcgtcagctgcactaacatttggacagaatttttcgtcagggcgcactgccagttgatgccgcgcctgcaggatcatcatcaactgccccgcgtcgcgttgcggctgcgcgcgtttcaggcgttgcggctgccggttgatctcgagacgcaggaacgcagaggcgcgagcacccatcgggccagccaatacggtactactacaccagtagaagcagcaggggatccggatctagggcctcgtatagatctcggaaaatttttgctaaaaatgtcacatcaaatatttgatcacctgcataggatattaaatatggagaaaaaataattacacattttacatataaattacgagacgaatcttttgagcccaaccacaccataatttgacaatgtgatgctatagtaaacatttgctaaagacggattaattaggcttaataaattcgtcccgcggtttacagacggaatctataatttgttttattattagtttacgtttaatacttcaaatgtgtgtccgtatacttcaaaaactttacaaccaagaaactaaacacacccctacgatactcattgagtcattgttagtgtgtgtgaaacttttaagcagtagtagtactgcttatcgttgaataccgaattgaacagtctaaattaattagcacaacagtgttagttgcaatgtactaggccctatttcgaagattagcctacgactaattttaagagctaatgtttagtattgaatttataggctaaacattagtctagggtgatatgtttggatccatgagctaattcagggataaaaggtggagagagagatggagatggggctgctttttcatggtctctatagaaaattagccacattagcatctctttaagaggctaatgttttgagggggctaattcactttagccccaaattaacctagttgtttgaatccttaggggctaatttagagctcaaaggtgggggctaataattagcccatgaaaccaaacagggccctggaaaaaataccatagcacaaaatactactagtagtacaaagatagttgtgaatctagactgttgaccacataaatgagaccactatgtactagtattatataatatactagtattatatagtacagctgttagggtagctatagttccatgtaggattgtatccgatcaggattgtaggccaagggattgttggccaagtttagtttcaaactttttttttaaacttttaactttttcatcatattaaaacttttctacacacataaactttcaacttttccgtcatatcgtttcaattttaaccaaactttcaatttttgcgtgaactaaacacacccggaatgtgatggatccgaatctgctgtagttgatactgtgaatgtaacttgtaggcctcatttgattttctagaaaaaaatggaggaaaaacataggaataagaatcctatgtgaattggtactgttcatccctttgatttgtaggaattgaacaaaggaaaagcatggggaaaaaaatcctatgatcatgatttcaatggaatttcatatgaaaattaacatccacctttagcgcatttttcttttcctatgtgtaggatcaaggcaaagcactattggatgatacagtttaccctagcaaaaccattcaaattctgatttgctattcctatgtttttcctatacaccaatcaaacgatcattcctatagttttcttatgttttttttaatcctctgtttagcatatgatttcatatgctattcttgtaatgtttcctattactacgttttttcaatcttgtgattcatcacaacgatggttacgacttgagcaatgatgatattatttattcgttggacccaaattgaacggtccaaactagccgcataagattgttcattgcaatattatagcaaaaaaaattattacttcaaaaggctattcatattcatactactaccgtagttgtcaatttggaccactaatcaatggagtaaaatggaagaccaacaatgcatgcaatccttaaggctcacacatctaaaagtgctaaatagtgcgtgtgttttttaaaaaaataatatatagaagtttctttcgaaaaccaaataaatcaaaattttaaatttgtaatatttaatacttaattaatcttccgcaatggtattttttttgttacgcatgcgacaaaaaagttaggcctaaatgtgctttcaaacaaagcttggatccagatttgctcggctcgtagagttgggaactaatcctcaaacatgtaaaaacagagcaacttattaagtattatctaaagtaactttaaaaataaattaatatgattttttgaagtaactttctatagaaattattttttttcaaaacataccacgtttaatagtttgggaagtgtgtgcgtgaaaaaatgacggaggtgaagttgaaattttgacttaagaacacaacctaagtagtatacttgtttcgcttatcattggatcagaactaaatgatctgaataagtgcaaaacattgttcatgagttgtccatgcttttttatagcttccatgttgagtgctgcaattaacatagaggccggtaaggggacaatacttcatgaacatgtaaaatcattttacatgtaaaatgcagtggcggctccaggatcgattcgttgggtggtcctgcttggcgtgccaaattgtcacaatgttataaaatcaagtcaaaattatcaaatacagtggaaatataattcaaatattgcaatatagctcagaacatcacaaattgattaaaaccatcatttaagttcgaagttacgaaagttattacaacataaataattcaaatatcttacaatgtctctattccttttcatgtgccactgcaatttgcaccacaaattaatgagaaaataagtcgtattgactactaactaagttgttgctaaaaaaaaaaatctaagtttcagttttcattcacattttttcatccatatttttcattcaccatcacgatgaccgatctattcaaagtaaatacaaaagactacgaatgacttaatgagtaactcacatatgccaaattgccaatgcactaggcagacaggcagtaggcagtcggcaggcaggggccagccggccgggggcagggcggctcgccggctcgtcagtctcggccagcaggagggatcagccgtcgcgccgcaaacccgccgccgccgtgcggtgtggcggggggtcatcggctggccgccgccggccggagtgctgccgagtgccgcgccaggcccgggctgtggcggtcgacgggcggcggctgcaggcgtcaggcgagggtgggaggggcagcaggtggccagtcgatggcctccggcgcagcggcgctggccgactgatgggagagcgagaggcggcacgatttggggaggattggagagccgagcgtttgccgcctacgtgcgcctctcctctgccagctgagctaaccctaacacatttggtgggctctttttttttgtgtgggccgtcgggggggggagagggggggctcctgggccaaaatccagggtggtccaaggaccacctggactacctgctagagccgaccctggaactaaaatgtattttaggatgaatttattgagctgtgaggctacctatcccgtctttaatctagttccataatttagctccatgagcgggcctgggtatacatgggacctgtttggcacagctccagctccagctccacctccagctccacccctcctggagctgagctcagccaaatagtttcaactccaccaaaactgggagtggagctgggtctcctggagctgagctcagccaaatagtttcaactccaccaaaactgggagtggagctgggtggagctctctcacaaaatgaactagagttgtggagctnantttangcanctccacaacttttttccagacccaactcctgaagctaaattaaggagttggagctgtaccaaacaggcccagagttgctgcagtttttctgagaaactttagcaccccaaacaataattattattcagattctgagtatttatagtcgtaaaatctataaataaactagaatatagaaactgggttttctagcttcttaaccagttgttctaaaactcccaaacaaaacgtaactaagggtcgatccaacatttgcctaggccttgggctgacccaaggtgcaatctgacccacacattgaatacatgatgaaattagataggctttcatggtacatactccgaggctcaggtgtcctaggaccacccctgaatcctattcatgatggaacgtgttttgtcttgcagactttcgttcctgggcgccatggggactgagagagagaaacatcttgttttccgcgcgcacgtttcccaaactactaaatggtgtattttttataaaaaaatttctataggaaaattattttaaaaaatcatattaatctatttttgaaatttaaaatagttaatactcaactaatagttaatacgctagtggcacacctcgttttgcgtatcttctcaatattctcttctcctctcctctcaaacactcccttaaggtcatgttcatttaagcttatggacttatcgactatacttaccacgatcgtcaaaccatgatttattaaaaaaaaacttccccatcagcattgcttacataatttttctaagttatttatgtttttgagagaatccattatataccactcagtttgccacatttctacgattcgtcgctgactttatcacgttctacaatataccatcgacttttgcttaacttctacgatttaccatcgccgtcctattagcctccgttaataccgtataattttttccaaatgaccaaaattcacttgggacaaaaactttcaaaatttggataataattatgaaatgtcagattttaattttttggccaaattttggatgtttacaatattatgttcataatatgatacaaaaagcaaatagagtattgtattttggatgtttacaatcttatgtttataatatgatattacggaatttttgtctaaattttggaagtttttgtcctagaggtattttggtcatttggataaaattatatagtattagcataggctaaccggacggtgatggtaaatcgtagatgttaagcaaaagtcgatgggtatattatagaacatgacaaagttagtggcaaatcataaacctgtgacaaaatcagtggcatttaatggattctcacttttttttataagactagcaatagtgcacgtgcgttgcaacgggaaaaactaccgtttgatagtatgacatctcgagaacctcaaattggtaaaaatcaagtctaatttgatatattaccaaaattggtagaaccgagtctaatttgatgaattagcataggatttaggatttagtcttagatttatttttcaagcctacttaggagtttatctgatggactttaattttaaaaaaatctgagccatttgatcaaatttgctttcgggccaggtcttcccaagtcagcccaaacttgggccggcccgtcttcgggcttgtcggtgacatgggaccgggggaatcatgactagaggcttgggcaggagcaatcacccacgaggcctgaccccctctgggggggtcgggcccgagggtgatatggtcgcccccctctttgtctccccgaggggtcggaccgctcccgtttcggccccgagggctgaggcgccccgaccccttgtagattttgcgccgcgtgtatgggttaggtgagcgcagcggggctcacctaaccgcatttattgcgttttggacgagcgcgtcacgccgcatgtaacgcagtgcagcgcgctcgtttatccggtctgagaccagtcacagaccgatcagatcgtgggttaggtggcgacaggcggtctgacgcacgcctcgccccatcccgtcaggacgagagcctctaaacactcgtccctagccggagccggcgtgttacctcctggagatggcacgttggtcccggtcagatatatgccaggcttcatcctaaccattacaagcaagacattgtatgaagaagggcgaacatgcagattgataaactgacgcgtggtggacaagaatgaccgatttgtgaccggtctgacactggtcatgtcgtcagcagacaaccatgttcccacgtcgcgcctgcctccggcggaagtggaggtaggtatgggccgtcccatcagaaggtcattcggacggcaaccatacaagtctccgtctatttatgaaaagataggataagtccccacacaaaagagagaaatggtgcatgtggtatccccttgaggtataaaaggaggaccttgcccacttagaaaggggattggggatcgagaacgatcagagagggagagagttagagttctctggctctccagctctttgtagcttcttcatacacaaatccactaaaacacaggagtagggtattacgcttctcagcggcccgaacctgtatacatcgcccgtgtcttgtgtgtttccactctcgcgaaccttccacacaccgagagcttagaacctcacccagggcccccggccgaaccagcaaaggggggcctgcgcggtctcccagtgaggagccccaagctccgtcatctggcgcgccaggtagggggctctgcgtgtgttcttctaagctctcgcactctttcgtgtgcgccaagcttttcctgttcagcccaatggccgaacaagcaaaggctcacaacctctctccgagtgttagcggtgacgacggggagccaaacccacgccgtcgagctcgtactccaccgccccctccacgccaaagtcctaggcgggaggaggcgctcgagagggtcgaaggatccgcgacttcgacatccacgggtgatggagaagggcgccgagatggggagcgtcgcctcctcgtctacggcgacggcagcacgccccagggcgcgctccaagctgcgggcgcgctcctacgtcacccgcccgttgtccctgacccggagtctccagcccaacgttggctggacgacgtggccaacttggtcatgacggcacggcagcgcctaggtgctggtgggcggtcctccgccaccaagacctctggcgctgctaccaccggctccgtgtcgtcaaggcggagggcgcggcgagcggcggctgttgctcgccattcggtcgccactccttcgtcagcgcctccgaccagggaagatctgcgtggggggccggatgcccgtatcagtatcgagcgccggcgtaatggccgacgtgctgcccacgcaacggagggcgcctcctcgtccggagtgtcacctcaacacggacgcggggatcagccctccgtgcccccggttggtggtgtcggctgtagagcctttgttgcgagccttcggaatgtccgttggcccccaaggttccggcccaccatcgccgaaaaatatgacgggagcgtcaaccctgccgagtttctccaggtctacacgaccgggatcgaggccgccgggggtgacgacagggttatggcgaatttctttcccatggccctgaagggacaggcgcggggttggctaatgaacttgccacccgcgtcggtccactcttgggaggatctgtgccaacagttcaccatgaactttcaaggcacatatccgcgcccaggtgaagaagcggacttacatgcagtccagcgaagcgatgatgagtcacttcgctcatacattcagcggttctgtcaagtccacaacaccataccatgcatccctgcacacgcggtgatctacgcgttcaggggggtgtgcggcacaaccgcatgctcgaaaagatcgcctccaaagagccccagactaccgcggagctttttcagctcgcggaccgagtggctcgtaaggaggaggcatggacctggaacccctccggttccggtgtggcagcttcggccgcccccggatccgctgctcggacagggcggcgtgacaggaggaggaagaagaggtcagcccattccgacgacgagggtcatgtcctcgccgtcgagggcgcttcgcgggccacccgaaaggggaggcctgcgagcgacaaaaagaaggaggccggcgctcccagcagggagcgcccaaccggcaagtggtgcatcgtccacaacacctcccttcacgacctcgcggactgccgcgcagtcaaaagtttggctgagcggacgaggaagtgggaggaggagaggaggcaggagcgccgagagggcaagtccccggcggttccttccggcaatcggcgaagtgaggccaagcagaaggcccccgccgaggacatcgatgacggcgatgatgacctaggtttccaagagcctggggccaccattgccactgtcgatgggggagcgtgtgctcacgtttctcgccggagcctcaaggccatgaagcgagtgcttctggccgcggcccctactcatgaggcgacgcgccaggcgcggtggtcggaggttgccctcaccttcgaccagaccgaccacccaccgtgcgttgcccggggaggacagatcgcaatggtggtttcccccactgtttgcaacgtgaagctggggcgtgtcctcattgatgggggagcagccctcaacatcctttcccccgcagcctttgacgccatcaaggccccggggatggtgctccggccgtcccagccgattatcggtgtgatgccggggcacacttggccgctaggtcatatcgacctcccggacaccttcggtggatccgccaacttccgcacggagcgggtgaactttgatgtggcggacctcagtctgccctacaacgcggtcctagggaggcccgcattggtgaagttcatggcggcggtccactacgcctacctccagatgaagatgtcgggccccgatggccccatctctgtccatggcgacctcaaagttgcgcttgcttgtatggagcagcgcgcggaccacctcgccgccgcgtccaagcccgagggaggcgacgagaggcttggcacctccgcccccgccgccccgaggcagcggatagtcacatgcgacgaggtcccggtcaaggaggttgccctgggcgacggcccgtccaagaccacacggatcggtggtcttttggacggcaaataggaagacgtgctcgtctccttcctgcgggcaaacgctgacgtcttcgcatggagaccggcagatatgcccggggtccccagggaggtgattgagcaccgtctcgccgtgcggccgggcgcaaggccggtccggcagaaagtacggcggcaggccccggaacgtcaagccttcatccgcgaggaggtggcgcgacttctggaggccggattcatccgcgaggtcatccatccggagtggctggcgaacccggtggtcgttcccaaggcgaacggcaagcttcggatgtgcatcgactacaccgaccttaacaaggcatgtcctaaggacccttaccccctgcttcgcatagattagattgtcgactccacagcggggtgcgaccttttgtgttttctagatgcatactctggttaccatcagattcgcatggctagggaggatgaggaaaaaactgcatttattacccccataggaacttattgttatacgacaatgcccttcgggttaaagaatgcaggtcctacttttcaacgtactactcgaatttctttgggtagccaaataggacgtaatgttgaggcttatgtcgatgacttggttgtaaagacgcgcaaccaagagaccttactctcggatctagcggaaacttttgagagtctccgctccgcccgcataaagctgaaccccgataagtgcgtgttcggtgtacctgcgggcaagcttctcgggttttttgtctctgcccgaggcatcgaggccaaccccgagaagatacgagctatagagcggatgcgccccccccagcaagcttagggatgtgcaatgcgtcaccggttgcatggccgccctaagtcggttcatatcgaggctgggagagaaggcgctacccttatttaagctcctcaaacgctccgggccgtttacttggacggagaaagctgaacgtgccctcactcagttgaaggcgtatctcagctttcccccagttctggtcgccccggagccaaatgaacccttgctactctacttagcggcgacccctcaagtggttagtgcggcgttggttgtggagcgcaatgaggacaatcctcattccgcgcacccccaccctgtgctggcttggcccgggaaagagcagggaggagaggcccccgagccgaacggtggcccaaggcccccgacgaccggagcaggccctctgcccgcttgtcagacggtgccaggtgcccccgacccccaggatggcccgggggccactgcgggaaggccgcacctatcgccctctgaccccgaggctaaccctgtgccgactcgacccgggagagagcagggagaagaggcccccgagccgaacggtggcctaaggcccctgacgaccggagttggccctttgcccgcttgtccgatgacgccaggagcccccgacccccaggacggccccgaggccactgtgggaaggccgcccctatcgtcctccgaccccgaggtcgtcggcacagaagacgagtgcgccccgcgaggccgcttggacgaagagcgccccagggatgcggcccctagcgaagaggatcggccccaccgaaaggtgcagcggcccgtctactttgttagtgaggccctccgggacgtcaagacccgataccctcaggcccagaagatgctttacgctattctgatggcttctaggaaactgcgccattatttccaggcgcatcgggtcacggtggttacgtcttaccccctcggccaaatcttgcataatcgagagggtactggacgggtggtgaaatgggcaatcgaactttctgagtttgatttgcactttgaaccacgccatgctatcaagagccaggccctcgccgattttgtggcagagtggaccccagctcccgggcccgtctcagtccccgaggctagctcgggcccctcgcagctgcctcacacgcccactgggtgatgcagttcgacggctccctgtctcttcagggcgccggtgcgggggtcacgttgacctcgccgagcggagacgtcctcagatatttggttcgccttgactttcggacgaccaataatatggcagagtacgagggactccttgcgggactcagggtggcagctggactggggatccgccgcctcctggtgttaggcgactcccagctggtcgttaaccaggtctgtaaggagtaccggtgctctgacccgcagatggacgcttacgtgcgccaagtacggcgtatggagcgccattttgacgggatagagcttcggcacgtgcccagacgggataacacgattgccgacgaactctcacggctcgcttcctcgcgagcccagaccccaccgggcgcctttgaggaaaggcttgcccagccgtcggcgcgacccgaccccttaggggagacggacgcgcctgacaggcccccgaggcccgtcggagtccaggcctcgggacccgaggggagcgctcccagctcccttagattgattgcttggatcgctgagatccaagcatacctcacagataagactctacccgaggaccgcgaagggagtgaacgcgtccagcgcatctccaaacgctacgtgctggtagaagggaccctctatcggcacgcggctaacggaatcctcctgaagtgcattcctcgggaacaaggcgtcgagcttcttgccgatatccatgaaggcgaatgcggagcccactccgcctcgcgcaccttggttggtaaagcctttcgacaaggtttctattggccgacagctctcaatgatgcggtcgacctggtccggcgatgcagagcgtgtcaattccacgccaagcaaatccatcagccggcccaggccctgcagatcataccactttcatggccatttgctgtctgggggctcgatatcctgggaccgtttaggagggccccgggcaggtttgagtatctgtatgtcgcgatcgacaagttcactaagtggcccgaggcttatccggtcgtcaagatcgataagcactccgcacttaaattcattaagggcatcacagcccggtttggagtgcctaaccgtattattacggataacggcacccaattcactagtgaacttttcggcgattactgcgaagacatgggcatcaaactctgcttcgcctcacctgcccaccccagaagcaacgaccaagtggagcgcgccaatgcggaaatcctcagaggccttaaaaccaagaccttcaacatcctcaagaagcacggcgattcgtggatcgaggagttgccagcggtgctctgggcgaaccgaaccacgccaagccgagcaaccggggaaacgcctttcttcctcgtctacggcgcggaagcggttctcccatccgagctcaccctgaggtcccctcgggtcaccatgtactgcgaggctgatcaagatcagcttcgcagagatgacctcgactacttggaggagcgaaggcggcgcgcggccctccgagccgcacgctaccagcagagcctgcggcgctaccatcagcgccacgtccgggcccgatcactctgcgtcgacgacctcgtcctacgccgcgtccaaacgcgtgctggattgagcaagctctcaccaatgtgggagggtccgtatcgagtgatcggcgtcccccggccgggctccgttcggctggccacgggcgacggcacagagctgcctaacccgtggaacatcgaacaccttcgtcgcttctacccctaaagggggatcgggtgtcaggtttcgggctcgggccaaccccgcacccccctcgggcgtgcagggttggccgggggctaccacatatgcatattcttatttctcttatatctgtatttcaataaaagcattttcaatttcctaaaggctgtatctgtgctgttgtttccttttgaaggatcttgacttgaaataggtcactcgtgttcaatcctgccctcgggggctcgggtcggctaaaatcgccaaacggggcccagaaccgagccgtgccccggggcgtggtgaactccgggggggaatcggcaaaaacccacaatcgggtcacccataaccctcggtcaccacgctcccggcctggccagtctcgacatgtggatctccccaggcactagccccgacccgagccatttgaggactaggacctgggcacgagcccttgttcaagccaagacacaaaaggaccgcggcacagacatcctcgtctcatacacacaacaaatagaattgacacaaaaaatttcctctttatttgattgcagattaaattagtttatacaagaagggggcccgaaggcctcggaagaagaaaagaagaaattatttaaagattggcgggggcctgggggctcactccgatgcgcccgggtcgccagcctcgtcgccactgtcgcccactccgccgtcatcgtcctcctcgtcggagttgagggcgaacgcgagccgaggggccgaaccctcgaagctgtggacgatatggtcggcggcgtcccggacctgcgcgcgcgccgtcctcggttccgggagggaacttgtccagcgccgtccatggggagaagtcgggatccctggcttggtaactcgccagtacgagctccaccgctcctcgggcgaggtccctcgaggatgacttaatcgtcctctcgagctcctcggggagccgttggagagtcccggctatctccgagaggcgctgggcgaggcccccctggttggcggcgtacttcgcagtccgcccgccccagaggcccgcctgccggccggcgcggtctagacgggagacggcgtcccgaagcatgccgggccctacctcgcctgccaagcggagggcctcgacctccccggcgacgagtctagcgcgccctgcagatcggcgatggtgtgttcagcagctgcgaggcaggcggctaagtcgctttcgcccgcggccgccccgccgctgcgcgccctcgcgtccagctccttctcccgcgcctcgagctcagcggcccgctggttcagtgcggccctctcggcgcgggcaccttccagattacggcgcgcctgctcctcccgcgctgcctcgcggaggaacaggctgtccgccagccgttgcgccgcggcctcggcctcctcgagagctcgctcccgctcggtgagcgcgtcctcgcggaggcggagcgcggactcctcttcggcgcaggcggcctcgtgcgccgccagcgttgcctcccggatggcaacggcggcctcgcaatccgccaggtccctctccacggcgcaggcacgctcttccagcgccatggcacgggcctcacgggcttcttcgcgccgccgggatgccacctcggtctccgccgcccgccgttctcgggcagcggcagcgtcaaggaccccccaggcggcgtcgagcttcttccctagctccgcctcccagctcccgtattgaaggcggagggtgtcctgcgcctcgttcatcacggtggtggcgatgagggcggccccccgctcctcctccacctccttggcgatctcccccagcaccttccgacgggcttcgagctctgagacgtgccggcggtgtgccttgcggcccacctccaccatggcctccaccgagcgtcgcccctcttcgacacgcacccatgcggcgtcgagctccgcccgctctgcttgtagggcctccacctgggcacttaacccgtccaacaccgtggtgtttgcgatggccaaggcctgcaggaggggttctgcgctcagtggggcaacggaaggcgtggggaagagccgcctcggagaggatgccgcgcggcttggcccgccgatggacgtgccggactcggggatgtcccccggacctggtttgtcctgagcgtcgcatgagggagtgggcccaagcgatgtgcccgcggcctcgtcgcgagctgcctcggaagtcgtcgtcgcctcggcctggcgaagtctggcctcctcccgagcggtttcttcagcttgacgagctcggacggccacctgggcagcttcctcggcttcccgaaggcgatccgctgcctcttgccggtcagtttcacgggtcgcctcggaggatgtcgtcgcctcggcctggcggagtccggcctcctcccgagcggcttcctcggtctggcgagcccgggcggcctcccgagcggcctcctcggcttcccgaaggcgatccacggcttctcgccggtcagattcccgcctccgggcctctgtggtcgccgggtcctcggcctcagactggccggacttggaatggcgggagggacgcgacgggatctcgctgaaacaggagaaagaccagaagacaaacaagatgggtgagtgaaaactcgcgttgagggaatgaatacagccacgatgggcgtgggacgaacctgcgagggggtcggttaaacgaccaccttggaggggaaatgaggtttccccgggatggttctgtcccccccatcttgcggagccgcttcttctttcgctccccctcaggctgcggcgtcggcgtggctccctccgggcgcctgctgctgacgcgcgccgccccgccccctcggggaggagatgggggaggggttccttcctgcttcctcttcccccgggcgtcggcagggcggctgctccccgggcccccgtcgcggggcccagaagcacgaccccctcccggggtagattgttcccccctgcggctcccgcccgcgccatcgtggcctcgaggagcccgctcctccgacgccccgaccgcctgcatgatggtcaggatggaggcgcggtctggatcgctgcagagggggaggactccttgaggaatgagggatgcctccacggagctgagattcagcacccgttggaccactatcttgaagtcctcaggagcctagtcccatctaactccctggtgggtcctcatgtagtcttcggacccggtgtactcccaggcgccccgggcgcgccgctggagcggcgcaatccggcgacgaaggtagtcgccgtacaccatggcccctgtgagcccctgggatcgcaggcccgccaggcggtcgaggacggcgtcatagccatctcccagatctaccggcgcccgccagctggaggcctgcgccggaggctggctcggaagtcggaggcgcgcttcgtcggcaaggggggtgtagaaccagtcgctcttccagtcatcccacttcttgcggaggacgcaggggatgtagcggttcagcaccggcccccgcggctggaagtagcagccaccaaccaccgacggcggcgacaccgactgtacggtgaagaaccaccggaacagccgaagggatgggcgcaccccgatgaacatctcgcacaggtgcgcgaagatggccaatgtcattaccgcgttgggggtgaggtgcgccatctggagatcgtaaaactccagaacatccatgaagaaagaagaaaaaggcggaaccagccccgccattgcaaaagggaggaagaagacggaccgccctaggtagcatggtgccgggcgtccctcgcccagcgtgactatctcctggccggtgcaagattccggcatgaagcggcgcggcagcccggcctgcctctcactcacgatgcgggaaggcggcagcacgctaccatcgagcagagcggagccccgtgccatgacgccggaagaagatatgtttgagagcgagcgtgtgtggcgaaggtagggcacaggaaacaaggagttagggcgcaagcggcgaagacaaggggaataatggcgagaggaaggaagcaaatctcttcctcggtgtctctatacccttgccagcgctgtgcccggctcctcccttctcgcgcccactatctcgctccctcgtttctcgcgcccacgcttccactaatcccattcgcccgcttgcggcgcatgaggtggatatgcggctgtggcagtcgagatggaacatatcgtgcgcgcgttaattacgctcgccaaccgaagcgccatcaccatatctccaggcaaaacgaaccggctcgtcccgattcgcgtgctactcgagtaatgtggcagtcttgaagagaccgctcattattgacagcagagttaccattgccgatgtgcgtgatttgtgaccgttgggtttctgcccaaccgtggagaccagtcccacctgtcaccaggcctttggaagtggcgtcacgcccgatcgcttcccttgaggagggcgatcgccctggcataacgccgggggctactgtcggtgacatgggaccgggggaatcatgactagaggcttgggcaggagcaatcacccacgaggcctgaccccctcgggggggggtcgggcccgagggtgatatggccgcccccctctttgtctcctcgaggggtcggaccgctcccgtttcggccccgagggctgaggcgccccgaccccttgtagattttgcgccgcgtgtatgggttaggtgagcgcagcggggctcacctaaccgcatttattgcgttttggacgagcgcgtcacgccgcatgtaacgcagtgcagcgcgctcgtttatccggtctgagaccagtcacagaccgatcagatcgtgggttaggtggcgacaggcggtctgacgcacgcctcgccccatcccgtcaggacgagagcctctaaacactcgtccctagccggagccggcgtgttacctcctggagatggcacgttggtcccggtcagatatatgccaggcttcatcctaaccattacaagcaagacattgtatgaagaagggcgaacatgcagattgataaactgacgcgtggtggacaagaatgaccgatttgtgaccggtctgacactggtcatgtcgtcagcagacaaccatgttcccacgtcgcgcctgcctccggcggaagtggaggtaggtatgggccgtcccatcagaaggtcattcggacggcaaccatacaagtctccgtctatttatgaaaagataggataagtccccacacaaaagagagaaatggtgcatgtggtatccccttgaggtataaaaggaggaccttgcccacttagaaaggggattggggatcgagaacgatcagagagggagagagttagagttctctggctctccagctctttgtagcttcttcatacacagatccactaaaacacaggagtagggtattacgcttctcagcggcccgaacctgtatacatcgcccgtgtcttgtgtgtttccactctcgcgaaccttccacacaccgagagcttagaacctcacccagggcccccagccgaaccggcaaaggggggcctgcgcggtctcccggtgaggagccccaagctccgtcagggctagatgagtcaattcgacggcccgcaagccgagcagccaagcgcggcccacatacgcggcgacggcccgatgcacttccgcggcccattgggcagcataatcagcggtgacggtggcccgacgttgggcgaatttgagccgtccaatctgatagatggctccgatcgtccctgcgtcggatgaagcgccgaccgggagagaggggaaaaacccctagctcccaaatccttctctcccgatcctctttctattcggcaacgagcgagcggaacgacagtggtctggcgagcgaactttgccggctggggggcgcacccgagggcagcaccaagccatgccacggcatcgatggtccggccaggcgggcgtgcaaatggtgacgagcaccgagtggcccggacctcgtcggcgggaggggcgacgccaagccgacgcttcccgtctctggcaagggatggtggaggggtgctccaggacagcgcgcgcacggggaacctgacgcgactgcgaggaggtgaaggtgcggcggtgccgtttcccggaaagctccggcgagcttaggggcttcaagttcggtaagtaacccgatcccttagcttaattgatttggattttgactcttagggttcttatacgaaattagggttctttgaatttggggaattttatcagaaaatttcaatattttttattccctcttttcgagtttggggagtttcagtatcgtttatcccctcttttaattttggaaacttcaatctaatttatccctttgctcaatttcagggaagccattgaagccgatgtctggttttgcttttggttcgtcacctcttctcaacgccttttcaccattttgtttgtaacttgtggggctcgggggcaattcagatagaattctatctcttattttcttatttgatttgatctctgatctctctctctctctcttgctttggctagcgtttcatcgcgcaggtagggacagagggtgccgcttgttccctcggaaagattatgattaagacaatatcagattttcacggacgatgaaagtaaattgaatgggattttttttaattttttcgcccttttttcgttattacggacgacggaaacatttttaattttttaagtagtatagataaagatatataagatgtaatacttaatctatcgctataagcaattgtcgtaatatgttcagtcatccaaaaagtacacggccttataaatcatgaaagaccctattaacaaagtgacgaaaaagctcctaaatttactaaaataaaatccaaaagttattaaaaatcagcaagggagtgtagtcaaaactgagcaaaactaagaattgataggagaaatgcatgcttaacttgttttagttacatatgataaggaatccgaagttgcttcaaatacactattgtcacgcccggaatttctatccaaaattccaaacgcttacatgtgtgtgaaccctcgtccaggaatcagccgaggcacacaataacaaattgataatagagtacaaatattactctaattaataagcgaataatatgtcattacagaggtagatagttcctctcaatcaataaagatctaagcagcggaaaataaataaacggcgcagacggctccactccacaggcagcttgaccaaggctacacctaatcctccacaccatcagcctcattgtagaactcttcctctgatgaatgattgcaaggtgagtatatgacatactcagcaagccacgcagcaaatatgcaagtgcacaggataacaaaggatggcataatagggttgcatttgcaaaagcagtatttagcaaacatttgagaatttgataaaacagttaagtaattaaacaatattaatccaacgctatacaacataccctgttgtataggcccaaccattctgaacaaccaccccggctgcacagttctatctccaaaccaggaatataccattccaaaccaggagctaatcaaattattaccagtttaagcatcttttactatgatgagaggtgtgagactaatcacgaaagacattgttagacccgcccataaccgtgggcacggctattcgaatagttttactctgatcagaggtgtaccactgtacccacaagacacaaccccacatcatgtcaccatgtgcctcaataccaccacggtatctcggaaaggagttgtgacaatacccctcgcataacacaatccactgcagcgcaccttcctggatcataatcacccccttataaacaaggcatggactccccagcgacccccgtgggcttatctccgccacttctcagtctggtgccccgcaatgaaccatgctatacaaaagataaagccgttgcccatgctggcttgtggttggcacggttaatgtttcacaaccgaaactcgtgaaccggtccttaattgtcatgagcacgaccatcaaaaccatgtgctcacaacccaccattaccaggttttagttggcacattaattaattaactaatcacgattgaccatcgtgaactatcacgaaaccatcattaaataatagtgagtcattagttatcccgaatgtgtactaatgtttctaagcagggctaagcaatcatatctaatatctagttgaaccaatataaataaagctcaactagtcaaattgtaataacccaaggtatcaaggaataaggtaatcaagtacgaaagggccataacaaagaataggtcaataccacccaatgacattcgaaaatagatgcaatagttgaatagaaacaatagctttaaataggatcaacatgctcaaagggttgtttgggatctgtgtgacttgccttgctggccttggaactcttcaaactcttctccggcgaaaacggactctccggaaacgacggaatctaagcagaaaagagcaaaatcatcaaaacagcacataaacaagcatgaacagtacatgtggatatttttaatgtgtagatctcaattttagaaaaatttagagacttgaaccaactaaatcggagctaagatgaattagttatgaatttttaaagattaaatcggattaaaacacttatatcggtttaaattgaattatgacgcaataatgaattatttttgaaaaggaaaagacggtttattgcgtcagcgggctagggtttggtggaccgggcgcacgggcggcggttcacacgaacggacggccgagatcgaaccaatccaaaacggacggccgagaccgatcgggtccacggcggctcacggcgaacgaccccaatgacgtcagcggtgacgtcaccgacagcggcggcggctcggcggaggagacggctcgaacggcgcacgctcgccggcgaacagcggcactaggacgcaaacggagggcaccaagacgtagaggacaacacggcgaactcaccggtgacctaaacggcggaggaagaccaacggacggcgacggccacgaggaggaagcggcgggaaccttcgggtcgacgacggcgatgctgctccggtgatctccggcgacggcgaaggggcggacgaggacggcgacgacttggcgagcacgacggtggtcttcccgagcgacggcgacggctgaaacgacggcggcgcacggctggagcggcggcggcgacggcaaagctagggcacacggcgctagggcttttccgacgacgagaggcgaaggcgaaggtggcaacgggtagaggagacaccgggggtccttttaaaggggctcggaggcggcggcgaaggcccaaggcggcgacaacgacgaaggaaagctcggcttggagagaaggaaaccgatccgaaacgaactcgattccacgaacttccaaaacgatttagccaaagattccaaaggagaaaaggtagaggagatcccggagatcatttcccctctattgattcggccggagaaggaaaggaacggccggatttggaaggaaacggcggcggcgcgaaactagggtttcggcggcggcggccgaaggaggacgatgggtccgacaggtgggacccacctgtcagcgaccgaacgcgcgcgcgcggcggctgcggactgggccagctgggccgaggagagagaagagaggttttgggccgactttcggcccaaagccaaaagagactttttttaaaacctttttcaatttaaattattccttaaatgcaattccatttattaaaaatacttccttagctcaaataaatcccagaaaaatctaggaattatagaattaagcaaagtatttaatgaaattttatctggccccattttatattggaatttattaattaaaattagattttcttttcaagacttttaaaattatttctaaaaattccaattaaacaacaatttatatattttgaattttcagggtgtgacaactatcgggaagcactgatcggggcattcgatatccacaggcttattagctactaaatggtaattggcacatacaatttgtccggttgcttcttgtggcttttcgtagggggtggctacctggcgactggtcgcgcctgccccatcgcacgcgagtacgcgacccgcccccactcctctatagtctctatagtactagtataatatactactagtagtactagtattactattactactacactactactatcagtactagtattatttatataaaaaatatatttttatatgtatatattgttgatgtataaaaaatatacacatatacaaactttgtatatgatgtgtacaaattttgtatacgacgtgcacaaactttgtatacgtacgtattaaaaaatcgaaaaaacaaaaaaacatcacatatacaaactttgtatacgtacgtatataaagtttgcacacatcatatataaagtttgtatacgtacgtatataaactttgtataagtatgtatgaactttatatacgtacgtatataaactagtttgtatacatatatataaactttgtatatgtacgtataaaaagtttgtatacgtatgtgttaaaaaaacgaaaacataaaaaacggaaagaaaaaaccgggaaaaaaaccagaaaaaccaaaacagaaagagaaccccaaaaaataacggaaaaactaaaacagacagagaaaaaaaagggaaaaaaccaaacagaaagagaaactgaataaaaccggagaaaaccaaacagaaagaaaaacgaaaaaaaggaaaatcctcccgtgcggcgcgccatccaccgcgccctctccgcgcgccacactagcgttttcgcttttcgtaaacctgctgcgcgaaattgggttaggcatttgaaatagaataaaaagtatactttgactcccttaactattatttgagcatgattcacgtccttgtcgacgtttgatatcgtgactacggaatttgcatagtatggagattgttagtaccagggtatatgcgagattgaggtaaaagagatggagatagggattttatacaggttcgggccccttatctgacaggtaatagccctactcctgttgaccgaagccggtgttgctcttattcatcataatcacatcagtacaataattaggataacttatgtagccgtcgttgacttagcggcatggataaccaacacgtagtcgatgacagggtagtcatccctcaagtccgcactcagcgagatcggagatagcactagatccctcttgttggcctctgcagataccatattgggtttgtctaggcttatctctgatatcgatatccggcggcttgttttggcacatgttagcttgtgaatcgtgtgtcgatatgttgttgttgttgcttgtcccatctcctcctagggggcttgtatttatacccataggtgtccccttgtccaagtagaactagggagaccaatatggatacaatccgagtagtcctgatagtttccatatataactctatttgtcattccttatccggaactccttatgtatacgaggtatgattccgtataagacatggtatgtggtgggccctaccgagcttagtcaactactattaattatgtggtatccataaccatgacagtcctccaaccacaaaaccggaaatattgactcctccaactattaaaccgatgcaaactatgtcccttggtgattttggctaacgtggcgcctacgtggcggtcccgaccgggtttttgtcctacgtggcgcttacgttacgtagcattattgtaataaaacaaaaataaaaaaattgtgggaccatatatcgtccacacaaaaatgtattgtgggacccacatgtcatcctccctctcctttctttcttcctaatccttccttcctctctccgccccacgcggccacaccagcgcgcccacaagctcggcggcaccgcctccccgtccccctcccccaatccccatcccgctcccgctcccgctcccgcccccacccccggcgacagcatcggccgccgccgccgccgccaccacctcctcgtccccgtcatatcctccccatgtcgcttcctgcctccctccgccaccgacgcctcctcctccacgcaaagggcagaggtggttgccggcagcgccccactcctatgtgcgtcggcgccgccaccgctcctccacaacacacgcgcgtcggtgtagccgcccaaccaccaccacttgtcttcctcatgaatcgaacatcacatcgctatccccatcctatgctcgccccatgtcgtcgcgtccgcctacgcttctgcccctgtgtttcgtctccaaatccccactcgccgcccccgtccccgtggacgcccaaagggaagagaagggggagagagagagaaaagggagaggtaggaaggagaggaagaaggaaggaaaggagagggagggtgaaatgtgggtcccacatattttttttatttttattttattataatgccaagtaggacaaaaacccggccaagaccgccacatagacgtcacatcagctaaaaccaccaagagacatagtttacaccggttttgattgttagaggagttgatatatccagttttgtagttggaggatatgaatcatattcaggcgatagttgagggaatcgaagtatacgttttcctttgaaatacttcagacctttgttgggccttcacttcccatgtttggactctcccacaatttgggccatatcagatgggccctgtattaagcccaacaagaccgtagcccaccacgcgccgtgacgagggccccggtttgcttagcgacacggcaactactactaaatcgtgcgggcccacctcgcagtgtcccaactcacacgcacaatgcgaccgcgaagccgcctccgctaatccacctatttttattcttctctcccaccccaaaatccccaaatcccgacccgatcaaaatcgaagcttccgccgagttccccgtcgccgactcgcctggatcggcccgccgtcgagctcgcccccgaccatccgctcgattggaggccggggagctgcgtctggtggtgaatcgcatccgccgcggagcggttcgatttcggcggcggatttcgcgggggtagaggagatcgaaggggggcagagcagccatgagcgaggtgttcgagggctacgagcggcagtactgcgaggtgtccgcctccctcttccgcaagtgcaccaccgcctccgccctcgatggaggtaaccgaccgatcccctctagtctaatcccgatatgccatcgagatcttacgcggaggagtttcccccttttcttggagtacgactaatcgggtgtccgatttctgcagagaaaaagaagcagaagctgtccgagattcagtccggcgtggaggaggctgagtcgctggtaaatatcgaacccatttctttgggatccctaacctgcatcattatgaggagtaccattctagtattgacttacattctgcggtaggttagcagttaaaaaaggctggtgattttgatatgcggatgcatactttttagtagatacctgctatttataacggtgtaaatgtatgtttcatctggggtacaggtgcagtatttaacgttttatttgtatgggtttgtgcatacagattcggaagatggacctggaggcgaggagcctacaaccgagcgtgaaggccggtttgcttgcgaagctgagggagtacaaatctgacctcaacaatctcaagagtgagcttaagaggatctcggcgcccaatgcaaggcaggctacacgggaggagctccttgagtcaggcttggctgacactctcgcggtgagctccatgatttgtattactagctcaatttgaccatattgcagattttaataattggcagcatctagttttgtttgtccattgtgttgctgtagtttgtagttttaatctatatcacaataggtgttttacgtatatcacgggcacaaacgactgacaggtagcattcatgagctcataatcactgatactagctgtacttatatttttttaattgtgatacttgttattggatggttaattgaggctgaattaatggtggttgttttctttttttttccccaaatctgtaccatttatgtatgtatcactgacaatttaatggttcttaagttctgtattggtatgtgattaatagtgttatgctgaacttcagttagaataaggtatttaaatattttaatatttgtgcaatctggattttagttttttcattgtatttaaaacctttaaacaatgagagcttcattttgtaacatgttcttgccactcaaggtttttcctatatgtgttttttgtgtctgttacatggcaacgttgtaattcagtaggagtgtatatcatcagtttatttccagttgtggtttattttcagatctggacccttactgtcaccattatcaactgtactacagatttcacacaatctcaatgagttctctgtaactattttgttttgaaatttcctacataattttctcattcatttgttaatgtggacacaattgacagatgtgtattatacaagatatttccattctgatcttcatggtacaattctgtagtcgcatgagtagtgagaactgtttcttgtcaaatttgtgtggtccaatttggtccttgatgaatatccgttgttctgattaaaaaaaaatgctgatctgtcaggagaataggaaatcggagttaacaccctcagaaactgtcctttctactttcagtaatctgcttaatgtttttgcgaaatgaatacattatccagccaatgtattcctggatgttgaaaagcttttgggaatgctacctttgcattctttgtccgtcatatttttctgctgatataatatcttatatcataatgcctcagcattacattgattctgatttcttaaacattctctcaaagttaatgccgttttttcttttgttgtttttcatgttgtaactgggattattatgtaaatcaggcgtctactgatcagaggggaagattgatgatgacaacagaaagactgaatcagtccaatgataagattaaagagagccgaagaaccatattggagacagaagaacttggtgtgtcaattcttcaggatcttcatcaacaacggcagtcactgctgcacgctcatactactgtacgtattctgtcataacctttttacacatttattggatttgccttcctattaatgtcatattcattcgtcttctgggcatgtcttatgtttattatttgaaccatcctgtgttgtctggttttacaggtaaatatggcataggaatactattacttaggttctagatttgttgctttgctctatcttggagaattggctttttagcaagttaaggttgccttttgcttggcttttaaagttgacccaattaattccttgtttggtttggaggtgattctacaataggtgtggaataaatcctctccaatccctcctccctcttggggattaaccgaacaaggcctaaaggaacctaccaaccaccacatcaaaaaccacttacaagttaaaacaaaatataagtacttcattgtttatactcttgaatgcaaagagcaaacagtagacgatgcatatgcatgcaaagccatggtcgacgattcattgttgaagtgaatactggaaaattcctgtataaaaaatgtgctatccaaaatatttgcagcaagattcacatcattaacagtaatagatttagctgcaagctaatggcaacagtaatcatgcaatgcagtctacttatttcatatatgttaatggcgtcatttttctcacagttgcatggggttgatgataatgttggcaagagtaaaaagatcctggcggcaatgtcaaagaggatggacaggaacaagtggatcattggggggataattgcagctcttgttctagccatccttctcatactgtactttaagctcgcttattgagcttgctttctggtagggtcttcaaagcaatttccgctcagtaaatgtgtgataaaatagttgcctgaatgttgtacattgggcaacacatatctctgcaagcacacacttgtttccccaaacttatggtatttgtgtggctcatcgcccatgtcatgtaatgtacagttaacgtgcactccaatatgtgaaatgtctaaaaagggcttaaaatgaaaggtgactcatttatccaagtactgctttctgttacactagaggtattgaattctattctggtacactatagggagtgtgtattcctatacctgaactgatgtcactgttgaccatcctatcattgtgatttgccagcgttggccagtttgttatcgttgtcgactttggtcgcattagatgctttctgaattattgtgcagtgtgtgggggctcttgtgctggtgtgcatgcggaagctagcgtagacgatgcagatctgtcatctgcggttgcagggctaggttgtctagtaggggcaacacgatatggctgtatgcatgtatgtcattgtttgattggcctcccgtttgggcaatggacgaggttgatggtgatagtctcatggttgtagtaagcattcgtccaatggaagagaagtcggttttacgagtactgcagcaagccgatgattgatgtaccggccgggttcatagaaggaaaggctttgctctgttgatcagttcggaattccgggataaacttagcgagcggcatgggaagcaatagcgcatctccaacagcatcttttaactcgggctctccaaacacctatatagctaactctctatctaatttggctagtcaaactagttagtaactccaatggactatccatcaacactctccattatgaatctataatagtgggacctgtatgtcagcctctaataccccttcttcctcctcttttctcccctttttcttcacccacttctctccaattcttctcctctcttctctgcagtgcggcacccacttcagtgcggtgcggggatggaggcggtgccggcaggagcggcacgggcggcggaggatgacgtgagcggcatggggatggaggtgggagcggcgcgggcggcataggccagtgggaacgacaactatggtgcctgcacctccctcccctgcgagcggaggacgacgcgagtggcgtggggatggaggcagcgtcggtggtcgaggacgcgagcggcacgggcggcgtaggccggtgggagcggcaactatggcgcctgtgcctccctgctccactgcctccttccacggccggtgacctccaccgcggcgacgaagctcgagcgccacccacatctctctctctctctctctctctctctctctctctctctctctccctctcgttttcttccttgcgctcgcgatggagcagaggtgcggcgcgcagccacggctcagctgcggggagggcgagcagcggcgcaccgccggggactcaccactggcgacgtagaggcgcggcggtcacacgatgcacggcacggcaacatcgagcacgcgagctcctcagcatacgacggctcccgactttcggtgacggaattgcgtagacaccaccacctcaccccgccaccagcttcagccg

SEQ ID NO: 5840 - DNA, 18819 bp, Oryza sativa
gggggggtgggggggggagaaggggagccaggccggcgaggaagggaaaaaagacttgggctggaaacggcccaaaggacatggacggaattttaatttggtttttaatttaaataattgattaaatgaactttgtattattgaaattaccactcgagcactgaaaattcacgagaaatttcaaagagtactttatggccaactatgatttttaaagaaaaatttatttcccacattaattttactttataaattgcttttaattttaacataaattatagaaatgatgtactatttgatttttaacctcgaaagaaaatcaaggcataacattcattttcagaattttatagctacatgttcctagaatttgagtgacaatctatattacctggggagctagagatctttggagaagctcccataaacataacctttgtaaaactgaacaactctcgaaaagcgctcttaagcggtacctctatttctctataaaaaaccaaataccactgatgaagtatatattgctctcgtcctaaaattaaaaaaacaaagctttgttttttctaaaaaaaaagttccattttccaacttatattctctcattttttatgtgcatatttcccgaactgctaaatgatgttttttctctctctctctctatatatatatatatatagcatgtcaaaatgaaaagctatccccagaaaacaaagaaaacgaacttaggcttgattggccgaagctccatgtcatgactgaataaagcaagggagtctctgtccgtttcattacgtctttctcttactgatctaggatcaaggtagcaattctactactacgaaacaaaaaagaacttgatttttcagggaaggacagctttctttttggcaggaatgcaagcaagctaggccagaacaaggagaaaggctaaaactgtctgagccaagaaccagacgcgctcatggcttcacactcccaccacactaacacaatatgccatttgtttggcttaataaatcatctgcatcatatcaacctttccgtcaatggtttagtttatgtttgactctaagccatggcaatggattaagtaaagcacatgcaaattcaaccactctctctcagccagccactcgctgtctcactagctttctttcttcgtcttcctcttaagaaatccaataatctttaaccgaacaccacttaacccccataatgctcgccatggcgaccatccagaaataggatgagacggcggcggccacgatgctaggcaggatcatcttctgcgtggtgatcgccgcggccgtcctcgccgtcgtcctcctcgccaccgtctccccgctgccggggcgccacaagggcggcggcggcggtcgagaccatccgtggactctcaccgtgtacatccatacgacgacggcggcggcggcagcggcagcggcagctggaaccgtgtcgccgccgcagcgacaacagcaggcgagcgcgttcgtgttccggcaccggatgacggcggggccggagagcgcgtcgaggacggtgggcgcggcgacggggttcgtgctccctgccgaggccgccggctcggcgatgtcggtgttcgacacggtgcacctggcgttcgacgtgtcggggatgtccgggagcgtctgcgtccaggcggcggcgggggacggcggcggcggcgagaaggcgccacggccgacgaggcggcgcggggagtgcggtgacccggaggtgctgcgggtggtgggcggcacgggcgacttcgcgttcgccgcgggcggggatggcgtgctccgcgcgctgtgcgcgccgcggctgttcggtggcgcggccgcggcgaaggtgttgcggcttgagctgagcgttgcgcacgccaagggctagtgcgcgtgcatgggcgaatattttgctccttcttttttaccttgtgcaaaattgttgggcttttttttttccgcgttacattctccggggaaaatacaactcggctttgatgctggcagaaatgcagaatacatctgaccagtgtgcatataagtgttgagaattgggtgatttgagtgatttgaggcccttcatttttcgtgtccaagcttgaaactgagcgtatgcttcattggttcgtgggacggtggaagcgtatactgcagtctgtttgattcagcatcgggcaacgagacatgatcctttgcagtactgtatttgcagaagccaggctgataggtggacctggtcccacatgtcagcggctgctacagcagctgcagtcctgtaaacaattcccattacggataacggggcaagctactttatcgtattctatggacacattttataagctgttaaatgatacgttttatgaaaaaactccaaaacaattttttttagtttataatagttaataacttatctagttttgcgtgaaacaacttagccaaatgaattcacccattcgaacgcacccaatgatgcatcattcgaatgctaattagcaacttcggtcattgtgtgcgcgcgtgtgctttttcttgggaggggaatgcatatcgttccgtttgtccattccgattcattttggaaaaaagtacgaattacctcccgaactatcgcatcgtccgaattacacccctgaaccataaaaccggatattctttaccccaaactatgcaaaccggacgaattacccccctcaatccaatccacggtagttttggtctacgtggtgtacgcgtggcagtccagtcagcattttagttattaaaaaaatgtgggacccacctgtcatacccctataacattattccccccctctctcctctctctctctcttcatctctctcctctcactctctaaacgcgcacggcgccacagcggcaggcggcggaggaggcgaggcagcagcgaggaagggcggcgcaggtggcgacacggagcggcggcggcggcaggggatgaggcgaggcggcagcgaggaagtaggggagcttcgccgtgtcggccgccatccctgtgcgccagcgcgtcgccgtctgcatctagcggcggcggtggctgcggctgcggcgaggcaagcgcgttgcgggtgccctaaggcctgtctacttaggccctgtttagctaatgggacagggaaatcatttcccaaccactaaaagacatctttaaatcctaaccattcattctcactctttcatttaatcctaacccttcattcatttccaaatctcaatcccacctcacatttcccattatccaaacacaccctcacattacatggcaaaactttgtcctgcaggaccacattttaacccaaacaatttgacgcacggtgcaccagaagatgaagtccgtcatgcgggtgacctgggaaacattgttgccaatgctgaaggtatagccttcatgtaatcactacgaatgcatttttgatgtttctctctaaaacaatcttcttggcatacttattttatggtgtgtctgtttaattgttgtcatacagatgtagtcggccgccacgatggaggggagcttcgccgtgtcggccgccacggcggcggtcgtggctatcgaggaaggtgccgccgagacggcctccgcgtcggcgtcgccgtcgtggccaaggaggacacccatgctccgcgcctccatccccgtgcgccagcgtgtcgccgtctgcatctggcggcggcggcggctacagcgaggcggcagcgaggaagggcggcgcagggggcgggagcgagcggcgactgggtggcgagcagcggtgggtgtccctcagatccgcccgcccgcagcgcccccgcctcgctcgtcgcacgcagtggggctcgcggggatggccgtggacggcggcacgagggggcgggcgcagctgggtaggcgaggctagagcggcgggcgagcgggaggcggcacggccccgcccaccacagtcgccctggtcaccgccctcgcccccgaggtcgccggcgtgcagctcatcctcgacggcgccgacctcgccaagaaatcagtagctagtcagcctccgccagcgccgctcgtccccgtgccgccggtcgccgcccgcccctgcacgccgccattcactgccctcgcgccgccgcccacctctcgcccttgcgatgcccgtggaagagagagagagaaagagtgaagatagagagaggaaggagaggtatgacactatgacaggagggtcccacaatttttttaagaaaaaaattgctgactggactgccacgtgtacgccacgtaaacaaaaaccaccgcggattcggtcgaggggggtaattcgtccgatttgcctagttgggggtgaagaatgtccggttttatggttcaagggggtaattcggacgatcgcggtagttcgggggtgtaattcgtactttttccattcattttgcacgatccatgcctaaaatccaatgtcaaccaaggccatagtccactgtactgtggcccagggaggcccagcccacttggtgttgtaatatctcagaaggaaaaagtacaccgaaggtccctcaacttgtcatcgagatacaaaatcgtcccccaaccacaaaacatgatatgtggtacccctcaacttacaaaactattcattctaggtccttcgttggttttaacctcggttttgtccgacatgacagctgagtcagcgcgggacctgcgtgggccccacatgtcagacaatccacatcagctttctctttccctcttctctcccttcctcgtctctctctctctctctcttctctcttggcatggcgggcgacgagtggggaggagattgcgccgctcgcccaagctggccgagtcccggtggcgccgctcgccctcgccggccaagtcccggcagcaccgctcgccctcgccggccacgtcccggccgtgccgctcgccctcgccagtcgtgcggaacctctccgccggggtcaacggcgacgatggcgccgccgcgcgttcgagctcgaccggtggcgattccgcctccctccatgcacgctccccgccatggccaccgccaactacaccgacggcgagctcattgtcaccgtccccaagggcgccgcccctgacgacgacgacgatggcgatggtgtgcgccgcagccgtgcttggaggctccggcgcgctcgacctgcgcgctcgtcgttggccgccgcccttcgacacgagcaccttcttcgcctcggccccgagcgtcgccattgccaccacccaccgcggccggcggcgacaacgggggattcatcttgcccttccccatttctcttccaagcttcttgtttctggtgggcggtcccctcccatgggccggtgccggcgagggtgagcggcacggcggggacacggccggcgagtgtgagcggcgcgatcgggactcggccggcgagggcgagcggcgcagctgggacttggccggcgtgggcgaacgcgcggtctcctccccacccgttgcacaccatgccaagagagaagagagagagacgaggaagggagagaagagggaaagagaaagcttacatggactgtctgatatgtgggtcccacgcgggtcccacgctgactcaaccgccacgtcgggtaaaaccgaggttaaaaccaccgaaggacctagagtgaacggttttgtaatttgagggatgccacgtaactggttttgtggttgggggacgattttgtatctcgatgtcaggttagggggtggctagcgtgcgcgtgcactccccccttccctttagtcttaactatatatgttaattaatatatttaacactaatgatagtagttaagaaagattttggagatttttttactaacagattaaaaaaatttaagttagatttgaaaactttcgatttaagatttaaattttaaagtcaaattttaaaaactttcaactcagatttgaaaactttcaacttgagatttgaaatctttcaactcagatttgaaactttcaactcgagaatcgagattcgaaaactttgaagtctagatttaaaaattttgaaaactttcgatttgagatttgaaaactttcaactcgagatttgaaaactttcaagttcagatttaaaaattttcaactctaaatttaaaaactttcaaactcaaaatatactaaagataaaaaaaatcagaaacaaagtgagaaaaaaaaggtaaaaaaaaaaggaaaaaaaatcgtagaggaggcgtgcgcgcgccggcgcagcggcgctgggcctgactagtttttccggacaagttgagggacctttggtgtacttttttcctatctcggaaaggaaagcccgcacgaaccccgcgcatagcgaggcccacaatcacggcgcttcggtgtcctaaccggcagcgcgcctccacccgcggatccggccgtccacgcgacggagccccgcgcgccgcgaagagccgcggtgtcacgcccacgcgaacggacgtggcctcccctcctgcagcggcttcaccggcgagagcgacgagaccacgtcgtccccgctcccgcctgagtccctccctgcgtccgctactatcatgtccacgtcgtccggttcttttttttttcctcccctgaacgcccagctacagatccatccgttttttttttctgaacgtcgcagctacagtctacagatatacagacgtgccgatgactcgtgacacacaccacgatctcgaaaatgtcgtgaaattcgtgcgttgcaaagatatccgaattggagatttctttcttcccccgagaggctttattgacactctgtacaaactacttcgtaccctctttacaagtgaagaaagagagaatactataaaaacacacactttgcaactcatttttttttgctattcctaatcttgatatgaaagaataaatgaattatgaatcggagctataaggcaattcctgtacgtgttcatgcgaaagctgtacgcttgcgtggttgtcgctgtgcctgtgcagccgtcgtcgacagcttcgacaggaggaagacgccggcggaggaggcgagcacggcgccggcgaagcaagccatgtcaatcccggtgaccagcggcacgctcttgaacttctcgaggacgcccgcctggagcagcaggagtatggcgtgcccgatcctcgtcttcgcctgcgtgatcgactggatcctggccccttctttcagcttctgcgatatggaaatttacggttctttatcagcattgatcaatagccagacatggttactggtgaacatctgtcaaaacaaaaatcgacagatttcagttacctttaggttgaaggatcccaggtgagaattatcgccttgcattcctgggttctgaatgctccgggagccgtagaacatgatgtacattcccatgccaaacgtgagaagagctgtgccgatcaggaacatgtctgcagaagaagaagcatagtttgatttgtcaagatttagtaggcataaattaaatcggtttaacatggaaatggttacttgtatgcagtttaaaagtgattataaggggcgtacctattgcctcgatcagcagctttatgatctctgcttgatcaattgtctgtgtcagggcacgaaactgtacgaagaatgatctcacaactgcaccacatccctgcataattcagcacgaaatctttcagcctcgaatgttctttcacttaatacgatctcgaatcttgattagtccatcatggtttcacttgcagcaggaaatgatcgtagaagctttacctcgagaaagcatggcactgatccgacgagtgatccggccacaccgatgagcgtgaacgactggcatctgacaacaccctgaaaattttacagttcatatgaactccatcagtaatttaaatccgcaaaacttcggctaattcggattccaaagaactcgcaaaatttgctgcattttgaggtgattagtttcagttaattacctggtggatggtggcctcggcgatcttggaccagcactgctgcgtcggccgcgtcgcgcccccgagctgcctcagcaccagcctcctcgcgacctcgtacgccagcggcagcagcaggtcggcgcccctcctcgcctcctccggcaacaacaccaccccgccgccgcgctccctctccagcgccgtcacgccggcggctcccagcgcgatcaacgccgccttccgctccgccgcgcggctgccgacaccgccgccctgcctcttcgactcccacagcgacgggaacttcagggacgggatgcggcacggcccagccacgccgccgccgccgcctgccgccaccgaagacgacgacgatggcatcatacgatgatggctgctgccgtctccatgaaaagccttcgcggttgctcctctcagcaacctgccgctaccaccaccaccaccaccaccaccagctgctgctgctgccattgctgaagctgctgaactccgtcactgtcagctaccgttgctctgaacagcaggaagaagaaggtgtccggagtcgaggccgtatttatagtcgctgataacgtacgatggagaggagagggatcatacgggacacgcgtggtaaattcgcgagtttgggaagtttcgacgaataataatcaaagcccacgaaaatgcagaacgagatggaaacggagaatattccgatggcatctctgatctctctttgtggtgagcttgtggttggcgtggattttgtcccggaaggacggaattctccgaccggtagaaaatcgccgtggtttctttgacgtggaactggtactgacagaactacttttcgtgttgaaaatatcaccgtgttgtaccagttgtaggtgtggttactgatgattatgaaaacggtgatggaaattctcgatcgatcgagcatcgttttaaaaaaaacaagggtaaaatttgttgtaagtatttgattaagaaaaaaattaaataacttataatatgaaatataacggagggagtactaggctgtgtttagttcagcgcaaagtttaaattttggttgaaattggagatgatgtgactgaaaagttgtgtgtgtatgacatgtgatgtgatggaaaagaattgaagtttggatctaaacacaactttagttgtaggttgtgattaaacaattattacactgacgtacagttccacgataatttagggcctattcagcaagcgccgcggctgtgcacagtgaatgtggcactgttcatgccggcagtcgcagcctgggcagcccaacaggcccttagttactaaatgaaattgtgtatattttgttgagataataatgagtgctatctgtaaacgaaatggcaaagaaaccggaaactgtacaagcaaaacggagtaactctggtaattcgctaagttacagcaggttattatcaatctcaatcaaatgataccaggtttatgatcacacgcatcagaagggaacaggagaaacgatcgaccgaggagactggagagtcgctgtaccgaaagaaaaagttgagtttgatctccagctctgcacgcgaacgggagagagagagagagagagagagagcagacagctccaaactcagttgacgaaagatctccaccgctgcgacagtggagagaaacagaagccgttccagaaacgccgacgaaaatgctcgggcgccgttcgttcgttcacttgttccgccctctgctcggaacgatcgaccgcacgcgtgggcgactgggcgtgcgtgaggctgacgaggatgtgtaaaatgccgcaggtgacaggaggcgacggacgaacgacgtgtgcgcgcggcgccagaaggttaatttcttggtcctcccgggcctccgctggcacgtgaggcaaacgccggccgctcgttattatgctggagtatgtcgtcgtctccggcactccgcgtgcgcttctcaacgagttctcaaccttctcttgcacgtgtacggtgctgtcggcgccgcgcaccctgaagtcctgcatcgatcacactgctgctccggccgatgcatttcatctgaaagaagtgtttcatcttaaaatataaatattttttaaaatagtgctaagtcaaatatttttaactttaactatcaatagaaaaaaaagataaatcatgcaagaacgatgttactagatttatcagtaacaaaattatcataatatataactctttttatttaaaacatctttttttaaatattattagtcaaaataacatctcaaagactatattgaagtctaaaaataattatattttgagatagataaagtaagtagtagtaacagatcaaaacagtaagcgtagtagtagtacagatcaatactgtcccagggcgggcagcggcgatactttcggtaccatacaagacgcggtttagaaaaccattctaaacgccgtttacaagacgctataaacgtgtggtgtgttgttgtttttttttttcatggctatatcctccaagggttgtagtgctgttctgataatacgaaacgcagtactatgttgtttattaaaaagaagcacatatctgattgtgaatgctcgctcgcacatttgtcatcgacttcggtattgtctgattgtctccgagcgactgggcgagagatgtagcggttggcgcaccaaccattgtccattgaacctgccaaccacgcctcggcgtcttctctcctcttctctcgccccgttaacttcagggagcgctacttgtacacggatgatcgacaagtcggaactactccttcacaagtcagaatttcgtactaccatttggcagcgattcgactactcctagttgcatacttgcaaccgagaggtacagtactcttctagctacagtatagcgagtgctactactccagactgcttctacttctctgtacttgcagggggtgcattgtggccgatacattcgtccaggttcagcgtgttgagcagatacgttcggtttagcattccagctgctagctccaagtcgccaacaccttgtcgtctcatcgtttgtcatctggtcaggtcgtcaagtcctgaactactgctgccgttggttttcgttcagacactgcatagctgcatactggcttgtcccaaaaagaatcaaaccttgtgtgtgacccagagtttgatttttttttatggaggggtacacaactgactatcgaccgagggtgtgtttagttcgtgaaaagaaaatttttaagtgtcacattagacgtttgatcagatatcagaaggggttttcggacacgaatgaaaaaactaatttcataacttgcttggaaaccgcgagacgaatttattaagcctaattaatctgtcattagtatatgtgggttaatatagcacttatgactaattatggactaattaggctcaaaaaattcgtctcgcgattttcatacaaactgtgcaattagttttttctttttatctatatttaatactttatacatgtgttcaaagatacgatgtgatatttttgaaaaaaaaatttggaaactaaacaaggccgccagctagaaacagcagcacgtacagcctcttttttgaaacgaaccacacccacgagacaatgtgagtttcattaattgatatagcacaagaataagtatatagtcctggaagactatagacagaaaagaaaaacaaccacaccgcgcgtctacaacagctcctgttgcgagagaaaaaatagaaacaagagatcttcagaacgacgcctccaaaaaaaacgacgccaagaacaccaccactacctgtcccggagagcaaggacatgattttcacttgaaaaaagtaactggagagacaagaatatgtaacaacgctccaagaggaaagcggcacccacatgcgttattgttgctaccccgaagatagagcattcgcccataattatttcatcattcccaagaaataagctcctgcacactccgctgccaccaccgtcgaaagccttcgacgcacagccaccgcatcggcgccacgttgccggccgaccgtcataaaggagctcgacccctgacacgctccagctccatccacgtagttgggttggatgaggagagggtgagagagaagaatggatctcctctctcccacactagcccgttcgacgtggtcatcttttgtcggcaaaaggcgccgttgccagaggacaaatatctagactggggcccgtcgtagaatcgcagctccccctgatggtgtaaccgccgactccgccatgatctagttgcccgcgtcacctcggggcaccataccgcgtctatgctgatgacaccatccgtcacagcgcttccgatgtcatgttaggccggaattaatctctatctcgaactccgtttcgattccttcttctctaaatttggtcattaacatttctttgacgtggaattggtactggcagtactacttttcatgttgaaaacatcgtagtgttgtatcagttgtaggtgtagttaaccgatgattatccaaacggtaatggaaattcccaaccgattgagcatagttttttttttaaaaaaaaagtggtgccgttttcaactgttttttttattctggccatgtgtaaaatttgttgcaaatatcacagtgatgtactagttgttcgttgttgtggttatgtgattattgcagtgacgccctgttccacgacaattagttattactggatgaaattgtatataatttttttgagataataatgaatgcaatctgtaaaatggcaaagaaatcggaaactttacaagcaaaggtgtactgaatatatgatatatgggagttacagattatactgcaggttatcaatctcgaccaaatgataccaatgtgcagctgaaggggacagaagaaacgatcaatcgaggagaccgtagagtagagtcgctgtatcgaaagaaaaagttgagtttgatctccagccccgcacgcgaacggaaaaaggagcagaaaaccccaaactgagatgacgaaagatctccccgccgctgcgtcgtccgtccgtccgtccatctgaacgtagctcacattgttgcgttagttccagctggttcacagccgctctcctccgttcaaacagctgttttttacaaaagttttatatacgaaagttatttaaatattatgtcatttttctaaaaaataatatacacttaattaatcacatgtgaatggatcatttcgtttttcccaatccaatccagggaaacgaacgcagctgctgggatcggaatgaacgcagccgctcggaatgatcggccgcacgcgtgggcgtgtgtgacttgacgaggatgtgtagtgtagcgtcgcaggtaacaggaggcggacgtgtgcggctcccggccggcttacgccgaggccggcacggcggcgcacgtgaggcaaacaccggccgctcgttgaaggcggtgcgtgctctatgacgtcgccgtctccgcgtgtgcctctgaagttctcaactctggcacgtgtacggtgcaccctgcgtcgatcacatggtccattggctccagccgacgatttccatcagaaaactgtttgtgttctacaacgtggtaacagatcagaaccgtaggagcacgtagaatttttctttttttagaaaaatacgagtgatattacagtttttaggaggtatcgaaagttgctatattttcgaatgtaaaatttgtataaaaaaaaggtgtagctatatttatggcgccatatttttcacctaaaaatagtcggcgtgtatttacattgtaagtctctaaattacatatgtaaatttagtgtatttataatgtaagttttaaaattacatatgtaagtctcaaaattacatagtaattatatgtgtaagtgggatgtaagcggggtataaattgtgttaaagaaaaggatgcatacatgtagcatgaaattaggtgacgtttcacttggatttgcatgactttagagattagctagcaatagcatatgctttcaggtctcttcgcgaggaaaaagtcagtatggaagcacggatcttaaacacagatccaacggccagataaccgactgtaatcaacgaaaaaaatctgtcgacataattatagcaaatccgaaaaaaatggtacgtcttagtatctctcgcgaactgtaaaatttctttaaaaatattccttttcaccggtttcataggaatacgcatgtttcaaagaaattgtcacagatatatcgttatcgtatagcgagaataagaactcacgacgagttcgcacagtgagtacacaaactcgcgatgtttgcgaggaatagcgggaacgatccgcgccaccacgaactcgagagcgagatcgctgagcgaactcgtgagtactcgtgcatgctagtctcttctggtttgctgctaccacaagttcacatttttagaccattcacggtgcgccacaagaatttagtgtgcgtcacatgccacctagacctaagaacacccaagaactagatggatacatactccacggtgcgtactacttgcatactactttataaagggtcccacagtgtttcccatctcctctgtccttcttatctcttctttctcccctctttgctcttatctcttttctctcacctctctacgtctcccacagacggtgaggaatggtggcgatggggtggctggtggtgccggagacgggttgagcggaggccacggcgccgggcaacggggcgacctaaacggccgccgccgccctgctcgagtggtggcgacggctccgagccccggggcggcctgagcggagggcggcgacgactgtgccgggaggcggcgccagagacgggtcgagctcgccggctctgaaccggcgtcgacatcaagctcctatgcctctctcttctccagccggccgtgtaacatcccagcctagggcttaatagcattaatacaatactcatatcaacaagttataacttctttttcggaagccgatcaactctagggttaagcgtgcttggtctggagcaattttggatgggtgaccgaccggaaaattcttcctgggtgtgcacgagtgaggacaaagtgtgcagaaaagacttgtgttggtctataagggcagcctatgacctatgaaagctgccaaatgtaagagggcctggcataggagaggcgggacgttacacggccgtccccttctcttctcctccgccggcttttactgggagttaaattttaactcatggtaacgtggacgaatatcggacatccatttctcgatccaacggtagttttcaagttaccactacatatgtggtttgtactacatattttcccgcgagacggggttgggagcagtaggacaacgcatcgcgaatgtgggccccctgtaaaactaacgaggaacgggtggctaaagttggctccacggtcttgagcaagccgcgcggattgccaacgtgccaccaatattcggtttttggggtgaggctgtatgccacatggaagcattgtgaatggccttactaaacgtttgtatccttgctccctgacgatggtatatttttaccaattctttctaaacatgtatatttttataaagccggtgaaaaaaatatattttcctatatttttcggagctactactgtgtagtgtggtacagtaatataccaccccttttttatttttacagcgaatctgtttgcgatcgactcagcgttgttgcagagcgagagaagtagcggttggcgcaccaaccattgaacctggcaaccacgtctcggcgttttctcttgccccgttaacttcagggaggctacttgtacacggatgaactgtacgtcgagctgctcctcctacttcacaagtcagcatttcgtactaccattggcagcgactactcctagttgaaaccgagtggtaacttctccctacagtagtgactgctactactcctgtgctgtgctcaacttctggacctgcaacgttaacggtgcagcttggcagatgcattcgtccaggttcagcgtgctgggcagattttttttttaagataatggaataaaatatcccggcctttgctcatcagagctatagccaattattacaaaagtaacatccaaacaccgagtgtagtttaaatgaattaaacacacccaataaaataaaagatcaaactaagataaggagagcatatttattcaagtttatttgtgaatctctatccatagtttgcaaggagttgcatgaccgttgtctcaagcctacgacatgcaaccttcaataagctcgcgatcatcttcacacatttgcaactgtgcctaaaatcggagccaatatgttgccctggaaattacctgcatatatgagatagatgttgatttgtcaaaaaccatatcattcctagtcaaccacagagcccaatatatggcagaagctcctacaagtatgagtttgctcttcttcttgtctacccccaagagccaaccatcaaatatattagatatggtagtatgaagttataaaccaagagagaactgtactgctctccaaacaaattttgcataatgacactctataaaaagatgttgaatagtctcatttttcattaaaaaacatcatcttaaactgccattccaatttcgtcttgccaaattatccttggttagcacaacccctttaagcaagtaccacataaaaatcttaatcttaagtggcatcttaagcttccaaataatcttgtttctctcaatataaccattattaattaaagttagatacatcgacctaacagaaaatattccattctgatgataattccatctaaagctatcagaggattgattcaattgaatatgtacaatagaagcacacaattcatgccaatttgcaagattctgaccaactaatgatctcctaaagaaaacattgagtggaacagatctcataacattagcaatagtagaacttttccttcggacaatagagtataaagatggatatttgtctttaaaagccaggtttcctagccatttatcttcccagaaccttatttgtttcccattatttacaatccaagaatccatatctaagaaaatatctttgaccttcatgagacctgaccaaaaatgagaatcaccctgtttcttattaacttgggttataaactgattgtagagatactctcttcaatagattttaccatacaccttcctcgttaatcaacttaaacaaccacttactcaagagacacttgttttgtatttccaagttatgaacccctaaacctccctgatccttaggttgacaaatgatatcccatctagtaagtctatacttttttttatggttatccccttgccaaaagaatagtgatctataataatcaattttttgaagaacccctttcagtatctaaaaaaagatatcataaacatagttaaacttgaaagtacagagttaatcaaaaccagtctacccccaacagataaatgttttcctttccaactaagttttttctcaattcttttctcaatcattttccaatctctattattcagttttctaacatgcattggtataccaagatatttaacagggagagagccaaacttacaaccaaagatgttagaatactcatcataatattcctttgcctgaccaaaacaaaataattcactcttatgaaaatttgttttcaagccagacaactcttcaaacacagataaaatcaatttaagattcttcgcttgttgtaagtcatgttccaaaaaaatgatggtatcatctgcatactgtaaaatagataaaccatcatccactaggtgagggactaccccattcaatgaaccaacatctttatccctcttaattaataaggtaagcatatctgttactatattaaaaagaattggagataaaggatctccttgccttagacctttgtaagtttgaaaattattaccggtctgatcatttactctaataccaacatgtcccccttgaataaaagaagttatccactcacaccatttaggagagaaacctttcattctgagcatctgttgtacaaaagaccatttaaccttgtcataggctttttcaaaatcgatcttaaaaatcacagcacttttatttttgcgatgtaattcatgcatagtttcatgcaaaataacaacacattccataatatttctcccaggtataaaagcagtttgagtagggctaatcaccttttgagcaacactcattattctattcgtagcaactttggtaaagatcttaaaactaacattaagtaagcagataggcctatattgttgaattctcatggcctcagcacacttaggcaaaagaataatagtaccaaagttaagggagaataaaggcaaaagtaccattatgaaaatctctgaaaagatccaacatatcatccttaatgacatcccaaaagacctgataaaactcagcaggaaatccatcaggacccggagctttattatgttctatttggaaaatagcctctttaatttccttttcagtgaattattgtattaaagcttcattctctaattgagatacttgtgggatgtccacaaaattattttcatcaaactggagatcagaatcatcaggaggaccaaagaggcctttataataagtagtaatatgcgattttagatttgcatcaccatttatcaattgatccccatcttgaagttgaaaaattctggtttttctatgtttgccgttagcaaccacatgacaaatactttgtatttgaatcaccctccaaaatatccttagttttagccctttgataccacttaattt

SEQ ID NO: 5841 - DNA, 26858 bp, Oryza sativa
atttttcaatggtacatgatttataaaagtgtatatatatatatatatatatatatatatatatatatatatatatatatatatatatatatatatatatatatatatagtaaatttgtttggtgctccatggtgcccgggcaccattgttgaaattgagtatatacctaattcaaatgagtatgaaactttttcaattacttagatattaacattagctactttactaactagttcaaagcaagtttgaactgaatttgaacttgtttttgttagattttgattctaggtatatagcatccatacatataattagttaggtatgtaatcatggattgtgaaataaagttaaatttgagttgttttgttgataggtataggtatgaatcgagttattataactaggtatatactcacaatttgaaaattttgaaaaatttgagtgattttgtgtatttgataccatggtgcccccatatgagtgtcctatatatatatatatatatataagtaaaagtatatttagtcttgaggaagtttgtgccctctagaactggccctggacagatggacggcagtgatatggcgtggtgtgtggcgagggcttacagcgctgctgaggagaggatgagatcctatgttctatcgtctcttctggtgaggcttcgacgaggacctggccttcctgttgcaccccagcggcaccacggcttcccaaggtgaggcccgctgctgcgctactgagtcagctggtgcttgattattctagtattgctgctaatgacgatggtggactggtggtattcacgtagaattgattctcgtccaaggagggggcttcgtcggggaggagagagaggcagagaggaagaaggtaggggaggattatatatttttcttgtgactgacatatgggtctcaatatttctttttttaaattttttttccttgataataatgccacgcaagcgccgtataggattgaagaccaaatcaaattgccacataggaaaaaatcattattcaaaccgccgagagactcaactttcactggttttgattggtgagggatgcctatacccggtttcatggttgagggaataaagcttcgcctatagttcagggattaaaaatgaaccttttccattttcctttaaaaagatggaggtggatcggtgatttagcccaaattctcggcccatttataaggacgggacgaaattagggcccattatattcaagtctttgcgcacttatcccgaacacagaaaacgctcctgtctggtattgttcagaagtccaccgagaaaacgctttgttcgggaacacaaacgaaacttcacgctatgtctccaacctgctttgtttttggactgggcttctagcctcctactacgctgcttggtttgattcttgtagtggagtagtacttttttttttttgaccgtgatgattcttggagtagttattattaattactagctccctcggatgaagctactgaccagatctgatgtgcctgtttgacattgtttgattgcatggttatttgttagctacaccgaccgaccagagcaagtcctcttacctcgatgtcaaatgaaaattttatgagtcacgaccgaaccaaatagtcattgttttgtttgtaattcgcgtcaactctggtaacttggcatttaattagaacctatgaaatataccaagagtacttgctctggagggggttctaatctctcgaaaagggatgtcctatcattatttgtatgtcactccaatacttacgaaaatttttaaaaagatgtattaatacgtgatatatcactccacaaacatgcaacttaaaattcaacttctacatgtctcaaattgttttttttatcgttgtgataaaagttgacttttaagttgtatgtttgtaaagtgatatatcacatgttaatgcatattcttagttttttttcataaatatttgaatgacatgcaaacaactactccctccatcccatacaataaggattttgagttttttttcttctactgtttgaccactcatcttattcaaaaaatttgtgcaaatataaaaaacgaaaagttgtgattaaagtactttggataataaagtaaataaaagaataaataataattttaaatttttttaaataagacaagtggttaaacagtgcaagaaaaagtcaaaatcccttatattatgggacggagggagtagtaggagacatctcctcgagagtttaaaatccactctcttaataaggggcacactaatcatttctcctactactaatttatccgataattgctaaaattaaattctttataagatggagttagcaaaattaacatatactgcatttaacacagcccagaaaaccaaataccggtcttaattttggtacctccgtctcaaatagaaaaaaaaacatgaatatcagggaacgatctaatattaaataattaaaaggggtaaggctcgaattcagattgctagcccaccactttgtgaagctagccagaagatccctaaatgtttatccctccgtctgacatcgtcgttattttgttggagtacgtcttgtagatactggtcacagtttatcgtgtttaattcattaccaccgcatatgtagcatacacatatcgtagtaactattacaattaacaatcttgattattaaacttacagtacacactgtagtacgtatacactacagtacacatgtaaatcgacactgtatagtacgcaggtactgctgatcaatttacagagcgcgagatttatttagagatcatactaggcaaatcgtatgagttgagagacgtgatgagcgccattgcaaggtagcgacaagctacgtactaactaataatcggcggagacggcggccggaacaaacggggtggcgcagagcagcagcggcgagcggcggcgcacgccgaggcccggcgcctcctccatgtcaacctccttgacacccaccaggagcgaccaatcgaagtggtagagcatggcaacgagcacgagctccatactggcgaggccatagttgaagccagggcacatcctcctaccagaaccaaatgggatgaactcgtagctgccacccataaaatcgatagcatcgtcgtcgaactgctctggcttaaactcctcagcatcctcctagtactagtacttagggtctcgaccgatagcccacacgttaacgatgacacgtgatttggctgggatcgtgtacccatctagctcacacgtgtcgatgctctcccgcggcaccagcaacggtgccggtgggtgcagcctgagcgcctccttgatcactagcttcaggtacctcaggttgcttgcctgcaggtcggcctccgtcaccaccgccttcctgtggaacgcctctcggatctgcccctgcaacttcttcatcaccgccgggttccgcatcagctctgacatcgcccactccaacgccgacgccgacgtccccgtcccgccggcgaacatgtcctgcacgtcaagtgtacatatcatatgtgttacaatgacccatggagtagtaacacttttgccttcatgcacatgcaatcaatgtatagggttaccaaaatgatggccttgattttgttgtcgtcgaggtggaagccgaagccgcctttccaccgaagccgcccttctcctgcaaggcgatgagcacgtcgacgaggttctcgtcggcgttctgatcatcggcggcaccgccgttgttgatcttgtcgccgcggacgcaccgcctctcgtcgatgatctcctgcaggatggcgtcgaccgtcttgtggatgccgcggaggctgcgcttcatgccggtgaccgcggcgagcgcggtggtccacgtcgggaagaggtcggggattttgaagccgctcgacagcccgacgccggccttgatggcggccatgaactccggcgcgctcttccgcttcctcccgaacgccgcgcgcgccacgatgtcgttggtcgtgctgtggaacagcacgctcaggttcaccggcgtcgacggcgccgccgcggcgcggatctcctccacccgcgccgtcacctcgtcctccctgatgtggcggaaggagaggacgcgcttggggctgaggatctcggcggcgcagagctggcggagcttgcgccagtagtcgccggagggggagaagaggatgtcggcccagccgtagccgacgatctcgccggcgaggagcctgggcctggtggcgaagttggcgtcgtgggtcttgagcaccgcgcgcgccgcccccctcgacgacgccaccaccaccggcgtctcgccgagccgcagcatcatcagcgggccgtgcacgccggccaggtcacgcatcgcgcggtgcggcagcgcgttcacgaggtggtgcatgctgccgatcaccggcagcctccatggccccggcggcgtcctcggccgccgcctcatggtggcggccaccttcgccagctgcagcagcgccacggcggcgacgcagagcagcagcgactggaggaagaagtagtcgtccatggctagctaaagctaactaattaagctaattaattaactagctagttatagctgctaattaagctgattaatcttacagcagctagggctagctagcttttacactgcttttagtgcagtgctgatgagtgataagttaattgcagcatggcttggacagaataagggtttatataggcaaacaagctaattaaggagaggattgggccatgtaatcgcggatgctgagatataattttatgtattgtgggaactagcttcttggtttgtgaaaaacgtgtggccggttggctaagctaatcaagtatcgtttctccctctgtcaagatgggataaaatggctaattaattaattcccaccacaataatggtttaaatcctaattaaggacaagcttaacactttgagcatgcatggttcaaactcatactcagatagatatagtccatgttttcatttgatgacagctccacaaacatgtcatacaatggttgctgactctaatcaactctcatttttttcacccttctcttctcccgtgttagtttttttttctagcctatatctatctcacgacgcccgggggggggggggcgctccgcctataggcattcctcccacttctgcccttcctcctcccgttcttctcttcctattacagtacaccacaaaaaaaatttaaaaaaaacaaaaagttagaaaaatttatgtataaaaaatttgaattcaaattcaaatttgaatcgggtatgtaaacttttgacttataaactttggatctataaactttaggtgtataaactttagatgtatagaaatactatattaaaaaatatttgaattcaaattcaaatttgaatcggatatataaacttttggtctctaaactttagatgtgtaaacttgaggtgtataaactttaggtgcataaatttattaaaataggaaagtaatacggtgccaaaaaaggaaaccaggtggagggagggagggggagggggggaatcgatcgccctgagcgggcgagcgcgctcacccagtagcatttccgagttgactctcctctctcatccatatcaacactcacctatatttgacagggtcatgtgtagattcatttattgctaatgtaaatgtcttaagtgatgttcagtaccgctcatctgtctgtgctaatatacgggttttgtgttgtcggcaaatatatattgttttattttgttaaaccattactctatacacgtttatatattttgtaccattgctccctttaaacaattaaagtaaaataactttcagttctctagagggtgtgatatagataaaaagtatttccttcgttacataaaaaaccaacatagtataggatacgacacattctagttatatgtccagattcatagtattagaatatatcacacctggcctggtcttagatttgttttttacggggcggatggaatagatctaatacattcacatgtaaagaaatggatcggaacaaaggaaggcgtcacgaagaccttaattttctattgtccaatagctcaatttgtctatgtaatgaaattagcaagttggtgctctcttgagtttgtgcagctagatttggtttgtatattttaacatttttttagccattcgtgtgcttgtggagagcctctgtgatgtattagggaaaacaaatttaatttgcatatgcatgcgtttattaccatccctttcttatatatatatatatatatatatatatatatatatatatatatatatatatatatatatatatatatatatatatatgcgtgtggtgtgtagtgtgtatttcacataacagccatgacatatataccttgtatgtctgacccaaacttgtagtaaaatgaattccagtagcccagtaatttcagctttaatttaccatcacaacttctctagtttggttgtgatttcaatttgctacgtttaggagcatttattttcttttcaaattgttgcacacaagtacttaatacattttttaagttagaataagttacttttaaaaaactaaacatgtaagttgttgtattatatacgtggttgtcaatctagtggccaaaaagaaaaaaaaagaaagacttaatagacagggcaaaccaatcgatgccactatgaataataggcataaaaaggaaaacgaatccaagggatatatcttaggttagaaccctttgatgcccaaattatggggttcactagccttgtactattagtttggaaaataaagttgttgagtattgttcaagttgtcgaaaacaatggcctatatacgtgtatgtaggagtataaaatataagacaattggtcagctatgaatctgtaggacgtcctgacaaagaaaggaaatctaattggccactacattgtcaaccataatacatcacacatgcatgcaacagttcatatttttagctaattaacttgactttctctaaaatagtagtagtaagttagtaactagctagatactctgttcgatagtgctaaaaaaattgtcgccacaattttcgatcgatttcaatcggatcatcgaatcatttttgcccaaggaatttaacttatgtacatgcggggcagatctagttccttttgctgtattatcctactgaattcagtgaaattctattaaaaagttgctagttgctacaaatttataaagatgaacctataattcagtacagatgatttgaactttcgaagatatatttttttttattccttgagacatcgtcttgtcgtttctacatcactagaaatcatagaaaaaaaaagagttgtccctcttcggacgattttgtagccttttgatacctgtcacaggcgaagtcaagcttgtacttttactgttcaaaatagtgatatcctatccgtacacgtggcatatgttcgatggggtcccatataatttttttctcgattttctcgtgaaactaatggtgccggatcgccgtgcttgacaggatagttagccctatggctaattagggtcaccaaaatgattatcaggtgatcaattaggcaattagcgtgtcttaagcaggcatgttggacacgaagtgtgtgtacgtgtactactgtgctttgatatgaaaagattgaatctttttgggttggggtcagtgtttaatcaccaaccggtggttagatgggagctggctaataccattagtgtacctgcacttgtaggccagcttgagattgcagtaaacgaaactcaaggcaagcttgatgttttggaacttcagtgcatgaatgagttcatcttaactaaacgtggagcacatgttactacgtattcagacatgaacaattatcttctctaggaaaaggctactccctcatcccaaaataaattaacctaggccttgtttagatcccttgacaaaatttttcaccatgtcacatcgaatgtttggacacatgcatggagtattaaatataaacaaaaaaataattaattacacatattgcgtgtaaattgcgagacaaatcttttaagcctagctaattgctccatgatctgacaatgtggtgctacagtaaacatttgctaatgacagattaattaggcttaataaattcgtctcgcagtttacagccggattctgtaatttgtttttgttattagtctacgtttaatacttcaaatgtgtgtccgtatattcgatgtgacacgccaaaactttacaccgctggatctaaacacagccctactgccctagtatatgatgtgatattttctactaagtactgtgatctgtacagtgcatgattcgtagttttaaaaaagtcatatttcatactagctaggttaattatatttattttgggatggagggagtattaaagtgtaaaaaacaacatgaatttgcaataattctacagacgtacataactgagacatgtcaaattaagttcaagtggggggtcactattcctaagacgatgaacttcgaatgacttttaagaccatatgaaaaaaaagataggggggaaaggataaacacatgaaaaacaggtaactagaaaacatgaaaacacaaaaacaaatacgtactattcctagaaaaagcttgattctagtataaaatgatcagtatgaagaatttgaataagtaattacgaatattcatgccagaacatccattttctcatttaaaacaaaaggtagaaaaacacgtttattctgaataggatgataaatacgctgaaaaaccattgtttatcatgcccccgaatattaatgtggtaatcttcgttgattaaaaaacaattatttatggatattgtcagtaaaaagtttctccgtgtcctgcgaatcgacgagttgacacatgaaaaacagtaaattatttcactaataatcaaataatcaaaactacacaaagtgaaatcttctatttatggagtacttggggcagttgggccttgagtatctggcattagttcaagcttgcctagtgggctagtggctacaaggaaacaggcctttatcacagcccaacaagagaaatgcttagtgctggacatggtgcagttgcactgtaccatttcagacttgcacggtttggactttggacagagtagaacggatacgaatggttgcctgtcactgcgcttgtcagtctgattacagatttcagaagaatgggaatggagatattctctgtaatcgaatttcacattaataagagcacaaaaacagaacattttctaatgacctttttgttttctttgtgaccataatacagcacacattccgttgtcttttctgttataccagccaactgcacaacagtctacagcttggaggcaagcaaccaaacatttgcttcaaaaactgaaatctatcaaaccccattattgcttacagccttgccacattcaccctggaggccacttctacaaatgtgtcatataggcttaagccacatgtgtaaaaaaaacttatttttcttttagaatgtaggtgtttaagtggtattttcaatttttctactccttttttattagccccttatattttctattttaaccctcatatttttccaattaagaagccacaactggtctttttaaaaaaggaatttttaaccctacatggcaagagttcggagtccaaaaggaatttttttttaaaaaaaatcaccaaatcttggcatagaccgaagaaatcccgtgaacaccatgatctcagcaagacctccaaacagagagatcaactggccttctgaatcgctacatggacatgtcaaagaatcaagggacaagagaggcactaggtacaatggctgcatgcgttttcagatcgcccagaaactggcctctgaaatctgaatttcgcaggacaaaacacggtcagaattttaaagcctgacgatcccgtcgcaggatcacacttgtgctagcaaacacatcacaaacaacccgatgcttcccatcacaacaaagattgtactaccattccagactgaagatgagggtacattttgttcctaggtgttgccacttttacaggcactgtcctctccaatcctctaaacagtaaatcaccttcaccaccaccacacccccagacatataactgcagcagctgaatgtcacactgcaacacaagatagtttctaggaccaacatgaagagggcaaaataaaaaggagagaaaaggctacaaaattacgagtctccgatgagaaaatactccatctatgcggtaaattcctttcgccatggattcttctgcaagagctgtctctaccacccaacagttaggaacagagcagtatgtacaaactaggctcctcttgttctttttttttttactttttaatctcttgtctagaaagggatgctatcgaagtgatccggcgactgaaagcctgaaatgtcgatcaggctggctgggcagctaggacccggttgtgattgtgatcaccttcataggtaacaatcaacatcgaggggtcgtcgacgcacctctcaacatgcttcctggctgggcatcctcttacactgctacacttatagtaacccctgaaaaacgatgagcatacgtgaatattcttcagcaatctcttcgacaaaaagaatgagtaatttgtatagggaaaggctgttagctgtaatctttcttggattgcaacaggcatgttaccaaaattagagcttggcattcttgtaactacatgtgtgactgaaggtatcaccaaccacatgagttgcttaaaaccaaaactataactttctcgagatcccaatctccctttgctataaccagcctctaaacagatgtggaaagaaatctagcttgaaacttacagcacatagtatcatgagctacaatcatttattgctgtccaaattagaaaacctttctggtgaataattaatggcatatcatgcattctatgagatgtgcatatacttaaatctgctaagaacagagaagataaaaatttcatgaacagaaataatagctcaatgtaaccaggcaggaccgtttcctaacatactagtactgattactgaataatagtgacaagtcagcaaagcacaagtgtagatatcatgtgcagtatgaactagcaatggcacccaattgtaccagaaaaaacacctggcaacataatgactaaatgactacatgagattgagcatttagctatacctaggatgtggggatccttttattggcttctgtccatacttcctccatgagaactcatcagctggaatgtcagcaaccttattactgattgcagggactttgatagacctccttatcctcagcttcctgcaattacatacaaaagtgacttaagaaaaaacataaggtcaagatactcatatcaatttatcacaaaaagaaaaaaaaatccaaccttttcttcgcacagtgacatcggctcccagttgtgcatcgtccactaccatcctccctaccagtgcacctcctcctctgcatgaggcctaactctggagtgcttgacgtctgtgacccactaactagctggaatggacgactggagcggctaccgtccaaactcgcaatgctcccctccatactcagagacgacaagaatgaacgggaggatgatgccgtgcaattagaactgtcaaacttgagattaacacccttaccaccaccattgctaccaccctgttcaccaaggccactcctctttatcatctcactctgcatcttcatctgctgcatgagctgaaacctctggtagctctgatgctgctggatgaaatgaagatgcgccgaaggcaatgccgggtgaggcgttccagctgggggcgcaacagacaccggctggatgagctggagcggtggcccccgtgatggcccatccgaatcaaccgcagggttatctagaagcaaccttttggggaattgggcagggatcctaacaggatcctttgaagaagagccctccatctgatggtacctcggaaacagctggaggctagtgatcggactcgagttaggtgtcttggctgccatcgccacagccagtgcagggctctccaaaaagaggttgctatcaaagataggcaagggcttcttgatctttctaacccgggcatggccctggaggccattgccattgttcagcctggatgccacggagcagaactttgcaacagcctctcccgtagccgccgcgagatccttgttagggacaagctggctatgggggctggagaggagggtgagcaccctgtgacagctctgcactgcctccctgtttgcttcctccatcccctccatgaatcactcccctcccaccctacctgcacaaacaaatcaatcacctcttgactctgatcatacacacaaatctatcaagctcaccaccaaatgctctaacctagaaattcttgagccccaatatgcaactctaacacagggatcacatcacatcatgagcattttccatatataaataggaaacaagcaacacatgggtagatttgctgatagccctaatcattccattaccatatatatattaaaaaaaacagccacctcactggatgatttcaagaaacagcaccacctgggcgatgcagggggggagattctcacaatcatgcggcgcacacgggtgccatttccgacgagctgagctaaaattgggcacgcgggcacgcaacatggcattcccggtggcctaatcaatactaccaaaattaggcaacctgacacaatccaagaaccacctgagcctacaagaacagaaaaaaaaaaagggaaaaaaatcaccacaccccaccactccactccacaaccatggccatcacccctgcagctgctcccccctaaaaccaatccccaaaaaccaacagaaatttactcccccataaaccccaaacagctgcctctgctactactcgatccacggaaacaagaaacgcatacgcatgcatgatcctaccagcaaagggcaagaacagcagagtaaaaacctcacctcgctggagccagggctgagacctccaccggtggagacgacgacgacgaggaggagagggagtggctgcccctctctctctctctctctctctctccctcggctggtacaagcagggaagcgcagcagcagtagaagtagagtccagtactagtccaagcaagccactgagtgaacgaagaagaaaataaataaatgaataaataaacaaattggtggggaagagggtggggccagggcagtgctctcgcttttttgccccttcttttctttaattttcttttctccctttgtgctctctggtattcctcctcgggcggattaaaataataataaaataaaaaataaataccgcgggcggggccaccgaagtgggccccaggatgatctgcgccgtccatcgcgcccgtctccgtcctgcgccttggactttttccttgtccccgatttttttttcttgagtttttatattttttattttattttattttcctctggggtgtgggggtgtggtgggcccgggggctacgggctgccgtttcgtcaaaggtgtgagctgtgtcaggcgccacagtggtgggcgcgggccccacgcattctctgtttttcttttcttttcttttcttttttccttttttttcttctctccttgctgggctcctgctcctctcgtcgtgtgcgcgcgtttccaatgctgtggaggctgcgcgcgagtgtcaaaccaggggtgacgtacagcagcgacgattttttttccgatgctgctgtgatgggaggaaggaaatgaaccctcaagtctgaagtcaccttgttttgttcgtttgtcatttatagcataaatctttgctcggttatgatggtatctcttaagtcacagtgtttcgttcgtatgtagagtcctatttatagcatacatatttgcttagatatgatgatatcttttaagctatagtgttatgtttgtatgtaggcttcatttatagcataaatctttgctcagttatgatgatatctttttaagtcacaatgttttattcatatatatatagctcatctatggcataaatatttgctcagttatgaaatgatatctttcaagtcacattattttcttcgtatctatagctctgaaatcactttgttttgttcgtttatcatttatggcataaatctttgctcagttatggtgatatatttaatcatttatagcataaatctttgctcaattatggtgatatattcaagtcacagtgtttgattcatatatgcagctcatttaggccattctcaacccaatgactaggatggtgtccatagcattaaataagctgtcacctagaatgaaaaatgatgtggcaagtgaataaatgataaaagagtcttgcatgagacatgatttctacacaacatccaagacattatgtgaggtaagtagcatttaatttaagtatggaatagtggtgtttgcattgggagagtagtgtctaatactagtttcttaatgatgtggagtttatggaaactatgtctagtgtcttgggttgggaatggccttatagcatacatatttactcaattatgagatgatatatttcaagtcacactgttttgttcgtatctagagctaatttatatcataaatatttgctcagttatagtgatatatttaagtcacgatgttttctttgtatctatggttcatttatagcataaatttttgctcacgtatggtgatatatttaagtcataatgtttttttaagtatctatggctcatttaaagcataactttttgctcatttatggtgatatatttttattggtttttctacctagcgtattgcttatattgcttgagcagttttgtgccatattcatttatggcacacctgattacctgaaggatgtaaaacaggtttctcattaatgagatgatttttctagtcactaataaaggatctaaggagtgcacaaatgatttctcaataatagcatatacttgtatttagatttatcattcatacaatgtgtcatatttatgtatagtattcttatagcataaatttccattcgtagcacaatccaaacattttaattattgtactttaagaacggggtttttatccgtaacacagtttcatttttagcacacgtgaaagggttttacatatatagtcatttataatatctgaaagagtttgatgttgattagtcatctataaaatagtttcatgtcacatactcatatactggaaattagttatattatctaaaacatactcgtagtcatttacagcacacatctagatattacgagatatatctttgagattgttcattgttttttctcacgagaaccggcctccttaagtacatcgtcttagatagcagaagtaagtcatttcatgacatattcgcaggtgcaaaacatatttatcatagcaatattgtttctctagatcgatcacatgtggtaacttctttttggaacatcctatatatatgtcgtgcaaacatgttttttcactgatacaataatttcatatctaatcatttacaccacattcaaaacgtacaagtagacatcaagcaaacaatcaatcgaatgaacaaagccttgatgagactttaggatttgtgggtcatcctatatatatagtagatataattaatggagcagtaactattatttcttctcgtttttcttttgcattagtgaggcttgaatgaaatatatatccttacatggtcatcatatgccctttgcatttttcaacaggatttaccactctagcaaacatgtaattcttgttcgtatagtaggaacacatccttagagttgatgatctagatgatggacatacatgtcttactcttacatgatcgagctagttacttttgaaccatatcacatactagtgcgcagtacatcagaacaaagaaacttaaaataatatagaaaaaattggaaccgaatttgctggtgtttggaggaatacatcttttccttaagaaaaaagtatgttagtataaaataaagatgcatcattagaatgacctaatagaatctaatatcattgcaacatatacattgttagaaaaatcaaactttgccggactcaaaaaacaactttctcgtttttttaccatgtttctcgaactgctaaataatacatttggtgcaaatacttttatatataaaagttttttaaaaaaactatataaatctatttttcaaatttataataattaatacttaatcagtaattagctaaaaatggcgtacccgttttccgtaccactgactctaaaatagaactcctcacaaagccagcaatgttcctcacatcttccaactgcaagtctgcagcacacatgggccgcacgcggaggccgccgcacccgatccgggccttcctcccctgaagccgttggagcccagcgaaccaccccgcgacacgtcgcggcaacgaggagttcgagatcgagtctccccggtgcgggccgggcccacgcccgcttggtgggccccacctctcgttagccgaagcgaggcgcacgcgcgcgcactacgcagacccgaccgcgaccggcaccaccaggtcggtctcggcggcgagggcgggcgactcggccgccgggtctcgcgcgcggcgcgagcgagccatgacgcgaacacgtacggggttttgtggtgcgcgagtgccgcgtcgtcgcccactcgatcgatcgatcgtgcgcgtgctgcgtcgcgtcgtcgatgctgtcctccactgaggagtactccacacccacacacacacacactccactgctatttctgtgctcctccggtgcgctgctgtacgtgttcatgggtactggactactggctagcagggagtgatatctcctccacgtgttcatactgcttctggttattttccactctcttcgtcccagaatatagcaacctagaattggatgggatgtatcctagtactagtaacctgtacagatacgtcacatcctgtcctagcttactatattatgggacggagggagtactatgtattatctctgttttttaatatatgacgttgtttactttttataaaaacaaatagagtacttcctcctatttaggaaaaaaaacttctaataatgaagctgaacaaacatctgttgagattcatctttagaattgttgattttctttttattacgctttactcccttcgttccaaaataaacaaagctagtgcgaaatgtggcattttctaattttacgaatccgaatagatgtcctctcatactagctagttttgtttatttgagacaaagaaagtacaattttatcaaagcattctttctaacatataaagtctttttaggatggagaaaacaaatcattatacaatgagaatctgagatatagggtgctaaaacatataaggtccaaacaaagcaaagtaccacaggcctacaatcatactccggctaaaacagctatggatcagtcggcagctaggctctcgatcgttttgggcggccgtacgcgcgcacgtgtggacgtcgttatctttgggagaagaaatgcatggctagtaatgatggcgatgattcaattccagcacctctaattatggtctctacactgtttctagttaggatggtcatgaatgggcaatcatcatgttcctctcaacaccggaggatgcatgatggtgatcacatacttgtcctcatgatctgatatggtgcgatatatatggagtatccactgaatctaaacaagactgactaattgcaagcatgacagacgccagctgcttagtctaagctaaccaagagtgttccaaattaatcatgggttttcattcggaacttgacataaaactaaacccaaaactcatagtttgaactcaaaccgactgaaattcaaatttaatcttataaagtttgaaatcatagtcttttattcattacccccccccccaagttaggaaaaacatcattaggaaacggtggtaggatgacataggagcacgtgagtttcctagtttaaaattcgtgacaatcttaagtaaccagttcagttaacgtaacaattatagagaattaatcctatggcccaagtcaggccaaagagaaagaaaacaaagactgatactctctccgggttgataatacttgtcgttttagacaagggcacggtcttaaaaaaacaactttgtctattattttctatcataatatgtaaaaaaaatattaacaaatatatgatcttattaattttaagactaatctatacatatggtcaccatatttaaaagacaaatattttaaaaatgattcataatcaaagattctaaaatttgacctcacccttattcaaaacgacaagtattatcagcccggagggagtagctaattaacggtgggcaagtatttccattggaaataaagggttcaataactgatgtacagccccagtatttaaggttaatttatatttatacggagtcaattcaacgccgattttttctcttcaaaaaaaagaaaaaaaaaagaaaaacagcggagtgctaattaaagcaccctatcagtcaatgctgccaaaaaaaaaatccagtgctactatttaatttgctcatgcatactgttttccgttgctaccatggatccatacacatgaccatgcctatacggcatgcactacagcctctacaccaatcatacattcttcagcactagatagttctacgcaatacatactacctctcgttgtaatctctcatcgttgtgaataaatgaattagcaatggcacataataacagtacacatgtaattaattggagcaactttcggctgatcgatctgcggcaaagcacagtacatgcgtgtatactgtagagcgacgggtcaggtgaacaagggtgtgtttagttcacgctaaaattaaaattttggtcgaaattgaaacgatgtgacagaaaagttagaagtttgtgtgtagaaaagttttaatgtgatagaagagttagaagttttttttttaaaaaaagttagaaactaaaccaagcccaagtcgaacaattggtcggggtaataccaatactcctacgtgcaagctagctagcttgtcatttcactcatcgacgcaagcgtgttttttttttctgctggatggccaggtgtttttttttcctcggcttggctcgagatcgatcggtccgtgacgaacgacgtacgtactatacgccggcaaaacggtcgttgctgcggtggaagctttgacccgtcgcgatcgatggaggcggcagctagcgggtgtgtgtccaacagtgcacggcttggacctgcgcgcgtgtggcgcggcgggttgaaaggacatgcatgcggtgcctgcccgggcgagatcggttgatgaggatgcgcccatgcagatgtgcagaggctgagagggcagattcgattggcattggcttgcccatgcatccatgtatgcatgcgcgcgcatgcagatttgatttggggtggaggggttggccgttgtgttgagctgctattgtgtactgtttgtttcgaggtcagatttattatattgtttgttttcgcggaaatcatcgttgggaggtcaatcttcacttcttcagccctgtttagttggcgagcgaaaatatctgaagtgtcatatcggatataccgtcacccattcaaagtattaaacgtagagtaataacaaaataaattacagattccgcctgaaaactgcgagatgaatttattaagcataattaatatgtcattagcaaatgtttactgtagcacccattgtcaaatcatgacgtaattaggcttaaaagattcgtctcgcaatatacacgtaatccgtgtaattagtttttctgtctatatttaatactttatgcatatgtctaaacatttaatgtgacagcgtgaaaagttcttgtttgtgaactaaacaggcctcgtctcaaagaccataatccgtacttaccttgctcaccacgatctagattaacatctattaagatccatgatagtaccttatgtgagactgtatcctattttatactatccatattttaatgtatgacaccgttggctttttgtccaacgtttgaccattcgtcttatttaaaaaatgtatgtcattatcatttattttattgtgacttgattcatcatcaaatgttatttaagcatgacataaatatttttatatttacacaaaaattttgaataaaatgaatggtcaaatattgataaaaagtcagcagcgttatacattaaaatatggagggagtactgcttagtactctccatcatttcgtctactagcactagaaaaggtcaattaacggagttactatttttaaaatttataacaattaacacttaattaataatgtgttaatgattttgtcacgttttacgtgcggctgttgagaatgcaaccatagtaccgaccgtacttccataaacgtaacctcggattctttctttcttttttttttctttttggcaacgttatgagctttccagatttaccgatccctacacagatagtgccattttttttcacactgcctactgggcagctagcaagctacccagctatagccagccagccagcgaagacagcagaacacagcagaagtgtgatccaagcaatttcgcaacatccatatgcatccacccatcgatctcgatcacggcatcacgcgcaccgccgttatttttctcaccacactaacgtattcgtaccagtctaccaccacaacatcgaccacatatgcaccgtccatatccaagtactatctcctatctccaaccacgcgcgcgagacgcggcaaacgcttgacacagtacgtgcctagctagtgctgctttacctgaaaatttactgcttctttccagcaccaactcgctatcactgcattaccaccaccaccccaccacggcacacaagctcttgccattttcttgttagatcattgaacgatattattgaaatatttgttccatattttaaaaaaaatatattatcaaaaaatgagtatttgttagagtcgactgtaattattaagtttatttattaaaataccataacctgctcaataatactcacttcatttcatgttataagtcattttgattttttaagttaagtttcttaagagtttataactaagcttatagagaaacataacaatatttatagcaccaattagtttcaatgcatctaacattgaatatatgttgatagatttttgttttatgttgaaattattattatagttttctatgaaacttagttaaatctaaagaaaactgaattaaaacaaattaaaacgacttgttacgtgaatcagaggtagtataaaacaactagtcctgtcagcgtcattttggctctacaccccatgagtggttttcttgaccagtactttttactttacctctggttgaaacgttcctaacgacgccggccattttgaccagcactgacgagatgaaccaacttaaggcccgctttctttcaatttgagattattataatccagattattgagagtaagctgagaaaaacagacaacttattaaaatagcttattataatctggaatccagcttattataatctgataaactcatttaggtgagcttttttctaaattattgggtgaaaaattacccaccatgctaccccactctctctttagacttgcaaacccaataatctaggctctaataatctagaaaagaaacaactaaccgtttaatctactacagattataacaatctagtttatagtaatctgacttaataatctagattataataaacccaaactgaaagaaacatggccttattaattaacgcgtacagatttttgtttgaacgaaacaagagacctgaaaatggagctaactgctgttaacctacgtaagcctgttccaaattaaccatatggtactagcactaaattaataacctatcgacgtgttttcttttccctaaaagaaaaaagaaaagcaagctatcatcatcagtgatcgatggatgccacgccaatgcaagcatgcatgcgtgatcgatcgatcgatccgagatgcctatctgaattgaacccggggagagctttaaccaaatcctgtcgccttcaagctgctgcctaaagctaccgcacattcgatcgaatacggaatactaacccaagcgaaagaaggtgaagcccagggcgatcgatcgatcgatcaacgatctacctctcctttccggcctatccatcatgcctaccacttggacacaaggggaaaaaattccattgctttgctttaattgccttttcctcgtcttcttcttcgtcttggtcttctttttggtatctgatgaggttttcttccatggtgctcgagattatatatacatatatgtagtataaattaatgtaggatatatatatacttggacaaattaaagcagcatgcatgagtgagagcttagaattaatggcccaggtcacacggcacttgggaggcgagtgattgatcggtgcgatgcgtggtggatcgttggtgcgtgtgatctgatctgatctgaaacctggaggggattgattgggtgtagcgtgtagtgtaccgacatgatagtcactgtacgaggttgagtttgatcggttaattcgttgggattattgctagtgagtactcactccgtttcaaaatgtttgacaccgttgactttttagtatgtatttaaccatttgttttattaaaaaaaatttaagtaattatttattcttttcatacatttgatttattgttaaatatactttcatgtacacatgtagttttacatatttcataaattttttaataagatgaacggtcaaagatgtgctaaaaagtcaacggtgtcaaacattttaaaaaggatggaattaagttgttgagtactcgatctagtgcggtcctgggaggattgcttcaatattctttgtgatttctgtggggttttgcactgctcttttctgtaggttatcatcatgttcatgtggctaggccgtgatctcgccggcggcttgccggagctcggccggccggcgtcaccgacatgagccgctctgtgtagtgacgtttcagccggcggaggtggttttggtttggggcaaatgaaaactcatggtcggatggtccgattgggaaatttggcccgtctgggttctggatagttgggccaccctcaatccttcatgggccttatgactcctagggcagcatattgggccggaaaggcgtagtatctggaacatgggctatatcatccacagaactcgaccaccgaaacattgggcctgtatgggcgttagatctcaatccgtacactttacatttttgtcccataaattttgtactcccaccgtcccaaataaaaaactaaaaataacccagtaggatgtgacaccacctaaaacaacgaattttaacaaaagattcaataattttttaggaaaatcgtaaaaatcatccaataagacgctagaaatttgatattccaccgcataaatcattttattgcatatgcccaccacttacttaattttattgtaaaaaccaccccagtgcgcatgtgcttaattgaatcagcccattatcgttgatgtagagccaccacagactaagctaactgagtcaatcttattcaagtgcttatattagactcttttttttcatgtttcattgaattttctttcatatagcgaaactcagtgcgacaacgtttaagcttttatcaacaattctatttgtggtatctccaaaaaaaaaaagggtcaagattacactcttagaagtatttaattttggtaaataccacattaatagctcacaattttataaaaatatattgattcagctaagcacgcgcgtactagcgtggtttttacaacaaaactaagtaggtagatggacgtttgtaacaaaataacttatagagtgaaatgccaaactttaagtaacttctggtgtggtttttgtaattttacagtttttccaatgtttcataatataaagcgcgcatgcatacatgcaatttactagcactcccctcctctttaatttattttctttaatcctccatacacaatatctctaatttttttggtgtatttagggtgtgtttgaggagattgggaagatacgcaaaatgagatgagccattagctcatgattaattgagtattaactattttaaatttaaaaaatggattaatatgcttttttaaggcaactttcctatagaatttttttttgcaaaaaacgcaccgttgagtagtttgggaagcgtacgcgtggaaaacgatgtactttctccctcaatgtcacccgaacgaacgctgctagcagtagaaatcttcatactgaaaactaattgggttaatttacaattacaggttggacatattcgtcgtccattgcccgccaccatcaccgaggaccaaatccatctcttttaggcccatagtcaaggcccataaggtagaagcatgcctcatccacctctaccgaaccgtccccttcgtggccctcctcaatcgccgttgcttctccccttcgctgcagctgagcccccttcctaagctcagtgtgacggatccgcctcgcccaagctcggtcacaaccttcgtcatcgtcgaggttgctgtcacgtgcagtcacaatcgtcttcatcattgagatcgccgatcgcaaccatcatcaccaaccccgttttcgccgccaatgtccttccctctagccaaatctggtagggggaggggaggggagtggagtggaggagggagttgttgtcggccgctcctatcgagaaagtgagggaggtgagttgagagagcctgagagggaaggaaggggcaaatgtacttagggcctcttttggggagctcctgtcagttgcagcttctcctagaatttccaactgccaaaagctcccccaaacaattcagattttcacccatattttaaaaagctgtagttgtataatccagaaaataaactagaagccaaaagctgggtttactagcttctccatattctcacctgctgcttcttaaaatcttaagctccaccaacagggtcttatgctcggcgacttctcgctcttgctgtgctgatatttttgtagtgtttccatgttttcgctagtgggcctctttatgcctcgttggtaaaaatcaatttttactaaccgtgtctaaagagggaccatgtgtgaaaatgaggtattttttaaagctgtcctcttaagactctgttagtgaaattcaatttttactagcgggcctagggtgtgttcggtgctctcagtttccaactcatctccctcattttccgcgcgcatgcttttcaaactactaaacggtgcgtttttttaaaaaaagtttatatacgaaagttacttaaaaaatcaaattaattcatttttttaaaaaatagctaatacttaattaatcacgtgctaatggactgcttcattttctgtgtggagaagatgggttcccaaccccaagttacaaacacagccctcttgttatttttataagcgagaatttttagatccacctggaaaaaaaaccatagtgagtatgtggacggtgcagcatggccagagatcatagttgatagcagcaggcctgaagaatgtttctgaaattgctcatcaacaatatggactcaataattgattagaggtagaaacagtgtttcattgacataattctctcatttgtgactaaggcagtggtcgcaatgaaaacatggtaatgcatccagcggcgatggctgagggagaagggcagtgcaagggtggaagtgggaagggggtgagtttatgtgggatgtgaaattgatccctttgtgattggaacaggaagagactgagatatgacaaatctgattcccttttcttttttaactgataaacaagctgcttaaatcttttttgtactcttctctttcttttttccttgtagaaaagagaggaagctattatttgtatgattgtatctacatggacaaaaaaaaggtacattgacaaggagatatggagattttttttccacttgctccatcacaagcttttaaaaaaatgaacaaatgggggtcccagcaggatcatgtttcaaaaccgatcaaaacacattttgcacatgagatgtctgtgtccagcctttgcttccaggaaatggggcatcgctgtcaggctggttcctctctacttccttgagagcctcttccactgccttttccacttcacaagccgcaatctgtgaaaatgacacatgcgaaattaaacgtcgttagttagagtgtacaattggcttactattattaatcaactgctagtgttataattataataaactttttcagtttaatattggataggcatggactgtaattggccccgattgttgctctgtagtataaaatatggtatggctgtttggaatttggatgtttccttttgaaagatcatgtttggatgtttgtgaactacttgtaataatcttttgaggaaagattgatttggcagttggatgaccagtgctaactaacaacagttgctgattaattaaacctctaattacagctatttgtaattggggtcttggggttgaggatctgctaaatgatttatgcataaaccaaaagattcgacaagaactcttgacacggttgactaatgtcaaattggggggtttcgagtgga

SEQ ID NO: 5842 - DNA, 13667 bp, Oryza sativa
acacaccggcgctgttgaaccgtgggattgacaggaaccaccgctcgttcctgtcagcagtcgagggtgcacagctcggcaccttccgtccacgcacgtcgcgcgagtggttgcgtgtcgacccccgtcacgttccttggtacgcgtatgttcacatttcaactcaactttgctttgtgttgtacttatgtttgaagtttgctctatacaggttgcgtgcggcaggccttctaccactttgtaggcttattgaggcggcggcggacgaccgtgacccagcgaagcggtgggatgcagaccggtcactccttgccgctctggtagaccgctggagacctgagacgcacacgttccaccttccctgtggggagatggctccgacactgcaggacgtgtcgtacctgctcgggctaccgctggcgggagcaccagttggtcccgtggacggtgtttttgggtggaaggaggatatcactgcgcgcttcgagcaggtgatgcgccttccacacctagaaccggccaacacccttcctccgtactctacagtcgggcctagcaaggcttagttgctccagttcactgtaagtaaataagttgttattatcgtacatgcttatttgcgatcaacagagtgttttgtactaacatttcattcttaattgtaggcggaccttttacaccctgacgctgatgattactcggtccgacgctcccttgaggcgtacctgttgtggttgttcgagtgggtgatgttcactagcacccacgggcacgctgtggacttccggctggtccactacgtacggtccatcgcggatgctcagccacaggacgtgccgcagtggagctggggttctgccgtgctagcagccacgtaccgtgccctctgtgaggcgtgcacgaagactgacgcgggagcgatcatcgctggctgccctatgttgcttcagctttaggcagccgagaggtttgccataggtcgaccagtggtggacagcgcaccctatggggttggtcgcagtgcgcagtggccagaggacggtcccacgatggggacttactggtgtcgacgtggggttagtgcaacttcgctgcgttataagtttatcagtcgtcttcttttttttcttcacataacatgtctaattccgatcatgtttattgcagcgtcgttacgctcacgtccaggtgagacgaggttacccggacttagtgttcgagtttgaccgtctccaaccgagcgacgtcatctgggagccgtacacagaagaggccgtcgctgcgagagcaccgctaggactttcgtccttgtgcacacgcgaccaggcttactggctcaccatcctgccgatggtgttcgacattttcgttgagcctcactgcccgcagcgtgtgatgagacagttcggacttaggcaggtgtttccgggcaacgtgcagccgaccgtcctccctgccgaccactcatgagttcggattgttcatttctaaatttttttgataattacttcatcgagccatataatttacctctcttcacaggttgactcgacggggacagctagcaggcgcactttgggctccacgtgtacagcagtacgttgacgactgggtgttagctacagaggaggtgatcaacgagctcttcccacacacggaggagaactaccgtgactaccttcgctggtaccttcctcgcactcgtgcgcgtgtgaccttcactccagacgccccagagccgcatgttgccgctgtcacggacgcgtatcccacgcaccgtgaccgagactacttcgtgggggtacgtcgaatttgtattagttcttacaattatttcatttatcttgcataatataggacaactactgaattttttatttccatcttgcataggctgatgccgcacgggatatcagtgccgatatcaccgcagtccaagtgaggttgaacagaggtttgcacttgactgacgttgagcagagggtgaccttcgaccggatgcaggagaagatgcgtgcggtcatgcgcgtcttctcctgtcgcagcgccgtggacgtcgtacctccagctggtccggtacaaccacggcctcgcgcgcctaccgtcggagcaggacctcgacctacggcacctgtttcgcacggtactgctcagcccagaggtttcttaagttttgtttctgtttttgtacgaaaacatcaccccgtcgtaacttgatgttccatcctcgcaggacctcgtttgccttcgagcgcccctagcttcggagcagtgcgacctacagcaccggtttcgcacggtacagttcagcctagagattagttcatttttgtttcagcttttgcacgaatatgtcaccatgttttaactgcacgtttcctcatcgcaggacctcgtctgccttcgagcgcgttcgcaggcacgaccggcgcttccgcgagctccgcaggggcgttcgccacctcttcgggcgcgttcgccagctcttcctctcacggagcgcccatccctcgcccacacggtactttactttttattaatactattaaatacctgtatgaaactgatggtccttgtccagcaggatttgcagccgggatcttcggtactggggcctcttcgtctcacgccggtaggactggtcctactagccagttctacgacgacgacttgcacggtgcacaccaccacgacgtactaggctcctctcagcttggaggagctccagaggcgcacactcaggagcagccagaggtcacacctgtacaggcaggacgggttggccgtgccgtacccccggaccgactcacgtactcccaggggcacattagggcgcagggtaggagggacaggggtaagaggcctcgtcagtagtgttctacctcttcagtccttatgtgaccgtttcttttggcttacaaacttgtaaagcagtactacttttgctattactactgcagtactacttgtgtttgtctcgtctacatagttcttttcattcatatggtgctagaacaacttatgctcacgacaacacactttcggcgcttcacggtagtgtcagatccagtagcgcgcacaggccacaacagcacacatgaaaagcggcagctcgagttgtcactatcaactttcggcgctgcctgttgacataaagtgaatcacgcccacgcgtgatcgtcttgtcacatctaatgaataatgtatctcattgagttcacatatattgcagtgaaaacgacgctatataattgacaatctgaaggcaacctcttcatatcttctttcccactagcacacaacacacgaatagtacttgtgtttgatttcgattgaagcctattcattggtaatacgtaatctagatttgagattatgtagaacattcttcactacaattttacattttggcagcaaaccaaatatgatcaaatgcaattttaccttaccaaatatttggtagtgccaaaacttgcttatattttggcactaacaaaatatttgtacggtaacattccaaataggccctaaaaaataataaaattgtattttaccagtcttggagattttaatcttgtatagttttcaatataaaaagatttgataactattgatatttatacaaaaatataaagcacagtataaaatcgccctcccccagggcggcaagggggccgcctgcaaaattccaggccccccgccgcccatttgcaggcggccccccgcacagtacaaaatcgccgtagcggagggcggcaagggggccgcctgcaaatttcgttgacggccgtcgcccgagagcgaacggccgtctgccacgtcactttcgccgccctctgggatggcgacttttaaaaatcgccctcccagagggcggtaggcgaccacttctgtcaattttcaaaatgaaaaattatttttgtaaaacttttaataaaaaaattaaaaataaaaaaacctctcgcgactccccgatctcgccctcacccctccgcactcgcacgcgcggcgggcggcggctgatggcgacgaggcggcgcgccagcagcacgggcgcacatcaaagaggccaaacagtcagaggagggaggacgggagaagatccaaggcggtgcggcacaatggcaggcctaatttgttcagcctcacctgctaactttttcttgatccactcctgcttaatacttcctccgaaaaaaaaaaacgagactaggattgagtaaggctgagtttagttccaaacttttctttaaacttctaacttttttatcacatcaaaacttttcaacacacacaaacttctaacttttccgtcacatcattctaattttaaccaaacttttatttttggcgtgaactaaacacaccctaagatccaaaattctacattaggtaattgtcaactccacttgtctgaaaaggccgtataagaaactggcacatgctagtctgctatagcaattttcatactactacagtactactgtatagttctcattgcgtttgttaattgcgcctgttaggtttgagtttcacgcggggtttttccacgagcaatatcgtgtttagtagttaactaatgacattggcatccacttgcaaaaacacatttagttacgccaagtgccatctagggtcaactctcctttttgcagggtacattctcccggtaattaattaagaaaagccttgcgatttttctatgtcactgttggtgttgatggagacgtcgtagagtacatgatgacgctctatcagatggggtcaactgttggttaactagcctgaagtgtcatacctggaccgctaatcagtggtggaggcatcaaccatgtatacatacctcatccctcaaaagaaaattgttctacttcctccatcccatataaaacctgacgtttaaaggttctaccggtgtcccataaaacatattgtttgagcaattttatggtcatttgttttaaatttttgaatatgctaatgattgctttgccatgtgtaatttttatggccatagctttagtgtgtagagatatataggtattattcttattgaatgccttgcactcagtgaagtgacaactgattattaataagtaaggacaacttgattatattttttcttcaagctaatttgcttttgaaaccttaaagtgtcatgttttgtggacggaggaagtacctttttactaatgtcctaagaaaatatggcttgtttggtttgataccaatttattaccctacaaaaattttggtaacttcaatagtagcaagtgtatgtttgatttgctaccaatttttatccataatagttcaaattgaatactacccaatttggtagtgtccaatttttccaatgttttagcactaccaagattttggtaggggaaaaattggctccaaccaaagaagcctgcagaaacaaatttgattaaaaagtgggatcacctgtctagtctaagtcatctggcaataagctttgaaagagttcattaatactcgctccgtcctatcttaagtgtagtcatgtgttttcatgtcaaacgtttgaccattcattttatttgaaaaatttattaaaaaatctagaaaaatgagtaacacataaagtactattcataatctgccatctaataataacaaaaatactaatcataaaaaatttcaaataatacggccagtcaaatgttggacatggaagcccaaaactgcaccggaggatgaaagcccaaaactgcactttaaatgagacggtgggagtagtatcttgcatgcaggggttcattataacatgctgagtgcatgtagactcaatgaaatgacaaatttagtcattttaacctgaagctaactagcttaaaaatcttaaagcgtcaacatttttggaacagaggaagtacatgtcaatctagctcatcaccctgattgcttgtagtgaaaaaaatggatatgaaatgatatggttttaattgtctgttgatttttgcatggtctattttatctggaaaaaaggtaacattagataggttttgactaacagcttaccaaaatataagtttatttcgcatatacaaatttataccaatcgatttttcggaagaaacctttgaaaaggacattgagtttctacttttattttttaaaaagaagagatctgatctagagtaatttacaagaaaaatcaggccatagactcttacaattgtacaattaactggagaaaaaaaagggaacaaaaccacacaattgtaccgattgatccatatcttatagagttgtaaaatctgacatagaaaaaacgccagtggaaaaatatgacaagtcataactattaccgtgaaatagacatatctctacctattataaaaatttaaaatgtttttgccgtcatcttcgtacgtcgcaaatctgtcatccgttcagattcctaagcatgtttgtagttggttctttccgtgcaaggtattttaagccgctaatcgctcgtgtatatctcttcgtcagtccgatccttatctgtattctttccaaaaaccacagcccagtatattaagccggtacatgttgcagtcaagcccacgtttccaacgtcccacgtcacgtaaggaaagagcacacccgtgtatcatgcaaagctgcttctgatctatcgctatattctgcctcacgtacgtacatgcatgtacatctgtttcctatcgatcattatatctgaaaacgaatttgattcacacacaaattaataatgtgatatatatatatatatatatatatatatatatatatatatatatatatatatatatatatatatagtatgggctccaacatcatccaccgtttaagtgctttaggattcatgctacttaaaccggattattagacctgttagcgggttaaacccgattagatgtttccatttttactatacccgcaggattgcatgcatgtactagtgaaatactatgaatcactgacgtgattaactcccatcgtttccatataagcttccatgcacgtacttaatttccatttgaaatattaatgtgattgtgtgataattcatttccaaatttgacatgatattgaatcaaatcaactaatttcgatgtaattgatttatttccatcaataccgatttatactttctattctttgtgtacatatacactagtagagatggcattccatattttacatactgttgttgtttcgactccatgatgctacgccgccggacgacgtcggcgagattctccgtcgacaagccgttgcatgaacggacgtgcccgagcttcttcgtcgtgggctgctggttgttcgccatatccgacgacgcagccaggcctccacaaatctttgtcgctaatcttcatgagcacgtcgctggtcgtccgcaagcctcgtcgcagccacgattgttgtatgcgactccgtcctcaaggctcaagctcgttcctcgccccacgaagtaactggttgccacctttttcaggtacgtcaaatcaactggaacatataaattatcgcttgtattttttggattttttaggtaccaatgattattgttcgtattctctgtgtgtatgtacagatgattttctatttttaaaggtattttagtaactgaatccatgtgaaatcgatcatctggaacccaaacaaacatgattatattggatgattgtaggtagtgatatcggtgttcatttccgctgatggtttgcatgtgaactagctgactgaattcacccctcgatcaccacgtagacgcagttcggctgcttcctatctgccgcgcctgccatctctccatgtcctcatcgtcgtcatggagatcaattgcctcgcgtttcgttccccattgcaagtatgttcctatcatcataaagcaggcttcttagtttcaaatgcataggtttttgcagggagtttgacatttggttctacctgtgttttgtaggatgattatgttatgcaaaattctaaagaagattagatgctctttcattcacctgtcaattgtctggacaaaacaaatgatcattaatccgatggtagagatgttcaacaattttggacttgctgaacagggtttctcatcaagacaattttgaatgaacaagtccgatttccagaagaccgatttctttttttttcttcgacaacctagcaatttatctaaattttcacatctacccccaaattgttctttggtttattaattccaacatagttaggttaatttctccttgtaacttgattttctttttgtgtatataccctgtataataataataaatttttaagtaatccctccggttctatattaatgagtatgaaaaattaaatagggtatataaccaatttgatcgattgtgaaaaaatagcttatacccaatttaagcaagtatgaaaaattaaattggtgtatacctaattaatacgattatataaaaaaagacttcgattaaatcgggtgtatacacaaattaaatgagtatgaagatttaaacgtgtatataccaaacttaatcgctaacaaaaaatcgggtatatacctaaattaatcgataaccaaaaatcgggtatatacactggcgtagagataaacatagttggctttgcctggtctccaaaaaaatgctatgagaaacgagcatacaattcattaattcttttcagttttagttaaaagtagaatatggttatagacttctatgagaaggtatatttgtcacatacttagccctcggagatataaccaatatacgggtgaaatccttttttataaaagaattaagcagaagaccgatctataggttctatactccatactttaaataaatttaactatagttaaaataaaccatgcaaaagttctcatttctatatatctagcgtatcgaaaaagtatatgtgtacacacacatatatatatatatatatatatatatatatatatatatatatatatattcacgcagtgatataacctatcgaattgaaagcaattttattagcttataccctgacacagtaggtatattatacatacacataacgatacatagccagataaaaatagaagatagattattcgatggtcatgcaaactataatttattccatggtcatgcaaactaataaggagtgtatatattacatatatacaccggtactatgtatatacctacacgaatgtcacacccgtagcaaactatattacatatgtacatcgcggtactatacatataactacaagaatctatttcatgccatatacgtatccacataaataggggcaactactattttcacaaaacaaaccggttatatacctatataactcatagcacagagaaaccaaatcatttgtgaataatgtagaatttacatttataccggaaaaacaaaacattaataaatactctaattattttttccttggccggctgtgggaatagaatctaggtatatattctaatataattcactcccgtgattttaagaaacaaaaacaaaacaggagtacatatactttatatacgttatgcatacccaaaattaaggattatgatttatctgttcaaatgtttcctttatttgccataattatgtaagtaaatcaaagggcattaaatacggcttaattagtacaatgcatgcgccagttttttgaacagggcattgcaccttccaaataagaaattaaatacgggtgtaaacccgttaatcttagaaacacatcaatctccttgatcaagatctcatctaacggtttacactcatggagcccatacaccatgctgccccatttggccatcctatatatatatatatatatgcatgcaaaccaaaattcaacttttacaaattataagaaaaaaattccagtcatcaaatctctactattataaaaattgaagttgtttttgtcggtacttgtataagtcggtttttaaattcattcgtttttggaaatatttatccgtatttgagttgggttttaagtttgttcgtttttgaaaataaataaagagttgtataagaaatctctttaaaataaactcgcatgttaacttgatatgattttctagaaaaatatatatccaagcaaattcttacaatgaattcttagaaaaatatatttccaaacgaattcttataatgaacaataataagattaagatagccttcactcattacaacgcacggatgttatgaaaaaaaagtatgatatgataaagtacggtcctgaattcaacatcttctagcctccttaggtgacagtatttggcttagcacttcacgtttagcgccaatccagccactccaggaggcgaccgttcttttcttcttcggctgggaacacgacgtcgacacacgtgtagcatacagcatgtcagcatgcgtgtcatgcactgctccctccgtcccaaaatataaaattttagaattagataaaacatttcataatactataaatctggataggtatgcccactgtcctaaaatataagaaactagaatcgaatgagatattttctagtattgcatgcctattcagatttatagtccttagaaaatgtttattatattttaggactaaagaattttttttttaccggagattttcatgaggcttttgttctcgtggaatcctctctctcaacttatctgtctgtggaatctatgctcctgccatctttgtgcagagacgttgttctcaagctccggtgagagtgatgagtcgacgtgcacaagctgtatctcactttgcttttgtcactggaatctagtaagatcccacggtgcacggaccgcttggcttggatcttgtctcagctttccgatgccatgtgttaacaagtactactacgaattttccctgtatcaatttgtttacggtaaacccaatgtcgtgccagaatgactcctctcatcctctggtactactacgtgctttcgtcatggcaaatttttgcagaatcgacggcgtctgagatgctgtacatatacggtacaccctccttgttgtgaaaacagatgtaacacataaattttatggaaaaaaccacagacgccaaccggcaattatcactattgaggagccgattataaacgttcgtaaataaatttatggtttctatgtccgacgtttgaccgtcatcttattttttaaaaatatgattctttttttaaaagtcacgcatacaatataatccatgttttatcatctaataataataaaaatattaataaaaaaattaaataagactgatggtcaaatgtgggggaaaaaggagcttataaatgaatgtatttcgggacagaggctgtagttaaaatcaattcttgtgattgcacgccgcggctatcatctcatcatttgtacccgtgacatggatacgcgatccagtacgtacgtagtacgtcgccaacgccggatgcaggaaaagctggcgccgcacggcgtgaccgcgcgcagcggtgcgtacgtacgcgcgcgcgcgccgcctcgcaccgctctccgcttggcccggcgcgcgcagccgcaggccgcaggccgcagcgtgcgtacggcgagggaagcaaagcgtggaccaaccgaacacacgggcgggcgactccgctcgccgctcggcctcgcccgcgcgtcacgtaggtacgcatggcagattggcagcggcatcgtattcgatctcgcccccaccgcgtcgcgtcgccatccacccccaaagcatcccgcatcccgtcgtcccccgtgctctctctcttccggctcgatcggcgaatccacgcgagaactaacacacacaaaagacacattgacccatcattactatactaatcactttcataacctaacctaaatcagagttactcctccgtttcatattatatcccattttaactttttactagtaaaaccttctcaagtttgataaaatttatagaaaaatctagtaacatctacaacaccaaattagttatatcaaacttaacattgaatatattttaataatatgtccattctgtattagaaatattattactccatccgttccaaaatataagtatttttagaatattgacaaatcaaatatttttaactttagctattaatagaaaaaaaagatcaataatgtaaaattaatgttataagatttatcattaaacaaactatcataatatgtaactctttttatttaaatcatttgatattgttggtcaaataacatctcggagactgtgtcagattcaaaagatgcttatattttgggagggggagtatttttttacaaatttaaaaatatttgactggagaaaatatcaaaataactttaatgtgaaacggacggagtagttaacaacccaaacgcaccgaccgcgaccggtaatctcatgcatccatccatccgctgcatctgcaattctgcattggcagcatctcttctcttttctctcctcctcgctgtttcgcacgcacgcaccgcaccacgccgccgtttatcaacgactcctttttaccgcaaaggtttcgtttcctttttcctccctctcgtcgcggccgcaccccgaagcggaaggaaggaactccgagagcgccatccatccatcagcaccaccgcgcgcggggggcgtagtggcggcggcggcggcgggagtcgccggggagatgtgagagggagaacgacgtgggggccggagcggagatggctgcggcggtcgtcgtcgccggggaggcggcggctgcggcggcggcggcgggggcgggagggaagaagcgcggggcgtcgaggagctggatcctgttcgacgcggcgggggaggagcgggtgctggacgccgacaagtacgccatcatgcaccgcgtcgacatcaacgcgcgcgacctgcgcatcctcgacccgctgctctcctacccatccaccatcctcggccgcgagcgcgccatcgtcctcaatctcgaggttcgcgccccccaatccccccgcccgacttcatccgggattttcggttcgatatgcgatgggatcgtggagcgccggattcgtgacggcgaattcccgggaattattacccccaatttcgcatgttttttaaggatttgttttcggtggggcggattacgttgtgattcatgctctgtcttgctgttgcgcgtagagtcaaggttgtactaggtgcacgtacccgactgattccatgattgcctacctcatcctcacgaggacgatttgattgaacgggtttctgatccaagtgaagggagctagcgaattgatacagctgtttttttttaatgtttgaacactgtattttaatgattattacggctctatcgtggtgatttctaacgaattccgtgtttcttcctgctggaattttccttcggtgggtcgagcagcatatcaaggcgatcattactgctgaagaggtgatgtttaattcctttcccccttctgattgtttgtcatgtaagaaggttccatttgggttgggggggggggggggactatgtgcacaattcaaccgtctcttcacttattggttagctatctataatgttgaaattctcatcaggtgattggggattatatacggatgcagcactactttggagttttgtctcaatttttaggagttgcaggatgctcaaa

SEQ ID NO: 5843 - DNA, 22721 bp, Oryza sativa
aagggagctagcgaattgatacagctgtttttttttaatgtttgaacactgtattttaatgattattacggctctatcgtggtgatttctaacgaattccgtgtttcttcctgctggaattttccttcggtgggtcgagcagcatatcaaggcgatcattactgctgaagaggtgatgtttaattcctttcccccttctgattgtttgtcatgtaagaaggttccatttgggttgggggggggggggggactatgtgcacaattcaaccgtctcttcacttattggttagctatctataatgttgaaattctcatcaggtgattggggattatatacggatgcagcactactttggagttttgtctcaatttctaggagttgcaggatgctcaaaggggaatgatgcatagttttctgaacctatagctccatacaatgctgattttctaggcttctgtcagtttaagattaaatttgttgccactttgaatagagtacaatattgcagttgtctcaagtctgttttctatataataaactaggggctatagtttataatttatataaaactgtgaggatcttaaatgtcattttcatagatgccaagcgatgctggtggtaactcacagtaaatgtttttatgctgtgctcaggttttgctccgggatccattagatgataatgtgattcctgtagtagaggagctccggagacgacttgcaccttcaagtgccactcaacatgatgtggaaggtgctgaagaagatggtaagtttggcttgtgattctttctgaactgctgatgttcatattggcaacacgattctgtctgtatgatgtttgttgtggtaacttttagtatatgtttcttccttgatggtgaaatgccaatacccttttgatgtcaaggaattggacaaaaacaacgcacaacatgtttttaagaaatatgaaagaattcaaaaatattaattggccgcaaaattctttattgggttgcggccacaccatcctgttgtattcttctttaatttgtgtccttttcagttggacattcagttgaacaacgcgacctgtcactccaatagaaaagtccaaagcatacagtcatgaaacataattattattctgcgatgtctattggactttcttgcactagatcaatatattatgtgtcagtctatattgggattttgtcttaaactgagattttgggataaatgaaagaaatttgaaggaccctgatatggattcaactggattcacgagccatgactaaattaacacatcgtggtgggcatataaacacagaaacttgagaataataacattgatctatcactatatgaggactttctgaccctctacagaatagtatttgtttggtttaatttagtctacagtatgtaatacatattacaattgatgtgccattttataaccataagttgatccccttgcatcaaattgacttggaaactttctatctatcctatcactccatcaatcaacactggctggtatgctgataaaatcctaccaatgtctaacaactgttgtggttgttttgattgtaatattctatttgttgtttgtgaactccatcaatagtttgttaatatcccgcaatacaattttatgaactccagaatctccctttgaattccgcgcactggaggttactttggaagccatttgcagttttcttggtgcacgcactactgagttggagagtgctgcttacccagctttggatgaactgacatccaaggtgactgaatatatgcttaccatactgtattcccttgttatgaacttgattactcctagaaacatgatatgtgtgattttatttgaagcaacaagcataatatgttaattgctagatgaactaattccccttatttttcatatgtgaaataaatatataattgggtacttgattggtaaaataatgcttccacatcatattttacttgtactataaactgttcaattacaatttataaatcaaattctgattcataggttgtgctagtaacatttttcagtaggaatttttgcacagactgaccaaattcatgccacagctgttaccttgattcttttctatagctcaaatgtccatatatgtttcaccatccatataatgccagcaactatgtgataacttaaggttaagaaattatgatatcttgcaatttactgatgtagtgagcatatacttgtctgaacttatgctattcacaattttagcagcataatagtgtagtttgcccaagaagtggagtgctgtattattgatttccgtttgtcgccaaacaaaattgtagctaaagttgcattaagtaattgtacgatgaacagaagttacatttgagaattgtatggcaaatcttcacagctattccttgaaacttctatgcttatcatatagccattataggtctcttaactacttgttacattctcagcacatcaactgcattatgcatactaacttgatctactacaaacacacagattagcagccgcaacttggatagggtgcggaagttaaaaagtggtatgacacgattgaatgcgagggttcagaaggtctgatttcttggtttgctatttgacactactgagtgcagttaattaactttatatttttcagataatagtcatgatgttcactgtatttttatgccatattctcatctgatttctacttttgttgtgagattgttctgataattagccatattagctgaagaatctgtgcacttctgacaggcattgccatgcttttatcatttctttgctatgtcatagcacgtacattcttgtatccagggttagttattttataaacagaattaaagaacctcaatcatctagaagagcattggtaatattatatactattctatatttgacaacatacagttctgctttctattctcttgcatacttggtgtgtatcacccgttatttactagcttttcttgttcatgctttcctattagatcacaaaatgtttgttctctttgccaggtgagagatgaacttgaacaattattggacgatgacgatgacatggctgatctttacttgtccagaaagttggctggggcagcttcccctgtcagtggctctggtggaccaaattggttcccagcatccccgactattggttcaaaaatatcaagagcaagcagagccagtgccccaactatacatggaaatgaaaatgatgttgaagagctagagatgttgttggaggtcttttttgtttttctgcatcacaatgtcttgtcattctctggctgagatactaaaagtttcttaaatttgcaggcatacttcatgcaaattgatggcacattaaacaaattgacaacggtaagttgaggcagctaagtcgaatttacaatatcaaaatgggctagcaaaacatggcctaaggcttttgtttacaacacaacatcgttgaaaattaatagtactctaggctttcaccctttgctgactgtatttgtctgctatactgtttcagctgagagagtacattgatgacacagaagattacattaatatccaggtaacatttccctatgatatagctgtgcacggcatgctgatcttttaatcttggcactcacctcattacctctcgtgcagcttgacaaccaccgtaatcagttaattcaggtaatttctgaactacaagacctcatgattctctcttcttaagtgcaaattccacaaaaatagaattgatttcaaactagcatgctgttaaacccacactgaaataagctaaatgtttcataaaacttggttaccattgattcagctgattgtgctattctagttagtaatgcttgcaagtataaattctagtagttatataaatactctgtcattgtgcctcccgactttctgcaacagtaatataacttggatttgcttcttcctgcagctagagctattcttgagttctgggaccgtatgcctgtcgctttactcattggttgccggaatttttggtatgaacattccatacacctggaatgacaaccatggatacgtattcaaatgggtaagtcaaccattacaaaagggtcgtttaccgtcaataaattgtggcctgtctaaccaagctgtaaactttgttcctgcgtcacaggtggttctcgtgtcaggacttttctgtgccttcatgttcgtctccattgttgcgtacgcacggcacaagggcctcgtcgggtcgtgaaccttgcccaaactgtaaatttgagctagagcaaccttgcgtatgattaatctcttgtaccaaaattcatcagtataaaattgggatgatgaaaaagaacaataaataggaaaaaaaaagagtaaattccaaagagatatatgatgcttgtcttctttacccgtggtttgccacttttaggtgaaaaagaggcaagctggtaccctggacaattttctcgtctgtctcgcatcaccacatgctaattattaatgccctggtaacttcagaagaaagtgttgctacaaatgcattcttccttgcagaagaaagcgttgccatttttctgaaaggtttgtggaagacttttaccatgagttagaagcgaaataacaggacgaacaattcttaatgggaaaaatcaaccaatcgctttcccttctagaagtattaaggcatacataaacataagctaaattacattcgcgggagattacctgcgttagagtttaaatcttgatacaaacaaatatattacacattctctatttaaatagactttaacaggaatttatatttatctagattcattaatatcaatataaatgtgaaaaatgatagaatgacttacattgtgaaacagagtaagtatatgttatattgttacggtgttaagtgtaaagtgttgtgtgtttatcgtgtaatcggaaacaaagaaacggttatgaatgattaattgagatcacaccgcggtctccaacagttcggttatgagtagtatgatcttgtcgatagtacacacaagtagtatgttcttgtcgaacgttcaggggatcggagattaattatgtgcagtaacttcttcacagttagaaaaatcaactaatgccagtatctatcatggacttcacaggtcaagcacaaacagtcaagatggtgtgaaactctctcacatgcatacgcaaggaagaaataaaaagaagaggtatttgcaattccacaaggccgtgagaacgagcattatgcatagcaaatcttcgtttaagtaataaatcctatcaattctgccaagccacattgcaaaaaacctctccgatccgttcatatgatcgttgccctataagtacaaagccagatacaattaagagctgagaaactcatcatgatcatagtactttgtaaggtagttcagacatatatacacattacacaccttttttttttcggagattacacgcctaaaattttgttcctaaacgcagcatcatatatactccataaatcccgtttattggagatcttgatctagcaaggcatatatactaattaagcagtacacatatatatacgtcgttaagcaagtctaaatttggcaaggatgactcccagcttctccttggacagaggctgcacgcacaatagaacaaattaaattaccatatttcatatattacacttacaaagtatatatactcccttaaaaagttatttacacatttatgtcatgtattcctccctgcatggaagattgttaggaaaatgtaactactatgaaaacaatttttatagaaggctaaaatggattatgtgggtctacgggtagtgggccgcctatgaagattatgtttcatagacagcctctttaagtgagccgactgtcataatggatcttcgcagacggacagttatagaacccctaatcacaaatatgcaggcgggttatcgcggctgaaaatagggtttgtttctaaaagatccatagccctcacagtaaaaaagaaagatcttgttttctagtagcgtgtgtgtgtgagagatgtacatatgagacggcattcccatgccattgcatgcatggctgtccctgcgctgcgcgcaggctctcaccttggacgtgaagtcgtcggcgccggcggtgatgaacgcgtcgacgtcggcggggaggccgtcgctcgacacggcgacgatcggcgtggtcacccccatgccccggatccgcctcgtcgcctgcacaacaacaacacacgctagcgcgccgcccgcgccgcgcgtcagccggccacaccagccgccaaatcggccattatttcatccatccatccatccatccatgcgtctcgtcagagatagatcgatcgatgatctcacctcgtggccgtccatgaccggcatctgcttgtccatgagcacgaggtcgtacggcgccgccgcgtcccgcacccgctgcaccgccacctccccgttctccgcctcgtccacgacgtcgccgccgcctgccgccttcagcgccgctctcgccacgacctgcactcaccaccagctcgatcgagccagccattaacgacgatctcttaatcacatattactagctaattaactaagcgatgaattaccctattgatctcctcgtcctcgacgaggagcaccctgatcatcttgcgagccatgaactcttactctgctgctctgcctgcagcagatcattcgcctagctgctagctatatactactcatagcaagcagtaattaacaaagctcgatagctagtagctagcctggttgaactgaactagtagtggaagatcatgaggagagatcgcgctgtccctgttagacgcgctgggctttcacgaagttgcatgggttgcgatccacacgcgatctgcagctgcttggcctatttcctgcaagaatctctctacctccaaaacggcaaaacgcaactacgtgccacgccagccttccacaccgccgctgtccggtttaacctttcatctcttactaacaacgtgtgaacacacatttcataccgctgaacggtacgtttcgtaaaaaaaatatttttatataatatataagtttatatattataagttttttataacataacttcaattttatactaactctgtagttttacgataactttattgttaaatctgtaattttacgatacttcaccttaaacttgtatatttgtgataaatttagtgttaaatctatagttttgttgtaaatatagacacatattaatcgtcggtgtttcaactaatcggtggttctcttttcgtcaaacaaaccgtattccatcattgctggaaattgcacacttccggaagttatagttaggttgcattaatcgttatcttggtttggaggaagattttcaatgcacgtaaaattttaaaaaaactcattaacacataattaattaactattaactattataaaatattctaatagattaaagtttgaagttgaagaaaaaaaatagagtcttaatatctcgcgtccacattgttgcgattgcaacagggatatgtgtacacgtaaaaccgcttacgagcttagccaagctttggggttggtgcaattgtgcagagatcgtggtgctaacatcgtcgatcggacggctggggattggatcagatccacggcacgtgattattcttgcggaataagttcaccggaggtcccttaatttaacggcgagattttttaagacctcttaaccataaaatcagaaatcttcacccctaaactatacaaaaccgttcaccggaggtctctcggcagtatttttgcccgattttactgacgtgacatcctagtcagcaatttttttttaaaaaaagtacttgggcccacatgttagctgcatattctcttttctcttctcttcttcggagaggcgggcagatgcgggtgcggcgaccggcggcggtgcgggcgcggcggggtgtggggaagaagcgggagaggaggagaggagcgcggcgggcggcgcggagcgagctgcaagttgccactcaggtcgagcttgagtagctgcgtgaggtcgccaatcggctaatggtggatggaaccacgacggagctcaacatcacgtcggcgaacatgttgccgtcgaggaatatctcagccaaggtgttgcagttggtcaggttgttcaagaactcccaggcgccgccgtcatcggtcggcgtacggctccgatgagatggatgccccgctcctgcggagcctcccctccctggggtgggcgctcctctcattgtctcccgcgcccgcgcggatgctctccacggcagcatccgacgccctcgttgagatcaagccaggcgagataagcatggtctccgacatccccaaggagcacctccgccgcaaggtgcttctttggacttactctgatttatgtagtgtcgatagattcgctagccctcgcagacccgtgtgggaatcgctcgagatgtctaggtttggtgggttcttttggttgttacttgggttagggatagagcctggaggtgtcggtcgtgaactcgtggtacagactacagtgctattgctagttgatgttcgaatcgtggagtagatagaaatgcgaattcggtgatgaagttttacacttgtatggtttgaactgcgtttagaacttgggaggaatgtgctggtccgcgcgcgcccacgtcgatcggctgggagctcgccacggaacacgttgttcacgagtgtgaggcctcgcaacgacgtcatgttgaagaaactcggcgggatctctccagtgaggctgttatgcgacaaggctaacatgcggagcgctgggaggcttgacaagccgtcggggatggaactttccataaggttctggtcgaactcgagctgcacgatcttcgtgaggttcgccagcgatggcgggatgtggccggagagcgagttgtggctgagccggagcaccgtgagattcggcaacgcgtcgagccaccgtggaacgccgccgacgatcgaggttgttgttgttgaggtacgcgacgtcgagggcggtgcaattgcggagcgcgtcaggtatctcgccggcgaacgcgttgtcgcataggctgagataccacatccgccggagccagccgaggccatcggggatgctcccggagaaggcgttggaggtgaggttgatgagtagctcgagctgcgtgaggttggcgatggctggtgagagctcgccggcgaggcggctcatggacggctcatggacacgtccagcgacgtgacgcaccccgccgcccgcttctctgcctgcggccgcgttcgcgcccgcctccactctgctgccacgctcgccctccgctgctccacctgccgccgcctccctcgctaaagaaaaggagagaggagagaaaagagaagagaaggaaaagaaaaagagaagaaaaaaaaatatgtgcagctgacatgtaggccccacgtactttttaaatttttatttgctgactaggatgccacgtcagcgaaaccacccatatatactgcttagggaccttgagtgaacgactttgtatagtttagggtgaagatttctagttttgtggttaagggacctcaaaaaatctcgctgttaagttgagggacctccggtgaacttattcctattcttgcgcatcccggacacaaccgggccagtgttcaactcgtgtatacgaatgcgtgcggaagcccacgggccaaggcccatagttgttgggccctaaccagtccgtactcgtacaggaataagttcacttttggtccctcatgttaacatcaagtttaaagcacgtacttcaacagcgatatcgggtatagcacatcattttataaaaccggtgtaaataatatcccacggtagtgtgggatccggtaccggtattaactgacgtatgttagtgggtgccagtcaaaaaattgcaatgagctctcctctcctctcctctcttttcccgcttccccttccttctcgccgggtgctttcgccacgagtgcggcgtggtcggtcttcgccgcgcccgtccgcggcttttcgtcgacgagagtgttgcacgcctcgttcgatgtctacgacgtcgacggagacggccgcatcacagctccaccgcgtgtgccgcgctgtacgagcgccgagggtatcggcgccggcaacgacgacgcagagcgcgaggtggccgcgcgctggccgccgccatctcctcgtctcctctctccccgacgccacagccgcagcaaggagaggcgccgccgcctgcgccgctcttctccgcgttggcgccgccctgaagaagagtggagatctcagaggagtgagacgaagtcggaggaagaagactaaagacatgcccctgacatgtgcgccccactgtaaattttctctgacttgcaagtgtcagctagatatcacatgggacgaagacctaattcatgtcacgttagcgtcacgtcggttaaaacttgaaagcggacccaatactatcatcagcatcacatcggttaaaattggactcaatactatcttgagacctgatttacatcggttttgtaaaatgatggatgcgttatacaccaatattgcacttgaaggatgcgatttaaactcgatgtcaaaatgacatgagggatctaaatgagcttattcctactcgtacgggggcctctctgggctctgctctggccacttgatgctgctactggaactggaatctcattaatcctgacaggctgggagtaggagtatcagacagacagctcatcacagttgctctactcttcgcaaactggccgctgctaaaatggaatatgagcattgaaacaacagctttgtttgcttacagagtagggaaaatgaaataaataaatgtcgatgaactcgtgtgtatgtgcttttcgcggttttagttacaaagttattctccaaacttctaactttttcatcacatcaaaactttcctacacacataaggcctcatcgtttggcatattcatatgcttatcagccaaaatttgagttttcaacgtaatatttagagctgattttggggggtttttttatcgaagtttagttttcagcctttgcttttaaatcgctaagaacacatatataaaagttttattcacaaattgattttcgtttgcaaatatgccattcagaaaatatgccaaacgatgaggctgataaacttccaacttttccattacatcgttccaatttcaaccaaacttctaattttaattttaaccaaacttccaattttgatgtgaactaaacacaacctttatttccaaattcatagttctagctaaaaattattcttttctgagaggagaaggtacaattgctatgagctacggtttggttcttgcaggctttgcattgcagcatcactccatctctgaagtctgaagtctgagctgattactgaaggtgagaaagggctgtgtcagtcaaaagctctgctgactctgctcctatgcttgttgtaggagtactagaggacatcagatggctggcgttgaatccattggcttctatctgtcttccttgggaaccaaccatacattaattgcccatgtagaaacaaacgatttatggacaacaaaaataaaacccactggttaaaaagcattttgaagaatattaaggtgatttgatctaatatggaaacaattttgtcgttacggtgattgtggcgcgaaaaacaccttatttctgataataaaaatggaggtggaattcccctccgattaaaagaaatactaacatgaaaatattaaattacacgcgaaaccatgttaaattggcgtgaaaattataatatcacgtcggtgtcggttaatataatttatcccgaatataaagtgtaaattgacaaaaaaattctgtgaagctatcactgtaacaacaggtgcttgggaaagcaactttctggcagctgccgcaagcacgaagatgtcataaccttacaagggaaaccacctgcattttctactgttctgggttagatcaagctgatatgtgcaaaactaccaacaaacaaagaactactactatacactaggagaaaaaatgattaaacgaagctgtcgcgacttcccaaagcagtttggttcttctagtatccgtgtgacaattcgtgttcctgataaaaaagacctgcatcatcgtctcatccgacgttcgtgtcacgatcaagttgacactgactcgatctaccaaccacgggataatcgagttgatttgataatctttcaccaagataagtttcagcaatgttgtgtgtgtactatctcctttttttttatcctcccagctattaaatagccctccgatatcttgctatttaggagtattaaatgtagattactgataaaacctattccataacccctagactattttgcgagacgaatctaacgaggtatattaatccatacttagcggatgattactgtagcatctatgtttaatacttctaaatagcaagatccaaacagggcgtatgaaactttcaaccaatgatttctcttccctcagacaatggaaacaacatgatatatcgtgtaagatgtaagaagctacttgcttcttcagtcccaaaatataacaacttatcaatagattagacactatcgttgctataattttttgacggagagagtagccatcattttcttgtatgcagtactccagttattttttgtcgtgaaaaaaataaataattgtgaatactactgcaacttaaacgtgcatatactgtaataatactgtatacgatacatatacggagaaaaaaatacggggagctgaaaattctcccaggtgcctctcggctacgcgcacccggcgccgcccacacgcaatcgcctccttctcctcctctctatttatacacacaaatacgccaataaaaaattagacttacctcctcagcctccccacccacgcgtctcaccggagctccgccgccgccgccgccgttttctcccgtcgtacgacgctgcgtgttcccgagtctcccttccgccgccgccctccggagccggcctgagtttggacgaggttgggagggaggtcgccttggacgaggagggggaggaggaggaggtggtggtggtggtggggcggcgccgtcgcggggggagatgggggccgcgcgtggcggggtgcggcgcgtccggcgggaggcgctcgtggcgtgcatgacgtgcccgctctgcaaggggctcctccgggaggccaccgccatcaccgagtgcctccacacctgtaagttctctctctctgtctcccatctatcccgtgtctctcccatggccgtctctccctgcgcccgcggttcgccgcgccgccgcgtttggggggcgcgcgctcctctcatggctttctctctcctggcgccgccttgcgtgggttctcgtggcgtggcgtgtcgactgcttgggtttcggtgtcggattcttcgtgtttgatcgaggctggtggtgccccgtgcgagtttctcgatcccgggagagcggcggcggggggagcgccgcctttcgcctggatttgctgcttccggttgttttgcctgcttcggtttcgcgtcgcgttccctccgtggtgttcagctcgacgccgcgttcgcgcacgagcgcgcgcgcgcgcttgctttccccgtggccttggctggccggcgttgtggttggagctcaccatgcttcgcgcgtgcgtgcgtcgtgttcagccagcgtcgtgtcgggcgatggctcgttccacgtcgccatgcctcctccgcctgtgtttcttgttcgagttctctcctcgaacgttctcgaacatcccatggcgtgcagtggtagctccaaacgagcaggtttgtaaccatggattcggtctgctttgtcgtcgtcggcagagtaacagttatgctctccggaggccgcggtcgccggagccactccggcaacgccactcgccgccgccgacgccaccctctgactatagttttctcctcatgctcttgctccatcgcgtgccagcgtttgcccctccggcgctgccatgaccgcgatcctgtcgactcgacaatgtagcaaagctgctgccttaagccaatccaggcagcctctcatcaccgcggccaaagccttcttcctttgagtagagttcatcggcggtggtcgctgttgtcatcctcgtgatatggcgttcgggtccaaattccctcaaagtctgaagtctgaagaaaactttcgatacatgttttctttcggagctttttggtgctgggaaaaagctgtaaagcgtcagcacttgctgcagaatgtatgggggttgtgcggtgttggcggggttccagtagcttccttactgttcgtgtttgctaacggtgggggagcttggaaatggtgggcatttttgcactgattgcgattaggaacacgttatcattttggttaaatgaccgacaccgatgatggattgatgggagttcagtggaaagcaattgtgccatggaatatggttttcccggtgttctggtcagtgtgaccaaatgagtttgcgttaggaaactagttcagatttatgctttcttgattggtccataatttgtatctgttagccacttagcctcttggaatttttcttgttcgttagtcgcataaacttgcacgctgtttaaaaatgcaacttttgtgtaactttactaaatgtttgctttggtctatgtttttggctggttcacctggatatgtttttttgtggtaagttagaaataaatgtaatgtaattatgtaaagtagcgagttgtcggatgttgatctagtggtagaaaaggtgattgatagataagaaaaaataattgcttgattagtgaatgctcacttgttggtatcattgttgcaattggaagtttgtgtcatttgtcatgctatgaaccagatgattgctaagtaggcctagtgcttctgctgcagtgtagatgttaattattgatgcatgaagccatgaatacgttgttaggaaccagagtagaggcagtgctatgctagagtttgcatgtttttaccaaatcactaaaatcaactacgtagtcttagttcattgttgccacttgctgctaaaggagttctcatgcttggtctgaaatatggtagttctgttttacctctgtttgaaactggcatgttctctttatagttactcgtctgaccatttcttaaacagtttgcaaggagtgcattatggagaaaatagatgacgaagaagtcgatcactgcccagtatgcaacattgatcttggctgtgatcctgaagagaaactcaggtgaagtcattgttaggtttcttctgtgaaacattgtctgctctttttacaatgcattctcgacttccatttcgtgtacaacccattaagaatcatcatcatttgaacctccagagaccagaggccatgctatctctaattgattgtgataacacagaacttatctgacaaacttgaccagagaggataaaatggtgatagaccattttacccattcttgagttctctagcaaacttggccagaaaaatatcatatttattgttagtttgttggtttgtcctcaaatacatccttgcttgtattgtaaagcaaaactgtcaagattattcatgtttaatgtgttgtattcatacctaactttggtttctctaacatgattgattgtttccttgtttgaaggcccgaccataatgttcaagatatcaggaataaggtttttccacttaaagtgaaaaaggttggtgctcctaaggctccaactgtgacattgccagtaaagagaaaacagaggtcactttcttccttggttgttgacactccgagggtggcagtacagactggtttgacaggacggagaaccaaaactgcgagaaggacagcagtctcccatgtaaactctcctggtaataatggaaccatcaagctagcaaataaatctgaaggtcgagatcataaaactcagaaaatctcagcagcacaatctgccaagatgacaaaaactggcaataaaaagaaggtaatatcaaagtgttaattacctggtttatgtgtagaatcagatggtttcatgcttaagtttgatctgaactgtcttgtatattggattaatctaactaaacattccactcccaaacagaataatactgatgtagatgtcacaatccagtcatcttctgaagataggaaggatgatcatacaattgacaaggaagatctcaagaagcctttaaatagcttggttgacactgcaaacaggacgaaattttttagatcaggtcctaaaggccaggctgccaaggaagacaaaataaaaaactcaattaagttactggcagaagatgacacagaagacaaactggtagttactggcagaaaggttatgccatgctcaaataagttaaaagttaaagaggaaaataatcgcagtccttcacaatctgcatcatcgaaagataaaaccacctcagactatgagctgaggaaaggacaacatgctgattcacagcagggacagattggttctacaagaactggtgctttgcatgatggaataactagaccagtatggtttttgcttgtcccttcacctgaccagtaagtttgcatcatatccaatatttgggttctcatgggcatttcttttctccccttaatttcatatcaaatgtaaactatttttcaggaaacaagatcccaggctgcctcagctaccaacatattacgtgagaattaagtgagttccccttggtcctgcagtttcttatgatttttaatatgctacaaagaagcctgttggatttaggatcctattattcctgtgtggaatgttaagctgcttgttttaggttgtccagtgtggaatgccaatagtgttatttccttgttctgttgtccactaattattgcaactgcgtcctactatttctttatataatttaacagtatatacttacaaaacaaatttgctcgagatgaagatgtttccttgaaaaatattacatacttttttatcactactaccaacgatctgagctatacaaacatgtgtccgatttccaagaacttctatttattttcttcaatttgtgttttgtccttgtttcagagatggaagtctgcagacttccttgatccagaggtacatcatgaataagcttgacctagcaagtgaagatgaggtaagctttcagatttctcttttcagttcaattgctataaagacatcagttatgcaacatcactcactagactggtatatacgcaaagtagacggttggcaaacaactctcaactatctttgctacagaggctgttgattttgtagatttggatggtgacatatgactggcctacaatctttagctatctctacccttcaaaagtgggctctgaatttgtcctctgtaaactagcctttcttttttttttttttgcgggatgtaaactagcctttctgttccatgtttcttgacaacaacagcaatgcacatgaacagctatgaatctgctcttttgcctgatccctctattctaatctctatccgcaaatgcaggtggagatcacatgccatggcgaggcaatctccccctcgaccacattgcaaggcctgctcgagctgtggctgaagagctcgccggtggagcaggtccaggcgtcgctgggcgctcaagccaaggagttcgtcatggagctcggctaccgccggccacagcggcctccttcctcttagctagctgcaacctctactcctccagtgccacaatccatctgctgcaaaatctgcaggcaattgcaggaggaaagaagactctgaaactaccgattcatcagctcatatcatgttcatccgtcagtcagactagggtaaaaaaaaaaagagaagaaaaaattacacctttctcatttcttagatcatgtaaagagggacaaaagattaaaaaaaaaggtagaacagtgcattaggctactaagataatctaaaagggtaccctaactatgtcttgtttaccatccgatgaagttttcaggtgaagtcccatctcctgtgttaacctgtgctgggcctgtgtgcgcgcgtgctgtgctacagtaaaatagtaattataattactgtagtaaattagtcagctgagtgagatggtctatgctggttttgtagagttgtagtaggagtagcaactgtccatcagcttgtctcgtagcggtctactggtttggctggtttgaccagtaacggtctctgtctggggctatatctgtgcattgtgctgtgctatactgctgtataagcgtacacggcagctgtgctgtgctatactgctgtatacgcgtacatggcagcgactggctaccggcacacagctcatgctcctcacgcactgaacaccagggttcgacttaccgttggttaccggccttactgcgggagtacgataatagaaaaaccacagtaacctctttaaattcaaataaatttaaaaaataatttgaatttttgataaattttacacggtttcgtactgttttttacggttaccgcctggtaaccatgcttaccgccaaggcacagtaaccccagccccgacagtttgggaaaccctgctgaacacgcagttcttttcagctaatttagtggattatcattgtcacaggatcttgaaatacattttcttttttaaaaaagctaatttgtattacttggttttaatccatttgttaagtttttccttacgatctttaatttattatccatacgatcaagtagataatctacaacaataatctgatgaataatttgtttcaaacggtcccccgtgttttacccttagactccctctagaacaaggaattccgtaaaatttaacaggtattgaactaattcatataaaattttcacgttgcaaaagatcccttaatttgttatataacgtatctattgttttacttaacataatagaatccttggagtcaaactttgtaaagtttggtctctgctatatttgaagccatctattttttgttgtatttttaattgaataactagaattctggttagagatgttttcacaatattatattttatcattatatcatacggtttatgcatgctacgaacaaatggctcgtattctggaatataggctgtccatctgaaagaaattggcgaccagctttctggtgcttgtgcttgtagtaggacctgttctgatctgagcagctcggctggtccagccgtccaggaaacaaaaggccaacatcattcattctcgcccaagaaaagagaggctttgttctgagcgaagcaaacatatgctaaggactaaggaataaggattcatttagaaaaacaaaacgaaacaaatgctaagcaacgtgcatacaacactgccacggagtggttttgacatgatcatttttggttacttagatcatacaatgtgatggcatttagaccaaagcagtagaacagcacagaagaagtttcttttcgctgagaataataaacaccaactagctggaagattcttcaatgatacacccttgtgatccagccaaaacttaaacttttttcttttcttccctgcagcaattcaattacgctttctatattggtacagaaaattgcaactacagaaaatttgagaaaaatgaccaaaagaaagtttctttcttccttttccttggttcagaaattcagccgttctcaagatacaggtgataaaccagaccaccattcaggtgaactagcaaaagtgtgaacagtggcatatgaggcaccatcaaacattcaagctgcaacaaagtttgcacagtgaaaagccaacggagcaaatggggcataggcactaatctgccttcaatcttctcctgtccaccagatcgaatctttagtgattcagaccaagaacagtaacaagtagaaatggatggattttggcatttcccccttgtatccaaagccataacattggaaaagaagtcacatcagaacaacacaatctccactgatgcttccccaaagcagacaacgagagaacacaaacataactgagatatttgcattgccatgagtccatgacagttaccacacaaacatagatggatcgatggacatgcaccaaacattacaatttacaaaagattatgatgcatcctatcaagcagatttcactttctatgtttcaacaagaggcacaagcacatcatacatgtgcagaaaaaaaaaagagaagcataattcacaaagcgaaccacgccataagcatgagcattagcatttgcaagataaagaatcagattcaatggccactgcccaacatgtatagcatatttgcaaattaacaccaccaccatactaatttactcaattcagttgcgactcaatatgttcatagtatgatcacacgcaaagctagtatttgtacacgctaacaaaagaatcaacaaacaccgtaccatatatatcatcaaagatcaaatcaactgctaggtttgataattacacagtataaattccagccaggagacacacacaatcattcatagctaatttgcaaggcaagaacatcaattagctacgagtgttggataaagagattgatgcatcttggggggatatcatcataccaagccgagtagatcaagcgatgcgaacgtaggtgggcaagattggtccggcggcgctcatgccggcggccaccaggccgtcgccggcggcctcctgctcggtcaagaagaggtcgtcggtggagcggagcgtggcgtgcgcggcgacgagggcggcgccgatcatgaccgagccgatgacgttccagccgacgttggtgaagagcagcgcgatgacggtgaccccggtgagcgcggcgaggacggtgccgtcctcgaactccatcccgaggaggcggagcggctgccccgccgacgacgcggggcgcgcgaagtagaggaagaaccaggcggcgcagagggcgaggagcgcgaagagcgtcccggggtgccagagcagcgaggccgcgacgacggcgagcacggcgagcgcgtagttggcccggaagtaggccgcgttccgccgcgccctggccaccgcctccccgacgctgggcggcctggagaaggccggcgcccggaacacctccccccacggccgcctcgccgcgatgagcgcctgcccctgctcccggaacctcgtcaccagctccgccgccttggcgatcggggacggcggcgccgtcgggtcatgcagctgcgcgggcggcggcggcacgggctggcccatcaccggaggaggcggggcggcggggtaggcggagggagggggcgggtaggtggggatcttggcgtaccctcctgctcccgaggagggtgaggcgtaggagccgtacatggcggcggaggccggcgcgggctgggcggcggcggaggaggtggagttgcgcatggtggcggcggcgagatcggcgagcggagacagggagaggggatcggattgaggaaagttgtggtggatttcgctggattcgcgttgggctttcgctttgagtttgcgtttgcttcgctgggattgtggggggaacggacggcgtggagttgtggagtcgcgcgtttttaacgacggggtttgcttatcggcaaagcaccttctgtctggctcgtctttggtcatcgcatcgtatcgtgttgacgttaactagagtttttttttgttttccctcttcgacttgaatttcccatgaagttactaattttccatggaaaatgtcccttttatgtccctcaactttgggttgaattttgttcgcattcctcaaccgtaaaaccggatataaagcaccccttaaccattaaaaccagtataaatcgagtccctagatggtattatcatctatcagtacagagaaaaagtagatgttatggaagaaaaataaaaaatagtggaccttcgcgtcagccctaatttcttccctcccatctctcctgctccatcttttctaaccagtcattgccaatgccacctgacggccgacaaggatggcttcaaagagttgaggtgccgaagcagtgcgagctcacagaacgtgatcaccacggctgcacggttgtcttcctcattgagctcaacaatcatgtcgcccacgatatggacaaacaatgtgcaaattgcaagggagcacgacgcagcacgcagtgtcgctgggtcgaagagaaagtagagtcaccggagtcgatgtggaatctcgctggcggcgctcctcccttcgaatctcaccgtcttcccagaacttcatcgcctcgcccgccgccccctagcttcaccaccaagacgcctcggtcaacaccaacgatgacggtgtcatgctggtgttgctcccgatgtagtggggcaggcggatgtttagagttgagcccgtccccattgtaggctcgcatttgtcatcaagggccgcttgcacaacgacgtgggacagatacagggccgtcttaggggcataggctagttgtgcgaccatctatgacccaagccggtattaggcccatcaccaaccaaccacaaccagtaccacaccttatttcctcatggctaggatttagagtgagatcttgtgatcatctcatcttctcatttgcatctatctaatcc

SEQ ID NO: 5844 - DNA, 43529 bp, Oryza sativa
  unsure (1)..(43529): unsure at all n locations
agcgtaaagtcctcccacctgcttctgactcatccatatcatttctgatgcgtctagtttggcgtcgaccctttttcacccttaacttagatggatctggaacataaaaaacttgggcactcagcgttgtgtaagatcctgagatcccgaacccatatatctcctcactccatgtatgaaagattgcttctttcctgaaataatttgagacgtacacattgggagatatgccacaatcaccggcagcagcaagaatgtgtgagcaaggaaggtgatgaagcttcggcttcatacaactgcaggtacatccaccatccgccttcaagacacattcctgcacggcttgcttgcgatagataccacgcctgctcctatcaacacacattatttcataccgatgcacttgtgtgccttgagcaacaactctatgtctccgtgcctttttgattttatcttccatgtactttgtcactacgttgccaaacactatgttgttatcggccatggacggaccaattttcttgtatcgatccctaaagtacgcttgcgtgccgtgaaggatgaattcaacaataacaaccaatggaagtacccgaactcctcgcattacccagttgtacacctctgccaaattggttgtcattatgccataccgagatccatcggtgtcgaacaatagagaccacttctccttaggctcattctcaatccactgagtgaaatttctgatggacgaccctgacctccttctcattgttggtgggtcatcatgtaatgcaccaagaggtatgggaggctcgtcaccttcaacttgtggtctgcgagattgctcatctgtttgcttcgttgtcaactcatccaacttgtcccacaactcattaaatttcttctcttggttctgtgcacagagcctcttaaagagctccataagatgcttgttcttgaattgcttgtagaaatttgcacccatgtgacgcatgcaccaccgactccgaacatcaggccacttaggtggaagtcccttctcatcccaaccgttctgcaagtagtcaatagcccgcaacatacccgcatgacgatcatgtataaggcaaacgttgggcctcatacgcaccactgcaatatgcactctctctaggaaccagtaccagctttcagtgttctcactctctacaaatgcaaaagccataggtagaacctggttgttcccatcacacccaattgctgtcaatatctgacctcggtatttacctgtcataaaagttccatctatgcatagaacaggtcgacaatgcacaaaagcattgatgcaagcacccaatgagaaaaaggctctttgcagcacactctttgttcgatcatcaaccgatgtaaatgtatgtaggtcatagtaagtattattattcctctgggcaatggtggctaacaaacgaggcaaattatcataagaagcttcaaatgtgccatacctcatctcaataatcttttgtttggctctccaggcctttgcatagcttatggtgtacttgaatttgttctcgatgtgcctaataattgattttggttcaaagccaatgttaccaacaacactgctgtacatctcacttgccacaaaagctgaagtgatgtttcggtgatacttctccaccccttgtaagtagcacttgtgctcggtcacaatgctaactttccaataatcattccatttacccttatatgcatggacacgccacggacaatcttccttcatgcaccttacttcatacacataatttgttgacttgaccaccctaaactctctctgcaaggaaactgcccaatgcttcaccgcctccttcatctcatccttatgagcataccttgcaccctcaattacctcgttctccttatactcccagggtacatgatcaccctctgatataacaagtctagagaagtcctcatttgcccaatcagtggccattacatcaccttcctcatcggatgatgcgtcgtcgtccgcttcctcattatccgaatcttccctctccatttcatcaacaattataccgactctctccccctcatccgccatgcccatggcctgctcctcccttggttgattttcctcattttgcatcgatggtccaacaacatcccctgcattgataggaccctctacatcttcggtttgcattgaaacatttatatctttctcttgtaccgacacaaatataacgaggggccatgaccgttcaaaagccatttccacataccgtctccaagcagcagtgctgtccatcggcattagttcccaaaaataactttctgttgcacgactcactacaactgatactgacattgtgtagacttcttggtctattctaaatcctctcaacaaccaactataaattgactgaaatgttctctccacaggcctatcgatgcccttagatgtcattacaaaatctgacagatcaacacaatctggaccaaatctaatatttccttcaccgtgaactatctgaaatgtgaccttatttgacattgtgcctgatgaaaacaataactgcgttaacctcgcatttctgtactacgccctaagttacattctctacaatattgttctccaaaattctaaaagtaggttacattctccaaatcaaactaaactacatcttacaattaacactactgtctatgtctcatttcatactattatattctatgctctggatctacacatatgtgctgtgtgctacagatatgctaaaatatatgaaactaaaactaaaacgcaacatatatactcaaacataacatattagtacaaatgcaaaagatgtatgggagcaaacctgtgatgaagtgagcgaaccagcagggcttcgccgctccccttctgctgccctcccctctctctctttcgttttttttggatttttagtgaatataatgaaatttcagagaggggggactgggctttataggggggaggcaaaaatcgccctcccccagggcggcaagggggccgcctgcaaaattccatggcccctcgccgcccatttgcaggcggccccccgcacagtacaaaatcgccctcccccagggcggcaagggggccgcctgcaaaattccaggccccccgccgcccatttgcaggcggccccccgcataatacaaaatcgtcgtagcggagggtggcaagggggccgcctgcaaacttcgttgacggccgtcgcccgagagcgaacggccgtctgccacgtcattttcgccgccctctgcgatggcgatttttaaaaatcgccctcccagagagcggtaggcgactacttccgccaattttcaaaatggaaaattatttttgtaaaacttttaataaaaaaaattaaaaataaaaaaaattcgagtcgcgatttgggaggaggggagagaggacgacggtgacggctggtccggtggtggacttggttatgtttgctgggcctgggagcggcccaaatttgctatgcctcttcgtgggccaaatttcgtggttgtgacatgtgggctggtcctggtagccagcccaaatcgcgaaaatcttctttttcaacatcccgacgcacagaaacagagcttttaaatccgcttctgatattaagcaaaaggttaaaaaactattatacactttattaatacggagagaaaataagaagtggggaacactattggttcgatagctaaaaacaagaagaaaaaaagatgatgcagtgttaaagtggtctagtggaatacttcaaaattagatcattccaaaaataatttcttaagctaaaactatactttagcaaatgaaaatgtcattggtatccctcatcatcacacgtataatcaactttgatcagtgattactactttcgaagtggattctttattcgagaattctctcggcctaaacaataatatgcttatgcgcaagaggccatatgccaagaaggccaccacgcccggcccactttccttcactcaatgggcccggtccgcctaagatctaccttttccttttttttcttttgtgtatatgtctagacaatctgtttggttagagggagtttaaaaggatgagactattaactgttttgtttggttgggggatataggaattttggtgggatggggatgaagaattaaggaatgaactccctcctttccaatacctgggtaggggcagggaattaggagggaattcctcctttacttcgcctaaacaaatctcagtcatcggttttcattagtgatctaatctccaactaaactccctatcaatttccaccacctctaccaaacaaaagactgggatgaaaaattaaattcccatcttaatctcaccatcaattacctcgtgtaaacttccaatccccttccctcatgttgccaaacaagccgagaaaagaaatgcgaaaagaagagaaaagaaaaaggcgagaaaaaggcaaatggcaaggggggaagaagagtggaggaagaacctaagcagcaaaccctagtcgcgactacaccaccaccaccaccattgattccgatggacttcgcggagctggaggcggtggagggcctccggtggccgtggcacgcgtggccgccgaccgcctccgccgccgcgtcgctcgtcgtcccgacctccgtcctctgcacgccgctgcacccggcggcgcccgacctcctcccgctcctcccctacgcgccgctccgctgcggcggcggcggaggagggggagggtgcggcgcggcgctcaacccgttctcgcgtgtccaccacgccacagcgcggtgggcgtgcccgttctgcggcgcgtcggccaacccgttcccgcgcctcctcgcccccgacgcgctccccgccgagctcttcccgacccactccagcgtcgagtacgcgctgccgccggacgccgccgaggccggcggcgggccgggccctccgtccgtcgtgttcgtcgtcgacgcggccacctcggggccagagctcgccgcgctcaaggcggaggtgctcagggtcgtgcaggggctgcccgagggggtcagggtcgcgctcgtctccttcgcggcgtcggtgtgggtgcacgatctcggcttcgaggggtgcaccagggtggtggtgatgaacggggagcgcgagctcgagtcggagaaggttcgtgaactgtgaattctgggctaattgacggagccgcttctcaatgctgtggtttgggcaagtttgctcaagttgatccagtcactaggcatgggatttgctttaaaaattatcatattacagagtaaaagctatcgatctcgatattctaagtaaaatgggcattgtgcatttaactttaatagtctgctctcccaattcatgtgagttcaaaattcacactacaatttctgtggtgtataggagttataacaggggatgtaggggtgttcatgtacggttcagaagaaatcatctagagctgcgcatgagcaagtttagtttgtgatggcattaggctaagctgtcagtgggacatggatgaaaattaatacgaccagtttcaagaaactgcctgtgaacagacctaagtggatgccacacctttgtttgctatgttgctcctgtcctatgcatggttcatttatgcatgtagggcagcaactcttagatatgtacaaatgacaatgtatccatgactccatgtagcctaaaaatgtctgaaatgttataattgtagtatgactggagagagtttggcactatctaaataaggcactcttgggatcttgttaatatttggcttacatatgctgttgctatgttgctgttgtctagaagatttggtccttgcaacttgcaagtttgaagatgtttggtttggataggaaaactgtgtggtcatattttcagttgtcccataggctcatatcaatcaatgatccacttatgcaactgctttgcgctttaggatttattatcatcattatgtttaccttacaaaccttctcttattgtttcagatacaggaatttctaggtgttcgtgatgctcgatacaataagttggctatgccaaggtccactaaagtgcagagatttttgctgcctgtttctgaatgtgaatttaacatcacatctgcgatagaagacctgagatccatgtctgcttgcccacgtgggcatcgccctttaagagccactggtgctgctatttccacagctgttgctcttctagaaggttgttgttcacctaatgccggaggtcggatcatggtcttcacatctggtcccacaacagttggtccagggcttgtggtggaaaccgatctcgggaaagcaattcgttctcatcgcgacattttcaatggcaatgctcctctcattgacaaagcccgagaattctataagaaagttgcaaacaggttaacagctcatgcattagttcttgatctatttgcttgttctctagatcaggttggggctgcggagctgagatacccaattgaagtgtctgggggcttaatggtgcatacagaatcatttgagtctgagcagttcaaagcctgtttaagacacatattcaatcgtgagggtgttggttaccttaacatgaactttaatgcaacaattgagatagtaacatcaagggaggtgaaaatttgtggtgcccttggtccctgcatctctcttcacaggaaaaacagctctgttagtgataaagaaattggggagggtgggacaaactattggaaaatgagtacagtggacagcaaaacctgcatcgtgttcttcttccgagtggactgtagccataatactgagcccccaactgtcttctttattcagttcatgacgaggtaccggcatggtgatggtagctatcgcctaagagtaacaactgttgcgagaagatgggctggacctcgttctcctgagattgcagcagggtttgatcaagaagctgctgcagctgttatggccaggcttgccgtgcacagggcagagacataccatgttagagatgtgataagatggcttgataagatgcttattcgctttactgccaagtttgggaactatgtccctgaagatccatctacattccggctgtcaactaacttctcgctgtatccccaattcatgtactacctgcggaggtcacagttcattgatgttttcaatagctcccctgacgaaactgctttctttcggttgatgttgaatagggaaggagttgtggggtccctaatcatgatccagccaactttattccagtactcgtttgatggcccacctattcctgtgttgctagatgtcagctccatctctcccgatgtcattttactatttgattcatacttctatattgttattcattatggctcaaagattgctcaatggaggaaacttggctatcataaggacccaaatcatgaaaatttgcggaagctgcttgaagccccagaagttgatgcggaggcactattggtagaccgtttcccagtgccaaaactcataaaatgtgatcagcatgggagccaggccaggtttcttctagctcggttgaatccatctgtgacacagaaaacacagctttcagatggttctgaagtcatattcaccgacgatgttagtttgcaagtttttattgaacacttgcaggagctggctgttcagggttagtgaggcatggagcctggcgatgtttccacttttgcagttggacccacctctgatcctgaagatatagctttcagaaggattgaatgtcatattcacagatgatgtttgcttgcaagtttattgaacacttgaagtaatttgctgtgcaggattgatggatcatgtggactgtttatatgttactttctggtcttctgttatcttgaaagttccgggagagctttactgcttggaaggatgggatctcctcgagttgttgtacatttcaccagctccagtttgatgtaagccatcacttaatatttttgtatagaatgctataatgtctattatttatgctctacaagtgctggagttctcttgagacatttgctaatttctgagcagtaaaacaccctttgccttccaattctggtaatgcaataggaccgttatgttgttttctggtggattgaggattttaagtcactcttctgttggcatcatacgcccttaagcgcagccgtttaattctctgtaaacacttaaaattttgatatccacaattcttttggttgcggtttcacactttcactactgtgttgcttgtgtgattcttcaagaacgtctgttatttaatactgcccctagagtttatcatatgatgtttgacatattatagaccaaacataacataggcatctttatatgctggaagcatttccctgtcataaatgtgtgctgaatagattatggtttagtttgtttatgcaatgtacttagcttaggtatcaccacagctctagaaagagcaaggaagcttcatgctatgatcataccatcatgtgtcaagacccaaccttcttaataactcaaaagacagataggctagagttatagtaatggattccccatcaccaagcacatggcttgttccccccacttgatcacaccaggttacaaaaatattgtgctgatgattaacaaacatgttaacttaccagataccataataataatagtctcattgataccctttacttcacaatcacacaaacttaaattaacaacattggaataaaatcatcaagtagatcttgggacacacggtaggggacatcacataacaccaatccagctacacacaaatagattattgcttctggtccataaacaaattaaacatgacaactcttccttcttttaatccagctaaacaagtaaaaccttatatttctaaggaaaccataacacactgcaagaacaccattcttatggcaccatgctcagcatcttaatactgcaacattttcagctcttgttcttgtacttgtcctttgctcttggtgctggaagaaaaaccacacacacaaggggtgtgaattaagatataaatcttgacacgaaagcaaattttagctgaagatactgaccaagaccaatggcttcggaacccttcatgatcctcaagcgtttgcatgactcgacaaacatcctgcagagtaaccaatcagctaatgcgagaaacttgaacgtggtatcgctaaaccgcattctaatcatgaggtggaaaataaggaaaacagttaagggggcacaagaatgaagtagtaacatactgccacgggacatctccaacaagcatccagtcaccatccttgtcttcataagttgtaacagcatcagagccattcacctcattcatattgttccctgacagagaggttcatgcacagtgttttcatcaattccggatcaaactttgcattcaaattaattactagttgataatctgtttctgcaggttcccgtggccagcgatttaccagttgcggtgaaggtgccgaacatcttctgcagagcaagggagaggtccttgtagctgttgtacatcttcaggtccaccttgcgcaggtagggtgccccgtccatgctgaccttcacgaaggcagagctgttgctgccgctggcattggcagcgggctgctgctgctgcttgtcagcttcctcttccttcttgctcttcactgactggacggtcatgatgttcctgcggaacgaccgaactggtggccaacccactgcctgcgccctgatgtgtaacattggaaattagctactacatcgatttttttttcttttgctcagttttttcacatcttgttctaacttattggcgctgtgaaaaaactgagatgatttactttcgtgactggaagttccatccagctagatcatgcatgttacaatattcttgctggcgaccaactctgtgttaactaatgtattatgtgtgtatgcctgcagcaactttatggtagtactgtgtgtataatgaaaatgccatcaactttagttattgccacatgaatcatggccaccatgattatttcaggaattaattgtatacagatgtactccttttctgatcgttctaaatattttgttgtgatcctatcttcttttcaggaaaaaaaataaatcaaaacaatacgaaaacaactcctttttcagatggaatctgccaggagatgaaggaaaaaataaaccaaaaacaatagtagtaccactacatcgccagcaatttctgacacctgctgcacaaagcaggcatcagatgagccaatggtgattaaaaatggtgataattatctgctcagcactttgcaagcgacaaagaacatacacgatggtgtcgccatatgcactttctgccagaggatctcttttatatggataatttgtgcttcttttaaaggtgttgcttcatgggcatctcaagtttatgcagcaagctcccaaatatataaatccaaacaaaagaaaggaagagaagagggggggggggggggggggagaactaactaataacctaaacatgcatacaccttttcaccaaatgccattatgctgctactatatgtggatctttttccataaatcaaaactaaacatgcataaagttcctccaaacagcacaccaaataattcatcttttatccctttagcaaaaattaacaatactaatcccactaaattctcactaattattaagtaaactagtaattagacgatgcaactatatatacgaaggatcaaattggaactactgtaacatattaatgccagatttatatatgaaaaaataataaaatcatgctaggtccagtacatacttgggagcaggtggcttctcggcgtcggcggcggcggcctccgccggcctcttggccttctcggcggccggcgcctccgccttgccggcggcggcctcctccatgccggcggtgggcagcttcagcttcaggtcaatggtctcctcgaagcccctcttcgcggccttggccgccgcctcggcggcgccgccgccacctccgggcagccccagccggagctccgtcccgacgtccacgtcggcgccggccatcgcagcagccgccgctgccagctgcttagcctatcgcggctatcgcgtctcctcgccccaaatcaagctgccttctcttctctctctttctctctatggagactggagatttttaagcctttgtggtgattaggaggtgttggaagaagagagaggagccaagaacagcttggagatgagtatatatatagagagagggaagagaagaggagaggagagagaatgcatggtaaatattctaagctaggtagggtggtagagagagagaagaaatatgagttttattttattttttattttttattttggaggggaagagaaagagatcagttagttagagcatgagtgaggccacttggaggttagtagacaataatttttgcatccatgtttcctccggttggattctctattacaacttacaagtatcaagtaatcaaggttaggaggctagagagcaaggtgtgtaactagtgaagttccattggatggttgttcaggatttgtaaagtgttcctgtgccataattgtagctgtggttagtaactgctcctagctacacccaatgtgcataaatatatgacttctggaagcttgcaattagagtttttttttcaaacgtattcaaaaacatatatttgtcaaacaaacacaccttaaaaaatatttgtcaaaaaaaaacaatttccatattgtatcatccctctgccttcaaatacttgtcgttggacgcttttcatcttaaatatttggttgctcgtcttttttataaaaaaaatatttaaatacttcaaaattattctatattaacgaagtatgttgcatcctaaactattcataatactttcatacattatgatctaatcattcagattttattgatagtctaagttaaagtcgtgttaatcaatggtggtatttatttatggaaaccaaagggagtttttttttatttttatttcatgttcatgctacatataacaattgttaaagtaatattggaggagccgcaccctcttgaacaatgagagcaacattaagttgaattgtacatgttttttttccaattacagatttcttgtaaaaaaattaaaattgagaagcagaggtcaaaagtagtcatagcaaaggctacagagaaaatcagtttgactttaataccggataaacataagaatgtaccttattttttataactatatttttttcatcaataaaagagtgcaaaaataagggggaaatgatcttggttcttaggagtattatcattagcaaatttcataaaaccccacctattatgtagtcttagttgaacaaaaccactaaaattttggcacgtgacacataaccccggttctatggctatcaagttttacaaaaccataccatcaatcatttagactttgatataccatattttgaagttctaaaattacatcccaaattatgagttttgtatctattatttaataattgttactttcatggaggtaaagttttataaaattttgatatgtgaatatgttaaattggttaatgttgtggttttgtgaaactttaagggcccctttgaatcgcagggtagaaaaaacggaggaataggaaaaacataggattctgacaagaattgaagtgtaaaacagaggattgcaaaacacaggaaaaacacaggaatggtcgtttgattcgagcgcaggaaaaacgcaggaatcggatgagagagatagactcaaaggaaattttccaagaggttggagctcttgctaaatttcctccaaaatctacatgcaatgtgtcattccataggaatttcataggatttgaaaagcttcaatcctttgaatcaaagggccaaataggaaaattttctataggatttgaatcctatgaaattcctacataaatcctttgattcaaaggggccctaaatccataatacttgggatgagttatgtggcacgtattaaaatctctttggttttatgtaggtttgatcatgatacgtgtgattttatgaaatttactctgttattattacactgattttcttgctggcaatgcaactgatcccaaggctgcaggatgtagaggatccgggggagcctagctcgcgccggtgcatggacccatatggcgccgggcccaccgcgcaggccccggtggcacgacacgtgtcgcctgatgagctggacggcgccgattctgccccctccccgtctccccctcctccggcgtgagggcgtgacgcgatgcctgacgtcaccgccggattttttcaccgtggggccgggctgcaggtggggacaccgtggcgtgtggggctcacacccctccgcggcaggatctaccttcgctttattctttgggtgatgatccacttgcagagatgcatgcatgcattctgaactctgaagccaaggctcaagggaagaatgtgcgtacgtgcaaatctaaaaggaattcatgtacagtttgtgctactaagttttttttttcttgttctagataatgtgaaaaaaatatgaatgtcaagggtcaactctaagtaaattcaaaagtacaaaatggcccacaccaaaaagagatactcagtcgtatccaaatgcatggtcaaaatttgaaatttaacacagtcgtatccaaaataatactccctccgtcctagaaaaaaaatatagagttttagagtttgacacggttattaagaaagtagatagaattaaataaggagttgtgatttgttgagaagtggaaggtatgtgggaaaagtaaatggtggagggttgtgattggttgggaagacagtgttggtggagaagttgctatattttgggacacattctaagtgctaaagttgttatattttatgacggggattttaattcactctaaaaaaagcaatatgttttcgtcggatggaagtaaaatggattcgagtaggactatcaaacaaagcgagcacattcaaaattcgagttcttttgtctcaatattggtactgtccttatagatttttacttcctccatactaaaatataagaatgtaatattaaatgggatattttctaatactacgaatttagaagtatattattacattatcataaaatgccccatctaattctagattcttatattttgggactgatcttgaaactttgtgagaattcatattttttttgctttgattagagtgtactaatactagcttcggaggcctcgctcgtttgtgctagctaaggcaaaaaatagtgaactgccggctgtgcttttgggcgagctgcagcctgcagaggcccaaaatgtctcaaccaccaaacaaattatgaacaacaattactagcagaaaaatgaacaaagcgataaaaaaatttatgtgtataatttctacgtttatatatttgtcaattaaaagctactgcgtcgtaatgttgtaaaataagtacctcaaaatcaactcaaaattaagtttgtaaaatttattttgtttactgcggttgataagaagaaaaagaagaagatcaacaaacaatcagtatgaaaaacacatgtactctacaagtactagggtgtagctctatccttctacccttgatctactgtatactctacaagtaggctgaaggaaaataaaaaaataaaaaccgaagtgaaaaaaaaaacatgacgtatatctgactttgatgggcagcacagcagcaagaagaggagttgttggattcccaggcctccagggtggtgggccccacgtgccgggaggggtggggacaggtcaactcaggtgtcggccccaccactcctgcgtgcatgtgggttgtgaaaaacggattctcagctccacgcgaccaccttatatattcccgcccaaattaatcaactactaaaaccaaattaatcaactaattaaaccgatcgagagagcactagcctacctagcttaacataatggcataggattagtgctgcataatttaatttagtagcagcagcagcatttcttggcttccaatcattctccagccagccagccatggatcgatccccaatttaacttaattattagtagcagtatagtagtaagaagagaagcatgatttgatttgtttaattaaatccgtttgctcagaacatagttactcgaaaaggcaaattagttaacgctgttaattagtggcagtgtgttcagggaaatctctatcagaatctatgcagaatttgacggtgcatatatatatacacacacacatctgccatgtcctactactgagtactgactgatggagcttgttaattgtaagcccctgcatgtatgatcagtttgaacataatccgccctgttttacgcaaagatcgaattaattgtgcagaactcatggactaatatgcgtcgcgcagtccccgggataagctaattgagatgggtgatgagagggcagagtgatgcctagcaagtacaagaaaagtcctgatcgaaatgcccgtgtcccctcaaaagcaatacgccaccatctattgctagctagctaaaccagcaatatcatttgatttgtttcagtccatcagtaaatcgaagtgatgcatcagtagtacatccatgatccatatgcaatggattccctgtcctggtgaggcatcggatggcactactgctttttttcccctccagacggctggaatcacttttcccatgtgggtggagcaaccgcctgaaattagatatacgtacaaaccaggatttttatagacgggcgccacaaccgtttgtaaaaaccgatttttcctggtgagcacgttacgatgtccgaccgcaggaatctttagtaagaaataaaaagtctaaaaatatattccataaaccttagtttagatcgtgttgatggcaatatcgtctccgatctagccaccggatccacacctctggaggcnnnnnnnnnnnnnnnnnnnnnnnnnctgtcattgtctctgctctcagtgcccaccgacagcggatccgtccttcacaagactggcaccatcaacgccgccactactggggtcacaacgatcaatgttgccgctcgcatgcatatcggcagtggatccatcattccagaggctggcatcgttgtcgtcgctgcttctgaggttgttggccgccgttgacgaaaagaggaaagaggacccaagtggcgtcgactcactgcttaagagagggaaaaatgaatagaggaaagaggacccaagtggtgtcgactcaccgcttaggagagggaaaaatgaatagagtaaagaggaggagagaccgagggaagagactagggggaaagagcgggctcaatgcgccctttgattttaaagtggtcgtacgtcgttggtcgatgcgtctggttgtttagatcaactaaaaaaccaccacatgcgaaagttaggttattttcatagacagactgtttaaaagcatcttatgtgaaaatcaattttcacatgaaaatgttgatcaagtgtgttctccgtattttcaccaacaggttttacttaagccattttatatataaaaaaaggagggtgtttatgaaaatagtttattcatatatagttgcggctgatcaaaactcaatgcaataaaaccagcgtgccacgttactagttgtggtgtttgcatgatatatccaatataattaaccatccgttagatcgatgtttgttctgctcgcgcgggctctgagaaattctcgagtgcatgcatactgttcttcgtgaatgggcagtggcggtagcgggggcgagcatgtgatgtggagcgagagtagtggggtgtcgccggcgcgtggagtggcacgaacggccatgtgccccgggccggtgcaccccccaccacccctgacgtaccaaacgaactcctgcatgcctcacgaccgttgcatttgcatttgcctgtggctacccccagcttagctactctctcttcgtctcaaaataaatggacttttcactcatctcatacataccgataaaacactagattatcctttattttatcaagatacaatacaatctattttccaccttatctactaacaatacaattattctttactttctactttagagagtagctagcaccgtgttgtttctctgttctgcatctactagctagctagctagcctgggtctaatttaaggccctagctaagcccctatccaaagcattacttttctctctgcctgttactgttagggatcctaatcttatctcaccatcgtgattaataatcatcacacatacatactccttttattttagggaatagttattaattactccctccattccaaaatataaggcataaccacccctaacccaaagaccgagaaaataattattatcatattgtagtttggatcattctaataaatacaatgtatgcatccaataaaattagagaacatgaaagtggatgatttaaaaaagtaataatttaatggagaagagatcatagttaattacctacatgcatacatgctttagggcagtcccaactcatagtgtccataaatagtgtctatggtgccatgtcaataagacatcatgatagaaactacactccacaaaccatggtttcttaaagtgggccattaataaatacatcatctctcttctctaccaatcatatttattcttcatatattatgaagacactattatctcccaatgcaaaacttgatagtgtctagtgcataggttcttgtgttgaagctgtgtcttgcatgagacccagtttcttcctctcttcactctctctcttaattaatatagtgccatataagttaaaagtcctacatgacaatgtagttaatgccatagacaccatcctaggtggaagattgggactgcacttatattatagaatatctaaaagtggttgtgccttatattatagaacatcattaaaaaattggtagaatggagggagtagttagttaattaattagggcttcgttcatcgtcaagacctggggattaacatgaaaaagtttagcacaggaacaccgactgttacatcgaggacaatcagaagattggaagttccagtggcgcatcaagtggctctgaagaagagaacctctgatctcgacacacgatgccagctttttgccggtgatcgacgctgaccgatgataggatcccagtaagtaattcgtgctagtaataacgtgttctttagcagaaatgttttttttaaaaaaatcagggatgaatttagagaatctatagcaagactattcccgccatctcaaaatataaataatttttaaaatagtgacaagttaaatctttataactttaactgttaataataaaaataaaaataaaaaaagatcaatcatgtaaaattaatatcactagatttatcattaaacaaactatcataatatgcaaaactttttatttaaaatattttatttttatagatattgttggttcgaatactgtgtcgaaagtcttaaaaatatttatattgtgaaacgaacggagtggcagttatgatcaagcattaattatgaactgatcaacatgattgtcatccttttcatcacaagcaatgcgatatatacatgatgtggaagtgatagggaatggagaaagagcagaatacatacatgcacacacctcatgattcatgaatatatatacaataatgctccgtagcatggctcacacccacagataatccatagaagtagcatgactcccaattaagctaacccccctaattattgtattaacctgtctagaaacacgttcctgttgcatgtgcccgattcctcccccggcctacacacacaccgatcgatcgatcagtctcactggccgtagcatacattgcacgatccaagaaacggcaatgtagaggcatgcatgcatgcattcagaatgagatcgaaaactacctgcaactagcccagccccagccaacaagtttgcacactggcaaatgccaactcaataaaagtactcccctttacttcctctgtcccacagaaaccaacctaatactgaatattgacatattctagtattataaatttagacagaccttaacatccagtattagattaagttttttttgggatgaaggaagtaaaatataagtatttttaggttggtaagagtattaaaaaggcatataggaatattggagaaaatatatgattggttgaaaagagaaaacagttaaagatgaatgattattattggctgagagtaggagataaatgaaaaaaaaacctaactttaaaacaaactactgtgatataaattaatagctattgccgtgtttagttgttttggtaaaaaaaatttgacatatacagacacacatttgaagtattaaacgtagactaataacaaaacaaattacagattccgcctgaaattgcgagacgaatctattaagtctaattaatccgttattagcatatatttactgtagcaccacattgtcaaatcatggcgtaattaggctcaaaagattcgtctcgcaatttacatgctaactgtgcaattgctttttttttcattcacatttaatgctccatgcatgtgttcaaatatttaatgtgacggaaaagttggaagtttgaaggaaactaaggccttgtttagattctaacttttccgtcacatcgaactttactatacacaaactttcaatttttccgtcacatcgttttaatttcttcaaacttctaattttagcgtggaactaaacacaaccataatattagtactgtatactactatgtacagtacacagaccctgaccagctagctgctggggagctgtgcctttggatcagctgaaaattgctgcatttctctgcagctgccgctagctgacgccgccgtcatataagcttggtttcccagtgaggttttacactgctctctgacgacggatggatgcatgcatgcacgcacgcactgcagatgtggtgtccgagtagcacggtgcagcgacgtcagatgcacgtcgcaatgtcgtcgtctacgggaggcagcagggaggcatggaaacgagcccatgcccctcccgagtacgcacaggatcgtactatacgtacagtactactgtgttggattttttttccccattcagtgcatgcatatgcactccaatttattgtatttttttttacggattgaccttttggatactgaggtgtggtggtacggtacggtggaaacaatgcagattttgttagcagtagagctaataaccagctgagatgtgacttttgagatctatgcacgcgacatggcttcattttatattgatgtgcgtatatagatgtcagaatgttcatatcagattaatgtagggatggtgaaaataagccccttgtttagatccaaactttttcttcaaaatttcaatttttccatcacatcgaaactttcctacacacataaatttctaacttttctatcacatcgttccaatttcaaccaaacttctaattttaacgtgagctaaacacactcagcgtacgccttgacgaatgacgacgcagcgtacgcatcagattgagacggtccaggccgtgacggcaaaattcagcttcaggcttctgcactggtagcttggctagcaccagaaaattaagtagagcaaaagtgtgaaggtagctagcaagcggagtgaagaggaataatggtcatattgaggagagtaaagttacgtggaaatgttgtttaagattaagatttttatgtggtatttattttaaaaggtagtactataactaaggataatttggctagaagaaattagaagggcatgagtttgagattcttttttttgcatgaaaagtaagacgatacattatttattttttaattgccactttgctaattttttctaaaaatcggtacagttctcttttggtctatatcctcctagtagtatatcatatatatttgagaattgacttgtgggtattgatataaaaacaatgaaactaatccttgtagaaacatctgctatatgttgggtttttctaaattagtagaaatgatatggtctttgataaatccccatctaaatcttatgtataggtactttttatggcaacgtaaaggcttcggtttctgagcacaattacaaatacatgacgagaacaacaaactcatgcgtactgcatgccttaagctagagagacaacggatatatagatttttgtcaacaatgttgattcttcgttgagtgttggtggttgacattagtctatgtttcacttccttctttttttttgctctttgtaagtaatattttgtgcttttttttattattgaacggatatttgtaacgagtggttgtagtttcttcgaagcaaagactgaaatatatttcattacctaaaaaaaaggctagcggagtggaggaagcaagctagcatggccgacctgcctgcctgccaatactacacccccaaatgcccggcagacgacgcgcacgcactggcgtggcctggcgcccatgccatgcacatacagggccgcacttgcacacacacacagtcacactcgcagcattattcctagccttcgatcgatcgatcgatatatgtcgagataatctatatctgatagagcgatagagatgacacgatcacgcgacgagtcgacgagcgctagctaacaaaacgaattataaacgtacacgatatatacacgtgtgtggggacgatacggcggcgaacgaacgaacgaacgcatggggcgcacgcacgcgcgatatggctgtaggggagcaatgccgtgcagccggccggccgcctcaactcaatttccacgcccgtgctgtcgccgtcggcgcccacgctcgcgctgcttcaattccatcgcgatgtgattttccgtcgtctgtacgtacgtcgcgctttgccttctctccaccgcgcgcggcggcgcgattatggttgccagctactttctctattttacaatgtaagactttctaacattgtccacatttatatagatgctaatgaatctaggcacacacacatatatatatatatattcattaacttctaaataaatatgagcaatgctggaaagtcttacaatctgaaacggagggagtagcatgtttaggggtgaatctagcgtgggtgatggaaaactcgggtccccctacgacttcactagatcaccatcgatagaaagagagagagagggggggggtaaataagggagagtacgtaagatgagaagggggactggacgaggaagaaggagataagttccatatattgttttttagatccatcacggaatatgttgatgtatgcgtactgttacactgcagtaagttgtggtggtcaatatatattaagaggagaggaaatacatgtaccatcactaaaataaagtgaagagagtgaaacatcctctttactcgcatgaatggacgagatggacgatatattgtgtgtaatactattcacttgtgcttgtgtcttgtttatatgtcttttggagatttgcttacgagtggtatattttaacgccattttagggcgaatcttgtagccgacagatagctagtgccatcaacctggatttatcatgttcctgatgatggaacagcaccggaaaggttaagttgctacatgagttaggaggtaattaaactaagttgttgccgacacacacctctcacacgcttagatggccatatatatgtttttagagaaaatgaaaacctaagctaaatatgaacatatcatattatcttatagcaatttactcaaaaacaatcgagacaagaatataaagtccctaacatctactccaaaacaactccttcaagaaaaaacgcaacatttatctatcattgccatcagaaacatgagatttttatctgaagcccgagaagacacatgcgaaggaaatacaaataaacgtcgatattactgaatccaggtaaactagagattagatttttcaccctggagtcatctccattactccgtgccaccatctagattaaatgagcacaatctgcgatgtgtagccaccaaagacaaagtgctaagcttcctctattcacaatcaccagcgaatggatgaatccattgtcgagacggattcatagaaatagtaaaataaaaactatcaacgaatatatccaagtgtgtcccacttgatatcttcatgatcagaatggaactcgttagctcagctgcacggaaagacaccaccaaacccttcattagctaggccaaatctcccttcctagatctcaatctaataaaacttgctttcggtagatcgatctataaacccatctgaaatatttcgatcgagaaataggaatgcacatcacattgtcgcattggctggattttcaccttttaaaaaacttattctacaaatagatccctaaaaaaaacttattctaggaatgaacccttttcgcggcgccaacgttattgacgtcaataacgttggcgccgtccccctcatccccaggtgaaaactaagtcactaatatctcgttggcgccaaggacctttttgtaaaaaaaataaaaatgacatatttgtagcagaaaaggacctatttgtaataaaacactagtgccaatgacctatttgtaaatatattattattataaatagatcctatattttaaagaaatacaaattaaataggtacttggcgccaataatgttaacgccgtttcccttcacattagtgacttagcttccatcgggagctagaagaacgtcgccgacatcattgacgccatcccatcatgttggacctaactttggcgtgttgagcaaaaacaagtcgctacaccacaccacacaggatccaacacggcaacgtacatccatccatccattcatccatgcatccgtcgcgcgcgtccgtgataccgcgcagctgctcatacgccccacatgtgtggccggttgggcgcgcgcatgcgtgcggtgtgccttgccgaaggggatcgatagatggccataattttgacaaattgacccttccaaaaaacttattttaaaaataaaccgtgccaaaaactaatttcaggaatagaccgtggcctcagcgccagcccacggttttaacactgatatcagcgccaacccatttggcgctaagctcgtgtcatggtggacaaaaatctcagcgccaacgccggtggcgctgggacgttttagctcacattagataaacaagtgaagctagcctggtggtagtatcgacaagtttgaacttgaaggtcacgggttcaaacctcgttagtgtagtatttcttttcagtttttcttttacttatcctccacgaattattgtcctattaatttcttttccaaagaattataaatataaaattttaaacttgaatcgtataattttggttcttatattcgttccctctaagtctaaaaataaaatgaagttgtaaaaggcacgtgaacattcaaaagaacacataaaaagagcaagttgagaaaaacaataattaaaatgaagaggacaggaatcaaactcccgtgccttggattgctactacgcaacaccaccactgagctatctacgcttccttgcttttgaagcacctatgcgattttatggtatacagaggtcagcgctgtggagtgtggcgctgagctctccatacaagacgagtttgtaccacggcagatgaaatctcagcaccaactgcagtggcgctgatacgctttagctcagcgtcaatgacaggccacggcctattcctgaaattagtttttggtacggtttatttttaaaataagttttttgaaagggtcaatttatcaaaattacgggatagatggagctcgagcgggagcgcgcccccgcccacgtgtgacagtgtgtcgatgacgacggatgagccgaggcgcatgcatggtggccggccatcagttcgccaccggacgacgtacgaggatggattctcatgtgggagtggaaccccggcccgctgctcgcctgcttccctgcatgctgtcccggtgcgtgaggtgccgcacgtgcgtacgcagtacacggtagctagcgccatgctcgtggatcaacgtgatagtagtcgtaaccagggccctgcaggaaaggaagctgctcatctctctcgtagaggccgatcgagctactgagcaccgcgcgcgtcgtgggtatttttgccgtgacaggtcgatcagccactggcagctagttatggcctcctgtagatggtggttggaccgtggtgtggatatcggtcagacacatttgggtgtgtattcataaattatccgtttgttggtggcttcgactcaacaaccatacatctttagattaggaaacggttctgaactgttgagagggatatcctcttgttttttaattattgaaatagttataattttttttagaaaatatttaataagatagattactccataaacatataaggttaatttaacttctacaagctgaaaagaaaaaaaatagtcgaccaactatagtttgatttgtttattcaactaataaaatttaatattaacccgcatgtttgcggattgatacatatatagcatattaaccattttcttgattttctttaaaaagtttcataacactatttgaatgacatgcaaacaacaataggatgttctctcaagagtttaaagtccacttccctctagattgagggactgcttatgtaacatttgcgaggaaatccatttcatcttattcacttttgaactacccataccggtttgagattagtgctgctacgataacttcaccttatccatctccccaacgccgcgtcctccagattgagtagatcgatgtcaatgtcgccgcctcccctactcagcaaggtcccccgcccccatcatcttcactgtctccagtagatccggcctgtagctaaagatatcgccactgactccgtttcctccaacctcgtggttctagcagcgatggcaccaccacaatgtcttcttgtgtttgcacgcccacgattatccctctaagcccaagtggacttcattcccctactctttgcccaaattttgatcccaaacctagtaattcgtagctcatctgtcagagttgggatgctgctgccgtcgaagaagaggaggaacttacgagagctggaggagatgggactcatacatgaatcttagcgcagatatatagcggtgaagaaatctctttaaattttctgttggatgccgtttaacaaatctattagctatctatactctcatgtatgtcagtgtagacacgcttaggcaaccaacaaactagccatcccgaccgttcgaattgaaccacacgtatgcgcacaaaaaaattaacggagagctcgatgtgtggggccgcctcagagcaaggttaatagtagagctcgctattggctacaaaaataacacatcatcctgttatagctagtttcaaaagctaataaataaagtaatgagctctatagttatctctacctatttctcatgtacaacttttattttttaaaaaaatcttaagtagtaccatttgattggctgctcacaaaggatgtacaaagtcacacacatgcagggaaaaaagctaggcctgcagcatgggtagccagcgcctctctcctttcactctctctctctctctcttccaactagataaaaatttactatatgaaacactatagcctactgatgtggacttattgtagctgctctcaccggccggccggaacgcacgcacgtagacatcgacgtacgtgcccgacgacgacggtcatctcgacgggcggccggccagccggcgcttgtctcgcctagctacaaaagcagctacaccacacgcgatccaacacccattaatccattgcgaatcgcgcgtgatcccgtacgcgcgcggccgatggatcgatcgatcagacgatcacactgcacacacgcgcgcagagccgtggcccgtttggctctcccatcccatgtgtgtttagttcacgttaaaattgaaagtttggttgaaactagaacgatgtgatagaaaaattgaaagtttacgtgtgtgaaaaaattatttttaatgtgatggaaaagttgaaagtttaaagaaaaagtttgaaactaaactcggccgttgtgcggtggtggagggaacccacgctgcttcccgccgtacgtacgcgtcgcagcaatggaccaaataccagcaagctgagacgacgctggtcctactgatccatcctaatgcagtagttgtagtgatggccactcgcttttctttggtagctgcatcctactactgcttacacagtacagtagttacaacttaaccggggccccgtgaacgggacctgctccctccatcgatctcgcagcaatccgaccggtccctccccactgcacgcacgaacggcatgggtattcaacagctaattatctaggcaccgacgctctctctcacaactcacaactcacaagtcacaaccatatgacccagcgacgacgataataacatatgacaccgatggctactgacaaactcatagaattcgttcaccgatcgatcgaccgatgcttagctagccaccagccaccgcacccgggcccaagccgaatccaaccatctgcaccattcgtttcaaaataaaccaactcctaactacggatcagtctatgttcgttgataggattgatcttttttttttggacggaaagcaatagctcttgcaacgtgcgtgtgcgtgggcgtggcggacaaacagtggccgtgccgtgcgtgtccctgttgggtctcaaccgaacaacagtggagcgaaccgtggcatccggagacactcggacgacatgagcagtttcacttgtccccctccctcttccctttgctcgattatatccggctgttcagacttcacacccatcagagcactgcactgcaatgcatatgcgacccagaattagtgcctacttggactattgtaccgctgtcttaagactattcccagctgctaatacgcgtaccgaactaactggtacttagtacttggcttaagatagaattaatttgggctgtaccctgtacgtactttgcattagtacatagtactaggctactagctatagctaattagctacttgttcgtaatcaaacatggtgcagaaataacagtggaaccatgtggccagtggatgtatatcgatcatacatgcaatccactgatcctgtgtcgatcagacgatcgaagcgtctcttacttgttctcttcttttgttcggttccctggaggctggagataggatccatatcacacaaaggtcccattcattctccaataagagttggacgaagataaagatttttgtggcacacttttcaaactgctaaacggtgcgtttcgtgcgaaaactttatatatgaaagttgcgctaaaatatcatattaatctatttttcaagttcgtaataattaaaactcaatcaatcatatgttaataccgtctcattttgcgtaaagaacttcatcttcattttcgggagaaaaaaaataccaccaaagtgccactcgaatcacatcaaacgctgcatgcagagttgataaaccagacaatttttcttttgaattcgctcgatcgagatatatatcgccgtatcgatcgaggaatgtacagactggtgtgtcgatgaggagcagggatcgctggtacgcaatctttcctgtcgcctaaccgacatgagaggagggatccatcgatcgatcgatcgatctcatcacccgttgattaactcctcgtcgccaaggttcctgacagatcgaagatccggattacgcttttgtcgatcgatcgattcgagtgttcggtatagacgagagagaaatcgatcgctctgcacatgcatgatggttggtcggtattagtctgatgaactctgacgaagcaagttgatggcagacatggacgggactgaacggctcatatcgaaaagcagatgacatgtatctgctactagtactacactgctggtaatattcctcgggagcaattgggttttgatctggtaaactgaagatcatgttggttgtgatcgagcgataatggtttgccaatggcatacttaaccaggggaatgtgatcagttttcattgtcttgtttgatttgatgagatggggggatggaggtgacgacatatgatgagcaggtgaaggtacaaaactttatggccccttttgaattggaggaaaaatgttcaaaaaaaaaagaggaattgaaatcctacactattcatgtctttaattatttatgtctttaattcgtataggaaagaaaactttcttatttctacgattctagttgaaaaatgtatgaaatttaacatccactctaagtctctaatctcttgaaaattttctttgaatttatctctcttatttgattcctgcgttttttctactgtccaatcaaatggttattcctgtgttttgcaatcatctgttttacacttgcactattatcagaatcaagtgttttccctatttctctttttttttaatcatgcaattcaaaggggcctatatcttgctctcttttttatactaaacttttatcaggggacactgactgaaagtgattagaactggacaagctttcctggatggattagaaagacccttgtttttcatgtgacgtgaatcgaccatggtaaatatggtatccctagaacaaactgagctagcaccgtatgattctcgtctgatttcgatcttgcttgagcataaacggatttcactatatgggtacatgcgcacacactttagtttacacaatttagcttagtactcatttggtttaaaggatttctaaaagattattgtactaattaaaaccataggattttttttatatatacattattcgtttcaaaattcttaagaatcatagtcctataaccttatcgtatatgattcttagtatgagatagacattttagaaaaaaaatcctaggaattggattacatgtgacatcttaatttttctatttttcatattcttatgatttagaaattcttcgaaccaaataagccttacccctccataaaagaaaatcctaactacgaatctaaatatatatgtgctcaggttcataactagaattgtcttttttttgtttttttaacagactagtatggccgttgcaagttgcaacagtgagtttttttctcgggcttccttccagcgtagcgcaattagagggtgggcataatattcagcccatgaagtaatttcgcggcccataatttggcgaacgtttactttagctgttgggcctctgccacgcggcgccgcctcgccgtacgccgccgccgccgccgccgcgaaggcaccggctcggaggcgctgcgggcgccggcggcgaggcggccctctccggacggcctccgccgctcccaaacagcgacggtggtaccgccgcccggggagacggcaggcgccttcgacccgacgcgcgctcccgtctcgccggcggcgggatggcctccaccgccggcgccgggaggccgccgtgggacccgaccgtatcgctccggctgggccacccggcgctcgtcctcctcgagcggtgcggcggcggggcgcggccgttcaaggccatcctcgcccacatgctccgcctccgcctcgccttcgagaccttccccatgagcaggctcctccacttcgccaccgtctccttcccgcaccacgcgcgcgccgccgagaccctcttcgagcacttcacccctcgccccaacctctacatctacaacctcatgctctcttcggccgcggcggcggcggcggcggcctcctcctcgcctagtcgtcggccggctgctctctacatgtcgatgctggcgtcatccattcaccccgatgagcaaaccttcctgtcgctgctcaagtcggtggatgcggagcgccgctccgtcgggaagcaggtgcacgcgcacgtggtggtgactggcctgcattcgcgcgtgtacctccggaactcgctgatcaagatgtacctcgacgccggcgatgtggaggcggcggaggcgatgttccggtgtgcgccgacggcggacgcggtgtcctgcaacatcatgctgtccgggtacgtcaagggaggatgcagcgggaaggcgctgcggtttttccgcggcatggcgtcgagggggatcggtgttgatcagtacacggctgttgctctcctcgcttgctgcgggcggctgaagaaggcagttcttggtaggtccgtccatggcgtcgtcgtgcggaggatcggtgtcgcggataggggattgatcttgagcaatgctctcttggatatgtatgccaaatgcggggaaatgaacacggccatgagagtctttgatgaagctggtgagagggatggcatttcgtggaacactatggttgccggattcgctaatgctggcttgttggaccttgctagcaaatatttcggtgaggcgcctgccagggatataatatcctggaatgcgcttctggctggatatgctcgatatgaagaattctctgcaacaatgatactatttcatgatatgcttgctagtagtgtaatacctgataaggtgactgctgttactttgatctctgcggttgccggcaaggggactttaaattcagcaaggagtgtccatggttgggtggttaaggagcatggtactcaagattctttcttagcatccgctcttgttgatatgtattgcaaatgtggaagtatcaagctagcgtatgccgtatttgagaaggccgtggacaaagatgttaccttatggacagctatgatatctggccttgcattccatggccatggagatgtagcattggatcttttttggaagatgcaagctgagggtacagaacctaatggggtaactttggttgctgttctcagtgcttgtagtcatgctggcctgtttgatgaagggtgcaagatttttgataccttgaagcaaaggttcaacattgaaccaggagtagaacactttggctgtatggttgatctccttgcacgatcaggtaggctgtctgatgcagtagatttggccaggaggatgccaatgaagccaagtcggtctatatggggttccattttaagtgcgagttcagcttgtcagaatactgaagtagcagagattgcttcaaaggaactcctctgtcttgaacccgcagaggagggtggatatgttttgctttccaacatgtatgctgctgaaggtcagtggaactacagcaatgaagtaagggagaatatggaaaggaaaggagtgagaaaatcagcaggtgctagtacttttggcagctgattctgttgcttcatatgctaggtaggagtatgtttcaattgtgtaggcagtactaattttcaattgcacacttctttctcccaataaacacatttactggtgcacatgtcatttactcatcctcttctaacctggaagaatgcagttttcaatctggggaataaagtattattcataaaccactagctataagttattggtgaaaactttgatgctaaaacagtatctgggcttacccgctccctttaattgatttcttctaattctttattcacacaacatattctgaatacatattgatttttctcttcttccagcatgcaggaattgaagcagacatttttattcataaaagatcaaatttcagggcatgatctagattcattaagaacaattttgcacttctccagtaaaaaaaaaatcctgcacttctatgtaagctatacctctagtcataaattctgtatgcactagagattgcttctacaattatcgctggttattatttttttataagtgagtcatcgctaattatttgagtgaagcctgcaatgtttgcactagcatttaagtgtttactgatcaaaagaaacttgatatcaaaatctaccagatctatgagataatcccataatcccattgagtcttttgatttcaaatgttattatgattctaccagacactgagactgcaaagtacaaaggtaaaagtatggaagaaattccacacaatgtttaacacgaatataatgtatagccatgatatccaagctttctctgataaaatctcttaactctttgaactgtagctagccaattggcccagaataaattcgataggaagccccatatctttgttagatgctgatcaagtacggcaacaaagaaagtatactcgtaaaccttattttgagaaactgcaaacggaattttctaaatgcccgaaggttcggaactggaaacaaaatcttgtagatgcctgagggggttgtcttaagtgggaatcttcctcagcagtgcaaaattgaagataccgaactagaagattcaggaattttctcttcttgcatagtaaaataaactaatgatgtttttactacaaacaaaccttgcaacttatgtaacgtgtaaatgcatcttttggcaggtgcagtttcatgaacgttgacaagattgggggtgattgggtgacaatggccggcaacaataccacattcttatcaagctacaatcagcaagattactagtcccagtgcagcaatggataatgtgctggtaactgtccatcaggtttcaggtagtgtttatttgttccagtatttttttttcagaacaagaattccatacaagcaaatttattccagctctcatagatgattttttttcctgctgctattttattatatttaagcagaattgtcaatggtcaccaatttcccctatttttcatcaccacctgagcatattaaatgcatttctgctctcaccatctgtaagtatagtttcaccattcgctaatattatgaataacaatatttaattgttacctcatttcctccttgagccatgccatcccttctcgttcaccacgcttcaccatatggcatatgaaaggagtgcctgcacggctgcaccccatagtcaatggtttccccgattcaagcatttacacacaatccttgtttcggattatccatttttaaccacaggtccactgcaccaactgtgcacattcttgtgccatgacaactagtgcacactcatccccagccttgctgagctcacacatgtacagtaggcaccacaaacatcaatgccagattattaacagtgcatgtaagctgcattttgagggtggaattacttcacagtatgctgttgcttgggtggggtagctgatttatgttccaacatgttcctctgtctgttgcaggtatcatcatgctggcatcgcctcttgggaaatgcatccgtgcagttgaaaaaacggatgtcctgctgaattttcattctttgcataccactccctccatcctcgacaaatacaagcactcctgaaagttttaagataaattatggttgggataaaaatattttcatgcctccggttgaatccctcaaccatcacctgattgtttgggatggggagtaggtgaggaaattgaacgaggggtagctggacaaatttcaaacgctataattgctttatatttgtagaggaggattctctcagggccctgattggacaaaaccaagagttctagaaattgacagtacttcaaaggtgccaacttccaaggttaggagaaactgctttactgctgaaagcctgaaacatgtgcgccgggagcccctggaagtattgccatgccaatgcaaaacaatagaagttctgttcacctatattgatgaggacggggctgcgattaactgctacccgtataattgtacgagcttggtatgaatacgatgggtccactcagtgtatgtacacatagcccttgctcgaggagtttcaggaaactgcaacttttcaaatattctatacttttatacaagttacagaatttagaaaataaattgaaagtgaaaggttagaaaatgtatctttcctatattctcgtcggctatttttttttcgcgaacacgcaaaaggattgcacgtcaatatattagattctcgtcagctaatcaccgtaagtttctcatgtatcttgtgtttccaccagtagttctagcgcttcacacatggattattttggacatacgccccatttgaatttgatgaaaataaagattaattatagacatgtaaaacgagaaagttatctatcctatagttgtaacaaatggtttcactcattcactcgttctttcattcctcatggaacggtccagatcatctgtgtgtaaaatcgaacggtctagatcgatcccccgcctcccacctccatcaatcgcgtgattgcgtgggccccactctgattcgccgcccccaacctgcgcgcaaccctctcacttctctctcgcacacggacgccgccgccgccaccatgccgctgcccccaaaaaccggacgccgccacgccaaccactacgctgcctcacgccaatcgcgatctcctccccatcccgtcgctcccacctcccccctcgcgtgatctcctcatccgtgatttcgcgatttcccctcactcccatctctttgcaggatcgctcccctctctcccatcgcgcctcagcccttctgccaccgccgatggtccaacgcctcttcctcagccgctccccctcaacagcagccacacccagccacccacgatccacgccgacgccgccgtcgccgcagtcctcatccgctccgcacgttctcctacgctggtcgggatctccgtccccgtcgccataccctgcacatgagtcaccgaggtccgtgccgccaagacaccatcgcgccaaccctacatccgccatccccgtcgctgtcggccgtctcctctacgcccgtcccaccacgtagaccgcctccttgcctgcatcgtacacttgaaggtctccatccccgatctcctaaattcctatccctaactctttgaattttaacggagaagcccagacttcctggtcctttctttttttttttatctccattccttgactccaatcccccttctctgattttttttctttgttatttgcgtgtgtgtgcaggacagcgggagcgagaacgtcacaatggtagagagcaccttgcagattggatggatcgatggtaatgcctcgtcaaataattagtacatctttattcacagcaaaatccaaatctatattccggttcctcccctcccaaacgcgaatgcactgaaatccccatctctttataggttacactatcatgagcaggcattttaacgataatgtacattttctaccgttgtgttgaatagtattgccttcagcagttacgatccaatccagatataagttagttttaggtccttcagtatttaagatttgatattggttgtggtctttttattactgtgatatgagtttagataattttatttgtcagagaagaaacttgctgtgaggtggaaactcaaattttacgcatatgttttcttggatcttcttctttaattgtatagcagttggtagagcataagcatgaacagtctgaacatttcaggcctgattgtttagttctattttttttattttttttcattggatcaacgtggcgagcttcatcattagggagcggctccgttctactatgaatcatcctaatattaaattatcaatggctattatgcatctgttcaaagttactgaaatagagataaaatagtgaatacaaatgaatatgtacttgctgtttaattttcctccctcccactatagaatacatcagtgagataattgaaattaaattattatgtgcgtttatgacacaaaaagttattatctgcatgtgtttctcattcgattcctgcctccaaattgactcacactgtcgccgccgctgccacacaaagcgccgactcggccgtagctccgtcgctgattcactgccgctaggttgcgtccatcatctacccgattcaccggcggtctacctgatcagtgtcatcggccctctctgcctggtacatggagatccttttctcttatttcatttgctctttcctcttcttgatttttcctcgattggtccaaaatttaataagcaatggcaattcatttacttgcggattgacagtgccatgtttctgatgtgtgtgcacatatcccactaaattatcaatgatgacgtcatgttttaaacaatttgattagcatctgcaactttttatataatgcaaatgatttaatttctcttatgatcaggatgtttatgtctgtaattcagatgaagcgctttaattagtagcgtgcatatacaaccttcaagtattatatcgttcaactgctgcaacaatggaattaatccaactttcagagtggcttctggtacttttaggttatatccaagttctgctttgtgcagtgataattttttcccttgaaaatgtaacatgacaatgagatggtatgatgtcatgatgatgggattcgttctttccttgagctaattccagccacataaaatttacatgagctaaactatgtactttctgaaaattccataatgcttttgtctatttgtttaaagaaatatccagggtgggtctattatccgtgtggcagtggattcaatgagttacgtcataatattgcttttcaaataatgacacctgaatatgtaaaatgtgctgcattggttatgtgcaagcactgatgtattgcctaaactgattttattgactactatacattgttatgttactctattgagaagatggttctataggtgccatcactctcatccggcctctcagccgctgccgcattccctgattcctgtcgcggtatcgagcaaagcctcatcgccgtccagtcagggacgcagcctcatcgtggccaacctccccttccattggaagcgccgttgccggttcaaactcattcgtcaggttacataggccggctccaatcaggtacaatatacatgctccaaagaaataaatgtctttgatattgtccaattgattgacacatgtatatttacaaataaaatttattgtgtactatatcagtgaaatgtatatttagacccttgtatatttggagtacatgcacccgtgattgatggcgtgcatgtgtgatatgtttccttggattcaaatccaatgtgttctttattatagtcaattatgctaggaggatttgatctgtcagtaagcggattcgtggctatagttccacatgtcaaatactaaaatatatatggcacttaactgcaagagatcaggccaataaactgaaaataatctatgcgtcttatcttatgaaaatagtttatgtccacttccttgtatccgacgttaacagttttgcatgaatcaggaaaaatctgctctgctgttgactacttcactccagttattcaagctatcaaagttactctagagatactccggttactcaattgtatacatctctgtttcacacatgatctatttctgcatgtgtgtcacatttactctaaaaagatgctgtcaaattttaaaagaacactgctttactaaattgtggtgtatgtagcgttagcatgccacccatatggcaaataactgaagagtgatgtatttgagttaacccttttatacgagcctaacctacggtactttcatagccatggatttaaatagattgttcatgtagttcctaatttcatttttgtttcaactaggctggtcctactacatttgcatgtggtagagggcaaggaggaagatattataaagtagaccaatgaatctattgtgatcgggagttttgcaacatttcattgggagtttatttatatattgttttatgctctggatttttggattcaagcccaaccaattccaaggggtataaacagaatgccttgagggaacagaaagaatcaccttgcctgtgcctaattgctccaaagtaaaaggtaagcacatatggaatgattaattcttgttttcaagaaagtttcaccatctaaattaggaatgaatagctctcatagcattaggtatatttctagggacctgaaacaatacactgttgtgtggatgtaatatgcccgcttgtcaatgtttgtagctgtatttgagacgttttactttagaatatcttgataagaagtattgcgtgcataacttatgccatatagcaccctaattttattagtgcaatcagaggataaattattaagaggacatgggtaagtgattccacactaattaacatagtggtattgtataataataaccagtgttgatgcagaactgcttaacagtaccaattgtggtatacatggttttgaaatctgcattaaaatagcagcggaccagcggttacacctattgagttttacaaataaaaatgacagacctagctacagtgtacatctactgtaaactaaaatgcaatcttgaaaataaaatcatgtttactttcaagccagggcagatgtattgaaattcattttttaagcttcataaaagtattgcccctcaaagggtggcaaatacactctgtatacagaactaactaactggagtcattgcctcacatctttttggagacagttgaaccaacttaggagcaatttaagtaaacaatattcattcaaactcattttattttctgaatctatgaccaaaataaacttacacagtccacaataattggattgtcacatgctatagctaacatattcaggggagtgtacatcttattagacaaagggtctatgggaacactattcgttacatggtacagtcgacacgtaatataaaagttgtgatgtaatgaccttatgatactaatgaaaaacagacacatactttaatgaaaaaatcatgggcaagtataataattaatagcaacaaatgcatcagtccataaaattcctcaatttctcatctctcccgcagtgtgtcggaattagttttgcttatagattgtagtgttggttatgggacctggcaataaaatatcgtgtataaagacgttctcgactggtgagcaaaggtaggttctcatgattaaaattaattcgaaaacataatctagaagatagtaaattgatgatccgaatgttactcaccaatgtccacttactttgtacaacacgacatcaccattcagttggaatatcgtgtaattatgttctccataccataccatgatacatgcttcagtttacaccaggctgataacatgactatacgttaacacgtctttctgaacatatacttttgccatcaataaatttcagtacagatatctttttagtattcgggtcatgaaagaagatgttagcgagatgacaaccacttgttatcttgttatacatggtaaaactattaattttatatctacttcttattaaactgttatttgggtttatattcacgccatcatgctatgtgatcaaagggtagcggtcggcgtgtgtcttatgtgacgaatagaaaaatcaagattttaaaagttattaaagagaaatagaattgtaccgtagcgtttagcacgggcatattactagttagatacgattaattaagtttcagttattccaaacttgagaaaaatagttttatctgatattttaaaataatttttatacagaaagttttcgcacaaaatatatcgtttagcattttgaaaactaagctaacgaaaactgaggcaaatctacatcttaatcataaaagaacatgtgtaaggccctgtttagattttctggcaaattttttcatcctatcacatcgaatgtttgaacatatgtatggagtattaaatataaacgaaaaaaataactaataagacatattgcgtgtaaattgcgagacgaatcttttaagtctaattgctccagatctgacaatgtggtgctacagtaaacatttgctaatgacggattaattaggcttataaatttgtcttgcagtttacatgcggattatgtaatttgtttttgttacatgcggtgttacagacatattatgtaatttgttttgttattagtctacgtttaatacttaaaatatgtatccgtatatttgatgtgacacgtcaaaactttacacccatgaatctaaacacagcctaagataacaatttgatcatacgaatagagtaattttgtacgaatttgtactacaaggtgaaaatataaaagacaaaagaaaagcgtggcggcgtgccatccaaaaagcatttggccatttgcaccaccacaccagtcacaccggcacaactcgactggagtccttcaagttacaggtcaacgacccctctggcaagggcagtttggtaactgcaccccaaaacgcacgacatcccggcatcccgccaccgctccaccttcccaaaaataccctcaccgagatgcccctccgtctcccgtctcagctgctgatttctcccacccatccgcgtaattatccgcagcgtcgagggcatatatggaaaccggcacgccatttcgaaatatttcgccaagtggcgcacggctggtagtttcccacataccaccctaccctattccccaaatcccccaaagactccctatacacagagtctctctctccccaacgccccccattatatgtaataataatatcattattatttgaggggttaagtgaaaagcgcactttttcctatatcatccctagctagccctttcgtgggagtaaagaaaggaagagaagaggaaaaaaaaaatctcgctttcgtccgcgtcgcgtcagggggtaggagaggaggaagccgaggctccgcgagctcgcgaaaggtaagggtttccgccttatccgaatcccgaatccgcccccaaattcctccgcttcccgcgcggatttcgccgccgggcggcgagatccgcacgattcgcgccccgatctgctctgacccggcgctcgcctcgccggattcggcccccgttttgcagggtttccgccgccggggtcgcgcgggcgttcgagcggagcggaaggggaggagacaggagagggagagggagagggagagagagcgatggcgggaaaaggaggtaagggcttgctcgccgcgaagacgacggccgccaagtcggcggagaaggacaaggggaagaaggcccccgtctcccgctcgtcccgcgctggtctccaggtgatctctcgtcttcctctgctttcgctttgttcgcttcgtgggggagcgatggataggtcaggtttagacacgtttgtatcgagaggttgcttcttctgccagtatgtgtgtttagtttagttttgatatacatgcattgattagatttgtgtaggtatggcgcgtgttgttagtattttgtagaaggttttgcacgctagcgaggttgggttttagatgtttggaaactcgtcgtgttcggaggaggttttggtagatctatggaagcatttggtctatctggttgtgttatgttgattggtttatacgatttagtttgtttggtcaggcggtgttagcacaatgaagattggctgattttgctgtggagatatgctttagaattcgtgatgctaacatgctaacattacagaagaggatgattgcaggacatcgtttgtttgtattgcctaaacgatctagagtgtactgatactttgtttcaataagaattgaagctgggggattctctttcttttttaataaagaggagagaacaatatacgtttggagattttagttaaatgagagaacaatatacgtttggagattttagtttatgtgatgatacattttatttttttgctattctggtcgtgatggatggttggaaaatggaaactagatgcatgtggccatagtgtggacaatttgaggtggctgttgaggtagcaaacaagattagtgcaatttacacatttactccctctatcccagaaaaaaacaattcctagctttgcatttggataaacaattgttcagatttaaagttaggaattgttttttttctaggacagagggagtagatgtgtaatttgtgcatctaggaaggtggtagtatgccagtggcaccaactgtggtggtttcagctaccatggaagccaaccatgataggactctggtaggcaggggcaaatctatgtcgggctacacaccactggcagaggatactgggtttgattttgctttttagtttttcctctgggtctgccactgcggtatgttgcatgtgtgtgcctttcaaagtagtttttcttgttgattcttttttcctgaggggatggggatacaatgacaatcaagcacctgacttattacctcttgatagataagataaacatgcacctgatttatacacattattttttttcgtgcaaactatttccagcatctagaacgttatgttgctttgttatattgttgtcacttgtcag

SEQ ID NO: 5845 - DNA, 50171 bp, Oryza sativa
  unsure (1)..(50171): unsure at all n locations
tcgatcgacggcgacggctcgtcgacctcgaactgcagcgtgacgcacggctgctgctcgtcgtggcccatgatctgggccttcagctcctcgttcctcctctgcagctggtccctcgcgaccttcagctcgtggatgtagatcgccgccgactgcacgatcgagttcttgtccccctgcagtgacacgaacggttttttgtcagcccgattttggtaaacactccatttaagaggtattaaagggggatttcgaacattctgaagctgaacagaattggtttgagctgaagatgctctgaatttcagattaacattggggaaatcaagaagaggcaaattgaagccaatgaaatgggacaatgcgatggtaaacgaaaatctgagcttaaagaaggccaaattagcagtctacattaggcatttctcgatggaatctaggtgaaagatgaaatggagcttgaaatgaagtgagcggcgaagtgaagtagagtactaagtgagagtgataagcttaggctgtgagcagaggaggccgacgaaccttggagcgagaggagaccatggcgtagaggtcggcgtagctctggctgagcttctcgcggcgctggcgctcgcgcatcatgtggcggaaaccgcggctgctctccacgtcggcgccctgcccgcgccgccgccgctgcggcacctcctcctcctcctccatctcctcaccctcccccttctcccccccgccgccgccgccgcccatcctgcccagcacgtccatcaccctccggtggatgttcgtcccaccggtggtgacagcccccgccgccgccggcgctccggcgtgcaccgcgccgccgtactcctggaacgcgctctgcctcgcctccgccgccgcctgctccggctccggctccggctccggcgacgcaatgaggccgaacggcagctccggcgacgccggcacgtggtgggggaagaagaacgcggcctcgtcggcgtggaacgcgccgtagtacgactccatttgcatctcttcctcttgctgttcttgcttcttcttcttcttcttcttgttctcgatcagatgtgatggttggcgatggtttcccgggaaatattcgaacgcgggatataaataggcgggggcggaaaatggaagaacaagttcacgtgtggtttttttgggtcacgtggtcaaaatagccgtgtgcgcaaatgtgaggcgagtgggattggctactaaaaccgggcggtcaaatgatgaaaaaatgattaataaataaataagttattattcggaggaggaggggttgggatgcaaaagagcacgtgggattagaaacggaggggggtacggctacgcggtttgaagggggtgtgacgtcagcttgcggctgtacacgtcggcaggcagagaaggttccacgtaggaggccgattgattgggaagttttgcgttgattgctttttcgcggattagacccttacagattcggtatttacatgatggatttacagtatgtatatagagtaacacacattttctctatgctaattctgaaacttaattttaaacttgattttaagatatttttaacatagtttctttttcattgccttttaagtcgctaagtacatatgtattagagatttaaaaaatatttttttaatcgctaataagttcataataagctcttgggcaatcaatgaggcctctgctttgcaaccacacgaataccgtggatgacagctaaaattatggtagcaaaatgccatgcatttaaatgtataaatacagtaaattgacaaaccattatctttttcttaagaaaaaaaagaaaatttggcaggctagtgctctaatcctggttttgcaatgaaataggataacaaagtacttttttctcggaaaaaaaatcaaaaagtaaacagaaggaagaaattgtttttttttcttttgcggggacataaggaaaaataattgttggtatatactttcaacagaaggaagaaagttaaggtataccaccaaacttttagctaagcaaacacttattgagatctaattgaaccttattgttgattttatacattttcaaatttactttaaagttcaagggacttgttcggcactgtacttcaagtttagagggattcctgcaattttcctcaacaacaattaacaattctctgatgaaagggatcccaaattttcaaggcatcattgcaactaatcaacatgattatcttattagcatgttggcgtatttttctcccttcaatacacttaaaatagtatttctccgactgtcgaacaaaagggggaaaaattcaagcaacgagtagattgaacaggagacgctcacacaaatgtgaacttgaatcagcatcccaactattaatcaacacgtcaaatgattttaccacacgctgtcgctagtgcgatgtttgaagagctaatgacgagtaaagacttctcctggaccagctgaatcttctccttccggcacaccattttttttggcggcacagaaacctatggaaacttctaaattgttcatagagtggttactgtgctgttttttttttgggggttctattggaagtggttagtttactgttgacaaggtgtacctttcaatttactaattaattaggacctttataaaataccttgaggatgtttttagcatgtgcatggatgcatgcatggaggagttatggactgatactctgataatgctgtttatataaatcaaggcttaattaaatggtcaaggcaaagtcatgagtgatgagtgattccaattattcagttattacaatgtgttccccgtgatagcctcctcgtgtgttaacttgtcgtagtctctcagttgtttatcatgtgctcaaaaaaattgtataacaatttcctccttctgtgctgtaatttctatcgcaatttgtctatcaggcaaatgaaattcctctatactaccggaccggagactaaaaaactcacaggcacatgtttaataatgatatagaaaattagagattgaaaacagcatatagtaaagccacgtgaattgagaatcgtcataagaagaggttatgaacttaaaataacacgacaacttggcaaaccccccaaagaagtcgtaagacacaaacaggataaattatgagatcgtatatatttccaatggaattaatataattgttgaaaatgactttatatatagaagattttcatgtagcattcaaattttcaaaactcctttcaactacgaatttcccggtttatttctaaaaagactatattccaaaaaaaagggagagaagaattccaagccccttttgaacttagcaatttcccgatttattactagaaattaatttattccccctccccacaccccaccaaaaaaaaatcgtacagaatacttttctgttccaaacagggctaataaaaagctatccactatccctctgttgatcaaatgagtaaacgacggttgagccagtaagcagcttcgctagagaaaccggtgctcacctgcaactaataccagccgcatgataaaaaagcagagaaggtgctcttgcaaattccaggggacagagcaaacgtgccaacaatgcagcgtcgaccggtggtcgcggggaggaaaaatagcttctgctatttcatgtagtagcttctacaagaccacatgtgccaagacgacgacccaagaccagcaggcgacgcgattaattaaggattaatcaattaacccgtgcgaaagctactatatgcgcgtgcatacgtgttggtgttgctagctatagtgagctcatcaagcagtcgtacatgtaggttagtcgacacgagcggtacacaggcgtacagtactagaatggagtgcagtacgtagccaggtacgaacgactggtcgcggtcagagctagcggagtgtgccgtccaagcgactcggtcgttcgatggttgggtggaggagaggtgagctgaaaagctaagcgtcgccgcgcggtacgccgaggaagctaggtaggccgcggccctccttccttctcgtgcaaaaaacgaaaggatatgatgggtttttcacgtacgcgatccgcgctgcgtttcaccgtgacgcgcgtgtgccgaccggggggatacccacccggcaaacggccaccgcgcggccggagctacgcggtcacgaggcctgcgacccctgcaaggcggggatccggccgtcttgtgcgcggtgcatgctgcgccgcctcagctggtgagagatctaaggttcatgtcagctgaatttttctttaaggtcttcaccgtgtttagatccaaagtttttctttaaacttccaacttttccatcacattaaacttttctacacacataaacttcaaactttttcgtcacatcgttccaatttcaaccaaactttcaatttcggtgtgaactaaacacagcccttgtttagttgtgaaaattttttgggtttggttgtcacatcagatatacagagacatatttaaagtattaaacgcagtctaataacaaaacaaattacagattccaccaagaaactacgagacgaatttattaagcctaatcaatccatcattagcaaatgtttactatagcaccacattgttaaatcatggcgcaattaggcttaaaagattcgtctcgcaatttacacgcaatctgtgtaattgctttttttcctacatttaatactccatgcatgtgtccaaacattcgatgtgatagcatgaaaatttttgttttgggaactaatcagtgcctaacttttggtccttttaaaaatcttattctataaatagatcttaaaaaaattattctagaaaccaataccttgccggcaaattttgctacaggacactacttatgtgtggttttagccctaggacattgcccaaactcacttttgggggaaaacactccataaacgtggtaatttgccagtggacaccgcgccgattaaaataatactttccggttgaagaggagagagaaatcgcgtgaaatgtcaaaaatgcccttaggcccacatgtcagctctatctcctatctctcttctcatctctctctatattctctctcactctcataggcgcacgggggcggcgtcagtgccggcgaggctggtggtgcttgagcagatggagccgtgggtggagcagcatgtgctgttgctgctcaagccggcgaaggaggcatggcagccggaggacatggtgcccgacgcggcggcgctcggcgcggacgggttccacgcggcgtgccttgagctccgggagtgcgctgcgcggcgtgccttgagctccgggagtgcgctgcgcggcgtgcccgacgcgcacctagtgtgcctggtagggaacatggtgacggaggaggcgctgcccacgtaccaaagcatggtgaaccggttcgagtcggcgcgcgacgtcaccggcgccgacgggacggcatgggcgcgatggatctgcaggtggtccgccgaggagaaccaccacgacgacgtgctcaaccggtacatgtacctctccggccgccttgacatgcgccaggtggagcgcacggtgcaccggctgatcagctccggcatggccatgcacgcgctggtgagccccgaccacggcttcagctatgtcgccttccaggagcgcgccaccgcggcaacacggcacgcaacgtccgcgcccatggcgacgacgcgctcgcccgcatctgcggcgccatcgccgccgacaagagcgccacgaggccgcctacacccgcgtcgtcgagatgctcctcgccgctgtcctcgccatctccgccacgaccgatgccgcctcgtcctcctccgctggcttgagcaatggcagcaagtgctgctccacccatggctccatctgctcaagcacctccagcctcgccggcgccgatgccgccccgtgcgcctctggtagtgagagagaatagagagagagagagatgagaagagagataggagatagagctgacatgtgtgcccaagggtatttttgacatttcacgcgatttctctctcctcttcaaccagaaagtattattttaatcagcgcggtgtccactgtcaaattaccatgtttatggagtgttttctccaaaagtgggtttgagcagtgttctagggataaaaccacacataagcagtgtcctgtagcaaaatttgccataccttgccacatcatggttttcagccatgctgggaacatgattcagccacaccattagtttagccaaaagatttagatctaaaattaaaattataagatgatttattttaaattatattgaaatagttttttctttgaaaagtaaaaggtatgtggccatttgtccatcaaacaagttatatttttttttgaaagaaatcaatcaaataagtttttgttactatatttatatgtcggcaattatctgaccagcttttcagtcgacagaatttgcagttgaccatcggctgcagctcgcaaatttttgcggcgccgccggcgcgcatcggcttcacatacatagtcagcaacacggcgtcctccggttgagttcttggcgtcctccagttgagttcttgggtgaactcgttataaatcgaaatggctgtggcctatgccgctagttgtgcagtgttcagtgagcttcgaaaataaaaatccctgcctttcacggccaagaatgctgttcagtgttcagcggtcaagggctagtgatttcttggttagctctcgtcgattaagttcttaagcacgcggcttaaaagcatttaaggcttcgttttggtttgcggtgggttacgataacctcgtttggtgtagttggagatggtaaggggtgtgtgtggttgtaattttaaggtaccgtgttcaatccttaactcactcacaattttctctccctccaaatcttgtttttgtttggtgtagttgctctaagattttgtgtgatgaattgcttttcttttaatctatgttgcaaaacgacaataatattatgttgaacgatgttgatatttgatctgttagacaaactataaccattataactttgtattcccacatcaacttaaaaataagcaaaacacaataaccagaagtgtcaagtgcaactaaataaatggcctaaaccattctttttttttaaaaaaaagggggggggggctagtctagtgcataaaacaggatgagtttaagcacagcaatatccaagcaagcatcaatccaagagggaaaatgggaatattttcagaaaaaaccagtgtcagggtcagaaaatacctcaacagtagggactcagcaattccatctctgacgaaccgtctgaggcctggttggtctggtttagtttccaactttttcttcaaacttttaacttttccatcacatcaaaatttttctacacacataaacttccaacttttccgtcacatcgttccaatttcaactaaacttccaattttagcgtgcactaaacacaccctccatgtctcccctcctgtaacagggtttcctccaagaaattctgtaaaaaaatcagcggtaagccatcacataaatcgtaacaaatggaaaggcatcttcacatcgcaaagtgaaagataaagcagagtgatacagaaaagaaaaaccatgggatatccaaagataaaaggaaaaataataataatctgcccatggccatggagccaataagcttcttctgatgtttggactcgagagctgttggttttgatgcaaaataacttaattccttctaacgatgtgtgtcgtcgattaccaatttggtgatgcaaatcaggagaataagatgatagaaatcttcttccaagcaatatgccttgaatattcttatgaaatctcagaaaatgatccaaagattcagtaaacgatccaaaactttatgcttcagtattcatgtgttattggttttcaaaactcactattttgcattatttggatcgttctctcttctgaatgcaaacaagaaaccaaaagttgcattttgtgtggttaacataaaatccctgccgacctgcgaggaaaactatccaaacaaaaacccaagagataaattaaaggtagcagataaatcccctgataagacatattgaaggttcttcaattcacccttctttttctctctgaacaatcttaaattctcaatcttgatatgtccaagacagaaggtcttcatccatagttttacatgtcaatcttcctctcttctcacaagaactctggttctcagaagcgatcgatgaatgaaaccaaaattctctcgggaaaattcgattcaagctgatcaagaatgaaaccatgctagtcttcccaactcccaagcaaaaactcatgcagctgaagtgcccaatcaggaaagctcaaaagtcaaaaataacatcagctagaacacaagaaacaatcgagaaaaccaaaccaaaatcaccagaagaaactgaaacccagcagcaaaaccaacctgctaaatcagagctcgtagaggaaaagaaaagaccgaatcaagcaacaaaccacagcaaatcagcaggaaatttcttacctcgtcgtctctgtttcttgatccgtttctcctccatttccgccccctcttgctcagctcggcttctccgcttcttcccccatccgatgggaggagaggtggtggtcaacagcaggaagtgttttgccgcgtggattccagaatgcaaacgcttatttggtccacaaaactgcaaagcagggaaaagtctcaaactttgactggaaaacgcggacctgactgcccctgaaatgcataatttacacgtgattaaacgaacattcctttttctttgtttgttttttttccaagcatgaaaaggacgtgcaaaaggtgtgacttgtttcaagagaaaaaaaggctgagattttttttttgttcatggaaaacaaaaggtggatgaagaacagtagctctggtgcaagctgaagaactgcgaatttgcgatatttttaagattaaactgcggttgaaagaatggttttcgtgacatcaaaaatcgtatcggcagcaacttatgtacaattttatcaacacgttctcatccaaggcctgcaccgctgcatgaacagtaaggatggctccatcgcatgatcaggcagaaaacgagtaagagcagagtaacacaccagaaatcataatcttctatacattttcgactcccaacttttagctgaagttaagtacaaaaaaaggagccaaactagtggactaatctggttgatgatgcttcttttctaacccagaaaaggcacatgattttgagctcattgtgcaatgcaaaacacatgcttgcattgacttcaaatagtccccgagcaaaaggaggagaagtgcaggggcaaaaaatcatggtatgggagcaaagcacatgctgccttgtgcatagattcttcattaacatattaaactataggagtacagccaccatcagtattatcaccatcctcagccaaaaacacgtgaagaacattgaagacaagcttggcaattataggactcaaggtttagctccacatgcacttaaatgttcacaaggtacatgattgacacacttgacgaaatgaaaattagttgcatgacagatgcatcacatggattaagtgttaaggatatcacatggattaagtgttaaggatattaagaactcccatgtaggtcctgttgatatccttaacattaagaattcgcatgtaggtcttgttatactgtcatattcagtctagcagttaggttgcttgttcaggctattttctagtcctcttgcgacccctcccccctctggaggtggctgcagttttctcaggagagctatgaagatcgccgccaccagtctcagagggttcatcattaacgcttgcatctttgtcacttgcttcctcaaaaagctctgtcttatcagtggagttctcatcctcctcctttggagccttgtcagcagattcaaattctgtgagtttgtccttgagttgtctgagcttggctttcttcgaatttaagacagccacaaactagagacatgacacaacagtgagtagagaactactatggtaagctcaatatacagttttcttgagttccagtcaactaataactgaatgagaaaatcactaaatgccaaagtcaaaatatgaccacgagagggaacaaaatatcaaagctaactaattggggagaatgtgaatatcatcatatagtgttcaccgtgagaatagtttgtgatgatgcaaacaagcaaggctaaaggatgaaattttttgaactgcaagaaatgttcgtctttcacaaacaccagggaatgtacctttgaaaatgtggattgttcgaactcagctttctcaatgttaaatctttcactttgttgcaagcacttctcagattcttgtttcaacttgtcaaaggattgtgttttcctaacaacctcttcctgaaaaatgaagggaaggcaacagtttagtcattcaggtcaagtaaatcatatatgaagatgacttggtggtaggttgcagtgaggtcgaatcaagttcatcggaatcttgacaacaattcactacttccatagaaaatattatagcattatatccatggaatggaaaaggaaagtgacatacgctcaagcgtatatttgcatccataagaaaatccaagatctcagctatagtctgctgagtgttaggtgcaggctgcagtttccatcgccattctaacttggtgccttgtttctcaaatgtccatgacagctacatggaaaaataaataatcaataactcgggaaacaaaaggagaaaaacgtgtttggtacaaaacaagcaaggacatgaaatggtctcctcataaaccaagacatgcctgtaaagcagtactacttgtgtttaacataatttcatcaccatttgaaaatcatgtatcatatcgtcaatggtgctcatatttaggatattatgacatcaagggaatccatgttgtccctaacagatagtgactttaagtaatcagggtctagtaaatcgtcgaggcgcaagggctaaccctcaaacaattaagaggtcttaaaaacattatgtattaatataagagaaggaagcattctgagtcctacatgatgtgatcattatacaataacttgatagactgatcctggtttatatgcaaagtttgagatgaggcaccattccaacgctagaaacagttagcacaaaaattagataacacgtgtatattcgtatccgacttaaataaaatgtcaaacaggaatttcttcgcattttagttcatctatgcataaaagcatactcttcgtcaaaattgggtgtgtacaatttaatccatataactaattggtaggagtatatccttaaggccaaaatccaaaaacagaagagattgtaagcaacttgcattgtgaaaaaaaaaataaaagagagtggggaaatattatctttacgccgcagtcaacgtgctcagaaattacttcccagattgagcgcaaaagaggagatagagatcagatacttcacaaaacttcgtaaaagaatcaacattaactactgaatgcattactcgtggatgagtgaaggtgaactacaatcgggagctaaatgcagtctccagctacaaaattaccagcaaactgcgtcgtttcgcccctaaacaaacattgctggaccttgcagtatacacatgtaagcgagagagaaatgtgacactgtgagcatcaaataacaatcctaccatacagttacaaagatgatatcgattgctctacttccaacttgccctaaaagcagtagcattcttccatatatagataaaaaaagaaagggataagaaagaacgaacccttcgattgccgttggcggcgtcgtggaaggagtaggtggaggagggctgctggaaggcgaggtagcgctcggcgagggcgaggtagtcggcgacgggctggtcccactgctcggcgcggaggcgcacctcggcgtcggaggcctgggcgacccacgcggcgccgccgtcggtgacggcgagggagaagcgcgtggggtgccacgtggccttcacgaagacggctccgccgccgcccgccttggggtcctccaccgccaccgagagcttcgcgcagctgtgcctgggcgccgccgtcgaggtcgccatggatcggcggcggcggcggcggcggtggctgttcgggagaacacgcgggctttgaattcgtatgggccgtccgattgctactgttggttcaaatcaagggcccaggtgcgagccctcacaaaattcatcgaaaagtcaaaaaaatacgtgcctgccatactgccaatagtaatagtagtaaccttattttcattttcttttgggcctgtgtaagttggcgaaaagaaaatttttgggtgtcacatccgatgtttgaccggatgtcggaaggggttttcggagacgaatgaaaaaactaacttcataattcgactgaaaatcacgagacgaatcttttaagcctaattataatccatcattagtacatgtgagctactgtaatacttatggctaatcatggactaattaggctcaaaagattcgtctcgcgatttcccccctaactgtgcaattagtttttttaatctatatttaatgctccatacatgtgtccaaagtttcgatgtgatgttttttggaaaaaaatttgggaactaaaccaggccaaccaggcctttgttacccaataccaactgtttaattcattccgttagtttatttttagagtaaatttcgtgaaacctcacctattatgatctgagttgtataaaaccataggtattttggcaagtgggacataatctcagatattatggtactaacttttcacaaagccttgctattgatcattttgtctttgatctaccataattttaagttctataatcgcatctcaaatttatgaaaactttatccatcatatatcctgtaaatattatattcttttttatttgatagataggtatatcaaaatgattaacggtgttgttttgtggaactttaagatcataatactcggggttatgtgtcatgtgccaaaatccttatggtttcgtgtaacctagatcataataggaattttatgaaatttactcttatttttatattaaagaaaatccttcggtgggattacttttgagttttgactcgtaatgatgggagaaaactcatttactccctccatttttaataagtgacgatttgtattttcttatttaaactttgactattaattgtgcttgaattacaagatcaaagttttatgtttatgtcttagagtatacccacgttaataacatagaacatctctagtgcttataaatattgataaaacaagtggtcaaagttaaaaggtaaatagtgccccgtatcagttattatgaaatggagtgggtagtacttaagggaatgtccccctcataacccaaaataatgcttaatataaaagatcataaaaaaaactcaggcatttatgaaaaaaaaaatcaatgtttcgaccttagatataaaacacccccacaaaatttcaaatataaactcgaccaacatatctaagcgaggatataaagctagattatgatcagtacgtcgattctctgccatattatatcagtcttgtttctttccaccgccatgtagattgatctttattgtcaaatagacatcatggcactatattgtcaaagatctttctacagttctttacaaatatgtgcattaatctaaaaaccaaaagcatggtctaagttgacagtttgacacactattttttaaaaaaaaactgtagttgacactctcagctcatcaagacctcaagcaacaagaatcctataattccataatagtgccctttctttcacaagtagctaaaaagctctctctctctctctctctctctctctctctctctctctctctctctctctctctctctctctctaaagaatctcaagatttgaccacttgccccgttctaaactttacccatttttcatcgattttcattagcacgtttttcaaatgctaaactgtgtattttgtgtgaaaactttctacataaaagttgttataaaaaatcaaataaatctatttttcaagttttagtaattaaaattcaattaatcaatatggtaatgacttgtgtcgtttgcgtgcgcatttaatccttatcttgtttgagaatcgaaggaccacaccacgcatcgatcgatcgaacgtactccctccgtcccataaaaaaccaacctaggactagatgtgacacatcctattacaacgaatctggacatagaatatgtcatatctagtcctagatttattttttaggggacggagggagtaagtcgtgtcgtggccgcctctttagcctgtagcttcaaccctaagcttggaatcgaaaccatttccatgatcatttcatcatcatcaattcacaagtggagtcacaaagttgccacgctttgcaggagaatcacttcgcatttcaacgtcatggacctgattactaacagacaggctatggttctctctccctctgttgctttaattttgttgttgtcgctgccacgaggaatatatataaaacagccatcatgattcatcgactgatcttccactgcttttttttttcacggtcaccggcgaagaaggctggatcgccaatctcaaaagaaagtgacgcgaatagcatctgatcgggcgctgctgctgctgatgctgcttttgtttgttttttgtgctcaactaaaaagattttgtgtcgcgttcagttctccacataatatcgcatctgatctttttgttctgctggtgctaagcatataatactcgccttaggcgagtgagtcccctcttctggcatgctatggcaaacgaaacatacagaaagacagaaagagatgatcaatttgtcagggatatgattttttttttggatcttctgaagttctgagatgatgatccatggctgttgagaggaatgacgtccggtctgaagatcgccgtccccaggcggtggcttcggaccaggcttcattccccatgactcatggaacccacacgtgtgtactgatcctgtgagcttcagcttcgtatgaattatgatcagcaaccaaccaagattgcagggaaggcaggtaggcaggtaggcagatgtccattcaattctgttgagatttctgaaggttttcatgtttgggattttgcagaatcgcagtgccactaggcactggctgcttgttttggatgaactttgctagcttggattggatgcacaggttggtactacctacctacttgctgttgctggcatggcatgctgatgctggcatgctgcacctacttgcttttcgtgcttcgctcgaacataaggcaacaaaagattaggtgcagatttcaggacaggatcaacaagaatgaaaagttcatatagcaaataggatttccagtttgaatgaaatgcgaaactgaatagtgacattacaaggacaaaacaccggaaaaaatattctggtcttctaagtactgatgaattattctggtcttctgaatactgatgaatcgtatgtagtagtagcctatagcgtcaaccctagacaagcaagtaatgcattcagtccaaactgtcaacgtcagactaactagaatgaaaagccgctcaaaccagcttgttgcgatcaagtaccagcctcgcaccttccttattacaatctccggttttttagcatacggtaccatctaattttaaaaattgtttattttattgtgacttattttagaactacaatctaaacctaaacttttacatatttatactaaattttaaataaaacgaatgatcaaatgttttaatggcgttatggccggggttgatgtcaatttcgaaattatagatttaagctacattcagtatcaggtgaagaaacaaatgtgttaacatgaatacaggacatgacatttcctacaaaaattcgtcgtacaatttccagaaggctgttcttacagaggttctggtgactgtatttacatctaatcaagctgtttggtccaatcaaagggttcccagtccttcatgaaattagcaacagcttgtttctgattatccatcgattcatgccttcggcgcctgtgcatgtcctcttcccgcaactggagcatccctctgatgacattcaacccaaaacctgcactgaatttgctctcatcgtctatgacatgggcaaatccacggtcgagcccgaactctacatgaaagtaggcaaagttctctgggatgacttggtgcaggtttccctttgttggaataagtttcttcatgtcatgctgggtccattcttcttccgcttcatcaattgcctgaagtaaataggttggattttgttagaacctgaagcacataagaaataaattgttctcaatcatggacaaagcaacagacaaccgaccttcttgaagtacatgggagcattgtttgaaacttcggaggggatagggatgcattcaatcatgcagtgcctgcgttgtttggccaagcttataacagtctccatgaaaacaatatccttgtcctgctgcgcgaacattttcaggaggcacttcttaaagttgcggatctcctcccagacacttctatcaactgttcttgttgcagactcatgctgcaaccataaaaaagaacatatcataaggtagatgatgaatagtgcataagagttgtaatgaaggtcgggtttacatatgactattcaaaattacaagaagctgaagttagcttgttgttatgaaagcacatcataaaatgattttctcacctgcaatggcagaataatgcagtgcccagggacaacaggctcaagctgtggcagcatcaagtaagtgaagtttcctatagcaacaaccagatgctttggccgtgatgggttctcgaagcaatacatacagcgctctttctgagttgtgagccaatgagtgcttctcctctcctcatgtgcatctttgttcctccttttgcctttcttactgggggcatcaccaaaatcatattcatcctctatacttttagacatgttgtactgtttattgtgcataattttatttgcaagatgccggtcagcatcctcttctcttttcctgcgatcagctgcactaggctttattgtgttcctacagattagaaaaacaatagtttgttcagcaagcagataaacaatacgagtatatatatgctgatacaacattgaaatagaaaggtcatttctgtaatgcttatgtttgtaataaattggatgtctacattaaaatatttgaatatccctatgcaaaacaggtgcaccctgtgttttgcacttttttttttgtcatagtatgccaaaatggcatacatatggccaccaaaatatttcagaggagcagatcaagtgcatgctgtatccattccccttcttatctatacaactatgcctcatacgcacatgctctagaaactagacattaagaatatgaaactgagagtatttcaatatgagagaacgattactgttagaacatttcagcatagctttacagttgcagacatatttcttttcaagtcctcagatattgtgggagaataacaaggtaccaatactaaggcgtttacaagtttttagccttacaaagtgacatcatacgacagtgtgtgaaagcaggcatctgtaatgtgctaactcagaataacaacgtcatggactaacctggttgaactcctcacttcatgcctaggttcttcaacagcagtatcctcattctccagcaccgcctccatttctcgctgagcaagaatagttagcagttacaaagtcttgtcacctctaattcaagtatattcaagcatatggaaattcaatttcttaatcatgccctatttcagatataaaagaaattgtgcttcggcatcctaaattgtatattgatcataaagcgataaacatagtgcaaattcttgagcatggattgatgcggatccgaccatggttacatgctactataagagtatgttaaattaggggtcaaagccattattcaatagcaatatgttagctcaggggtctaagccattactgaaaagcaatgaacagcatgtattttctgttacttcaaatgaataaatgaaaccatgtgcaaaactgcactttcattactatattgtaataagtatagttattttccaaacaaattatatacactaataatgaatcaagaaggtaagcctgttaatgttatcacaataacaataatgcaatacttaccgaaagttgttcagcttcttcatgcttgcctttcattcggagctgcagaatctttgctgctaactggttcgcatttagcttttgagtgctaactgaaggtgctttctttgagctacccttatcagacttgagctcatcaacctctgcagtcaaaacatttacagtcttgctttcaagattattaatcttttccaaaaagcttccatcattagagaacttattgattcctgctatcgctgaagagataagtgcctgatcctcagaagaaatattctgcctattccttttccatggtacagaatcaggtttaggttttctcattgcatgatgccgagaggaaacatcttttaagtattcacgtctaccactgtctccaccttgctgaccctcctttggattttctttggaatgttcttctgagctgcctgcttgcccagcttttctgcctctaatggcatgtaaatgagcatgcgaaggggcagctctagatgctgacactgatgcagctaagtggcctaacgagccccatctctcaccaacaacctatattgaatagtaatagaagttaggggaataaactacctaatgtcagtcacttccaataataatatgtggcgacggacatacctcctcaagttgttttccttcacgagctgcttgctcttttgcacgcttcaaagctttgagcctccagctagcacctccatcaccaaccacagaggaagcaagcaactggttgcctgcatttgaagggctagattcatcagggtacccactgccattatccctcaggtatggattcaattcctttggattggctttcttcacctgtcagtacccaagaagttgatgtaagcaaagcaggagagatatcccagtttagagtttagaatcactaaacaaaacatttattccatacatcttatacagatccgtagatataaatatagggtgtgttcgctacagccggctcccaacgtgcacagtacgcacggaaaacggagcagcccattagaacgtgattaattaagtatttgctaaatttttttcaaaaatggatcaatatgattttttaagcaacttttgtatataaacttttttgcaaaaaaagcaccgtttagcagtttgaaaagcgtgcgagcggaaaacgaaggaggggtttggaaaagggggtgccgaacacacccataggccgtgtttagattccaacttttttcttcaaacttctaacttttccgtcaaatcaaatgtttggacacatacatggagcatcaaatgtggacaaaaaaaaaaccaattgcacagtccgactataaattgcgagacgaatcttttgagcctaattacgccatgatttgataatgtggtactacagtaaacatttgctaataacggattaattaggcttaatagattcgtctcgtagtttacatgcggaatctgtaatttgttttgttattagtctatgtttaatacttcaaatgtgtgtccgtatacttcaaaaaaaattttggcgcaccaactaaacacagccatagtattcctgcactgaacaactgaatgttccaggggtttattaaaatatgagttaacgtacaggacaaaacatactcatccatcgtcatgaagaaaattatacagcagttacttgactaaatgtcattgctaacgaaagaaaccaaatctaaatctaagtatgaacatcataactaaatagcaacggtcactcactgaattgatcacaacaagcttagcattgaaccaactttcagctactatagcttagcataaaaccataagcagaatagcattctaccatgggaatattgttcataatttgagtagataggatgcaagtgcctaataccatctgaagactactgttcagctaccaacaattaaaacatggcatcttcactgcaagtggtgaatcatatacaatattaatgcagtacctagcttatggaaatattaccatcacaaacatggcctcagctccacaaagaactacaataagctaccctgaattgcaattatatggcaaaaggtagctactaggacacaagcattgaaccataagcatatctcacatgagatgtggtaatcattacctcctcgggtgcaacctcctcctcatctttgtcagccccgccagcttggctgctctccgcccgaccactgcttgccgacttgagcatccattcgaggcccatctccttcctgacaatatcactagctctcaactcctcacctccaattccctcatcctcctcctcctcatcatcatcatcacctgcggcacctccaagcttgctcttgcgactgcctgtaacaagaggtcagcaataccaggtgatcagaaacacaactcacaaaaatcctaccaaaaagcaccatcctaacctaacctaaacaagtttagggctacttgcctcttctcttatcagattcaccactggactcctcgtcatcatcatcgtcgtcatcggagaactcatggcgccgcctctgatgcttcctccggtgcttgctccggctcaaccctttctcctcctcctcttcgatcgagtctccgctatcggacccctcctcggagtccgagccgtacttgctccgcctccgccggcgcctccggtcccgcctctcctccttgtccctccccttcctgccccgcttcttccgccgccgcctatcctcggagctgtcggaccccgccgagccggcgccgcctagggcatcctcgccgatctgctcccgggggataaacttgacgccggagagcatcgccggtgggcggcgaggcgaacgcgctagggcttcgttggttgggggagagaagcggcgaacgcgagggcttcaacggcggcggaggtggcgcgccggcgacgagccgacgagagagaggaagaggtagcgagaccgcaagggggatccagccatccagggagagagagagcctttccgtgatgtgtaggctggatgggccgggccttaacaagtgacgggtaccgatacaatcggcccatcggcccgtgttgattcaattggcccaatactcaacggttttcagcccaattacaaagcaacaccagtagcctttactacttcctccgtctcataataaattctatttttttagtaatcattatttcattggagtctgtaaaagtagaaaataattatattagaagtacataaagtaagaaataattgtattagggtttgataaaataagtgtattatagtcttttgggttgtttttttatgtgtgtgggatgggagagaaataaacttattttggatggaggaagtaaatataaatcctcgccaaatattgaaggtatgaatttgtttatctctgttccaagacttgtttgttcctcggatagttgggaagaggattagaaagataatgatctcacgatgctgacaatagggtgtgtaaatatcactttgaggtcaaaaccaaatttatgtataattctgatatattatgtacgagtattctatttgatagtttgacacccgtatcccaacttttcctgtaccgaagaaaatctgcttggactcctgtttttcattttccctcctttcctgtttcctagcaaaacaattgatacggaattcaaattacatatacccatttgttctcgctgaatgcgtacatatccaaaacggtctgtgagataaatatccttttccctcttgcactagtcagaaatcatccgaacagcggatgaacaaagcgaacaatgtcttaacttccatgaagtgtcccctgcaacacgcaagcaaaatgctactacagcctcagtggtgtaccacgaagaaagatgatcgaatgtgcacaatgaagaaagatgatcaagcatggccgtacagttcgtgagtaagtaccattttactaccaacaaaaccttcctgctccatccctgagaagggatgtacaagccgtgctccgaggtctgaacactcaacttggggagacgaattcgacaggaatcggtttagctcaaacccagaaattcagttcgcttgtttcgcaccgtgaaacttgcgtgcgaatgttgcagccacaattaatgggaaagcgatcgtagcgtcacaatgcacctgcatttcaaaaggttgaggacttgaggtatcaagattataggtttatagtgcgacaaacatccatggtgtatgagttaacgatgctccaactatctcttggtatcataatttctcgttcagatcttctatatcaggcaaagcagaatcatgtcaaccatcatcgcataaatcattgaacaaagtaaaattgatgcatgcttcaaagctaaaatgcatcaaaagatataggtgcaatacagagcaaaactgtgaaatgaatataagatggattagaattaggatctagtccaagatcattgatgcaatctctttggcataccttgttcaagcgaagctgacaaaaatgttcatatatgcagcatatgatgtttaacaaaaggcacttttagctagctaggcgcacatcaaatattaaaaataatcatgtgaaaattgctcaaggtacagaaatataccttgacgggtttggctgaacctttaatctttccccatgaaactgcttcatcaggttgtgctccagaatcactgccatcaaactcttgggctgtgttgatatagactgcataatctgcaccattgcgaaacatattggcgttgcatatatgatgcttgggtagacctccaccaagaactatgatccctgtcttccttggggttgcatgaatggcttccccattcatcaatcttatatctgccacattttcgagcataatatgagaaaaaaaattgaatgcaaaagcaagaaaaccaagcacacaaacttgccttgtacaatgtcaataattaggccaggattgcggactgcatgacagaatagcatgtctccaagcgatccatcagtcaatgctgggcagtatacaggaatattgttctgatcaagttttggaaagtcagtactatctcgtttcagtcttttgattaacagatcataacattgcacttgggcataagaacttaaaacccacacaagaatatcgaatatcgatgctggtttacgtgtcgtattctccacagatgcttaaagtatatggtctattgcaacatcatgagagagaaaaaaaacaagtgtcttgaccaaatccactcaactataagtctataactcattctaaaaagtcaaataaaggttaaaatttggatatcatgtacattatatcaacatcaataagccaacatccaggatataggaaggcggtgccctagttccaggaggaaaatatggtcccatgccattattgtgaagagtttacagctacnccacattagatacagacaaaaaataactcaaatattttttcaaggaacaaagaaaaattttgaatcagactacctagtatctcattgtgtactaaggatagagatgcatggactttataaacagaattgatggtgtggtccccctcttgtgctattattttgcactttgtaaggatattcaggtgtagttaataaacatgtgttaccttatacgcccaataaaggtaggaactttcatcatttatttctttgccaagacaagctatgaccttcgatggtgtccaaacattctgcaggtaagtaaaattgatcgtacttcatgaacaggagagagagcacaaaagtagttggaagagttgcttctgagagaaaagatgtatctgataattgatagttggaaaacaagggcacagcagtaaagctacagaaattcatagttggtgtcctcatatgtcagttttatttggatttgtgcgtgtatcattactaggttaataaaacacggaccaatttgaaagggagctaatgaaggctggttcaaataatgtgcatagatcctttttattcctgtagcattgaaattcaacatattttaatttattatttgggagtacttgtggggcagattatagctgctttccatttaagttttttctctcatgtttcttatttttgaacattctgtaccataatactagtggagttctaagcactctaagctaggtcattttatattactgcccaatacatgattcctcctctatacagctaatgaatcataagcacatgtgcattatatagtgttgaacacattgctgcaagttatctgcgcttcagccagaagaaaaatgtaacagtacctcagtggattgctcttgtagcatctgatcaaaaagtggcatgatccagttctcaaacttgcaatagttatcattgggaaccaaaagatttccaatccgattcaatccctttgaccgcaacagtgttccaggtaaagaaaattctcctctataagtgggagcaagacatttgatgagatcctcctctataccaccagcagttgtaacaataacatccacctaaataacacatttttcaagggggattagctacatcatagggataagatatcaatgcttttgataatgctagtatgttaccaaaagcatgtaaaaccatctctaccaaaccaggtcataaaaggaaattacagcaacgcgattctcaccatgtgatgctgaactagaaaacggactacatctcgaatgccagaagagacaaggtttgaagtgaatcccaggaatattttgcactttacagattctctatatgtaggatcaagctcagcttcatcacagtcctcacgtggcttctcgtgagacagcctccaatctaacttcagtgcattcaagaacagaatagaaagggttagggagtatcagaacatcttaaaggtgttaaaaaatatcatggaaatgttaaagtggaaaatcgtggaacacacatgtaagatggtaacagagagttttttttcataatttttcatctggattacctccagatcacttacgaggaagttcaagtgtacatttggagttgtccaataaattcacaatgtaaataagtaaatttggtagcattttttatacacctacaccatttcaaatttgctaactgtttcatctgacaggaattatcgagataatcatcagtagagtgtcaaccctagcatgaataataagctgcaagtttccgattttatagcaaccacatctatcgcatcattcagcacatgacttcacctcttcagctccaattacaccaacacagctacagcaatgggcctcgtctaaattgcaattcctaagaaactccaaggatctagaaacacaacaatttcaagctacagtaacccccaaatccgcttcgcctccctcacgggcatgcaaaaggcaggaaggctgcaaagggtgcagtaattagtaacgtaccatctggttgacgacgtcgacggcgtcgccgaggttggaggcctggaatccggtggtggcgagcgacgcgagcagcccggggaggccgaggccggcgtcgttgaagtcggcgccggcgatcctcgtgaaccgcccctcgtcgagggactccgagggcttcaacacgattgagcgcacgccctccagcgcgtccatgtcgcgcactccccctcctcctgcccccgccatcgcccacgaagtcggagcccgagccgccgccgccgccgccgcgagctactgtgagcttcgaattgattttttttttccgagaaaaaaaaaagaatcagattccgcgcggctgtagtttgggtggaggtgttgctttcaacgatgcagatgggccgggcttttcgtcgacccagcagagcgagccggagggcaaggagaaagacggggcggcggcggcggcggcgctgccgcgcttggagaaagcgggaggcaaaggcggcggaaggtgaggtgggggcggccggcggcgccgccacgctgggtctgggagaaggggggagggcggcgacgcgaccgcgcaacatgggccaccgggcgtcgatccatgctgggccatcaaattttgtggcccacgtgcatcctggcttgggctaagaataaccatggaccttacatggcctagctatatgaactaggggtatgaagctaaggttaggtctgacggcccaacatggttatgatcgtttttgcagcaggatggaggagctgaaaaccgaacatgcctgaaatttatctctttttttcctcttcgatgaagtcggacttgtgatttggtggtaatatcatgcccataatgatagggatcggtcgaccgggtgggggagcaaaaatcggacgctccccccgcccccggccccgccccccgcacggccgcccgtgcatgccgctgggcccaccacagtccctgcccctacctgcaacaaatcacccacatattttgaaaaccctctattaagagaatttagtttattttttgttttaaaaaaatatttcatctagtgcactcacaatgtttcactatgtatggatctaatgatgcagtgaactgaaatattccattgcaacaaatcacccacatattttgaaaaccctctattaagggaattcattttattttttatttcaccaaaaatgtttcacctagtgtactcacaatgtttcactatgtatggatctaatgttgcagtgaattgaaacattctttgttatttgctgaaacattgttttatataaggtgaaacaacacccgatttaaacgtgtgaaacattttcgatctacttagtgaaacaactccgatatacctggtggaacatcgtgcaacatttaaaaataattcaataataagctaatttttttgtcggaatatatccatgtgtggtcttgttttgaaacgaattcaaatggagcaatcggatcatgatttggataagtaatttaagagaaaaaaaatagtttaaagtagttttgcacgtaaatcgggagctgacgtcagcgcccgattttaatctcctcccatcggacgcccgagccggagtcacgtccatatcatgtttatacataattttttttataaatgtataaaatttttagatctaattttcataggttaattttcacgtttccgccggatattttccttaaatttgtataaaaagtattatcacaatatcataacttattagattttacaaattcatttcttacataaaattacatgtcagaagtttataagtctaaccaaatcttgttctaatcaacaaaaagtcgtccactgtctgtagcgtacaccctacgtccaaaaaaaatcaattctagctatctacgtgaacaagtgcatgtctagattcatagctaagattcgttttgcactattcatttccaacgtttgaccgttcgtcttatttgaaaaatttttatgattactatttttattgttattagatgataaaacatgaatagtattttatgtgtgactaatttttttaaaatttttcataaatttttcaaataagacggatggtcaaacgttggacacggatttccacagctgcacttattttgagacggatgtagtacttccttagccgttggatcaagtatgcatcgcacgcctgatgattaaacatgttcttttccaattaattaagatatattttaactttgttttcattggcatgttttttcaaactactaaatagtgtattttgcatgaaatctttgtatatgaaagttgctttaaaatattagataaatatattttcaagtttataataattaaaaataaaataattatatgctaattgttttcttgtttctcgtaccctaacctcatcaacagtagaaataaacaacaaaccattcaggtttccgtcatgatatgattagtctattctcaagctagtgttgtaatagtgtatactatgctcttcatataaaaaagaataagtttttaggatgaaaatctggataatcatatattcattcatagaaattagtttttttttcctttttaagaacggagagactatgctgtagtacattatagtatggcaaattggcaatggttgtgaacatgcatgcgctttcgtagagattgtataggagtatgtgatagggtccaataaactcacatttccggcccaacttcaagtcaaacccaagcatacccgtaatagcaccattcagaaaactgtgactgatcgaccgtcccctgtcagaatcgacaaatgcataatctgagcacatttgcacagttgcacccaccccgcgtgtgtgtgaaacttaccattgttcacaatttcacatcacatgttaagtagtacctctgatgttgactcacaagtctgaactgattgacaatgtggtgcgtccgccatacctgggacgtgtacgcttggcatgcgacacactagctagccaaagtagtagtcgtacattctgagtgaacacgtttgttcgacgatgttggatactccctttcacctttcaccttacaccttcccattcagttatagtagtataccagtatctttctcgatcacattacgtcttccctaaagatgtttaggagtactccctctgctcgaaaagactaacttttgaaaataaatttttggtttttccaccgtaaaataatctcggaaaattaaacagggtatactcttgccgatccatgcagatgcaagcagggtagtagtagtattcaactagagtactcgctagctagccacctgaatcatgtcatcctcccgtcgaggcatcgctctctcggcggagtggtgagatagatgaggtcaacatctgcaacgctgtccaccactaacaccgtaccctgtgcatggccaagctaagcttggacggcgcgcgttacagtatgcatgcagcgtgcgttccgcagttcatcatctctgcatgctaggccgaaaaggacccctgatctaacgtgtatatattcatgtagcagtagaagtctaacaacaaaccagcatggtaaaaataaacctgctgttagctaattaagcatccggattgcatctggtgctgtgaaaaatgcagaggtataaagtgcaggggacctgggagctagggagggggagtccaggagcagtagaaacggccagggtgggggtgggggcaaggaaaccggttgcaggaaggcgtacaggaggttgatatgctgctccactgccggtgaattgggttccaggtcgcaagcagctggccgaggacgacgccagccaagccctgccccgtctgcactgcagcctctctctccccttttgttgaattgatcaagcaggaacaagtgacgagaccgctcccgatttcacgcaccgatcctcgtggcgcgcccgccgccggcaacaatcccgaacgggggaccactcactcgcaacctccattccttcacgtttacgtttacaccgtagcagcacgtacgggcaaatgccaagcaggccaaccaaagagatggctcggactaaactgtaatgtacttccttcgttcattaaaaaaaaactaacttccacacgtaaaattagatagatactcatccagatttattttcagaaattgattattttcagagtaactacgaatcatcacttgaacaacgtcacgtatggctcgacaattaatgggaggttttagccggattccggggagcaaatcctaccacatgttgaggggcaaatctcgcaaataccgcgcgacggcatgggcgatgatggacgatcgacgccgcagccggccaaaatcatgtcgagcccgagtccgaacccaatgggtcgcactgcacacggtcccccacacgggcgggtgggatggagaccggaggcgaaggggaacgagactgtgggtggggggggggccactagtcagcgacggtgaaatatatcatgaacagcgcggagaggtccatcgcctcgtcacccaacgatgctattccgagctttaacctcgagttaatgacgaccccccaggcgtccacgtcacgtccttgtccgtcattagtacacctttttcatgtcactgtggccaagtggccaacctgatcgatgccaaacaagtatccatccaatccaacagtactaatgttgcaatttgtggtgtctccctccagaaaaatcccacgtaaacctagagacctatccggaagaagccaaacgaaaaataatttataaataaaacttttatatatatatatatatatatatatatatatatatatatatatatatatatatatatatatgacactcatatggggcaccatggtgcccgggcaccatggtatctaatgcacaaaatcactcaaatttttcaaaatttttaaattgtgagtatatacctaattataataatttgattcatacctatacttatcaacaaaacaactcaaatttaactttatttcacaatccatgattacatacctaactaattatatgtatggatgctatatacctagaatcaaaatctaacaaaaacaagttcaaattcagttcaaacttgctttaaactagttagtaaagtagttaatgttaatacctaagtaattgaaaaagtttcatactcatttgaattgggtatatactcaatttcaacaatggtgcccgggcaccatggagcaccaaacaaatttactatatatatatatatatatatatatatatatatatatatatatatatatatatatatgttcgttcttagcgatctaaaagcaaaggctgaaaaataaacttcgataaaaaaccctcaaaattaactccaaatttaaagttgaaaacgctggaggcggccgagggttgccggatggtcgctccacgcaggaacgacgacggggacgacgacgacagagctggttgcgccccacgacgccgatcttggcgtgcggctctcctgggccagagcaggtcgtcagggcagggggaacctgatggggctcgccacaggagccgcaccccccacccttcccgccgccgccgtggatgcgctgccgacgcggtggacggggacgatgacgggagcccacctgccggccgggatcgtggctgccgctcgtgttcgacgagccgccgccgctcagcaagccgtcgttgttcccgccggagatctccatcgccgcaagccaggacttcacgccaccgtcgccgcagcggcacaaacgacaaggcggtgggcctggtcgcgcttctcgaggggggggaccgacgacactgacagctacaccactaaccctaaccctctctgtgctctctgacctctcgctgcaactttgctcacagatgttggcagagactactgcggcgatggatggcatgcgcctgggcagcattgacccgatgacgatggaggtggcgattggggtagaggaagctacccagaagcttcctccaatcccactcagcgcccctacggcccatcctctgctggaggcccagtccgggtttgaggcccaggaggagctggcggcacaggaggagatggcggcccaagccagcaaggaggtggtgcccgacgtggtgggctacctggacgagggcgacggcctggcccacatcgcccctccaggcgcacctgcgccacctcgcctgttcgagcctctacccgagccgcttctccctcagccgccgccccccgctccagcacgccgtggccgctccaaggtgaagatggtgccctctaggcacagtgcgagacaggcagcacgccccttctcggtgcccgtctccaagcacaccgaaggccgcctcctcaaggagatggggttcattgacaaagaggaggacctcaacgacgaggcgattgcggcgttcgtcaaggctttcgacaagccactgccgccacatgtcatcgccggcctccgctgcctcacccgcctcgacgacccagcttccattccgtcggacttcgccggacaggatggcatcaccaccggcacggcttaggcgtgcgtctcaccatcaccatgcaggagcgcgaccatccccatattagtcagtcactgtccgtgttgtaagagattagcgctgggctgtcaggggtgcttcacaccctttgctcccccctagtagttgctctattagccggctcgggccttaagcccccgggctaataagaaataagcagtgcattcctctagtctgtgtgaggctcaggatagtaactagtatttggctactgctgtggcaatgtattggttcaaatgctgagattataagacgctgcctttttagaatggttgtctcgttgtgcaatgattagtgaacatatcatgtgttggaatgtgcggggtctaaactacccggcaaaaagagaagcaatccgcgaagtggcaaccaccaaccgcatatccatcatgtgcctccaacatacaaaattggcaatcatggaccaaagaatgtgttcggaaattgggggtccaagactgaataatttcagctaccttcctgctgatgggagccgtggaggagcagctaccttttgggatggatgatatcctccagcacagtgatatcaacatcagaaatttctccctctcagtccgtctcacccaacggtcctcaaacacggcattcctcctcaccaacgtctatggaccgacggatgacgctgataaggaaaacttcctccaggaaatgtgcgaagtggcaccatcaggacagaccccctggctgattatgggggacttcaacctgatttatgaggcaagagacaagaataacctcaaccttgatcgtcgattgatggggcggttcaaggctgcgataaatagatgtgaactccgtgaattaagactgcaaaatagacgattcacttggagtaacgagagagatgccccaaccctcgagaagttggatcggattttttgtaacccagatggcgatatgctcttctctaaccacaacctacaagctctctcttcctccaactctgaccactgccccctgttgctctcaccaacacaccagctgctgcgaaaaccaactttcagatttgaaaacttttggccaagaccgccgggcttccttgacaccgtccagacggcttggtcccagccagttagcgcttctcaccctgtcaagcgcttgagttccaagctgaaagctacagccaaggctctacggtcctggagcaatcgcatcctaagtgacagtcgcatccaattccatctcgtaaatgagctaatcctccgtttggacattgcacaagaaaacagagcattgtcgcccttggagatctccctcagaaaagatctaaagctacagattcttggtcttgctgctgtagagaaggcaaggagaagacagcgatccacactaacatggctgaaagagggtgatgcaaacactaagtttttccacttgaaagtcaatgcgtgccatcggaagaacttcattcacaaactccaccgtggcaacgtcatcccagaaactcatgaagccaaagagcgtgccctacacgaacacttctcctctctgatgggccagcgactccctcgctcttgcaccctaaactgggaggagcttcacctaccccaggtgacgccagaagatcttgactcccccttcaccgaggaggatgtttgggaagctatcaaacggatgcttgctgagaaggcacctgggccagacggcttcacaggcaccttcttcagatgttgctgggaggttatcaagtcagacatcatggaattgcttgacaaattccactccttatcgggaggaaatttcgggagtataaacagagcgacactcatcctcatccccaaaaagaatgatgcttgcactatgggcgactatagaccaatcagcttaattcactccttagcgaagctccttgcaaagattttggcaatccgcctatccagacaaattaacaaagtgatatcacaagctcagagtgcgttcatcataacaaggtgcatccaggacaatttcctctatgtctccaacctggctaagaagatgcacaggtccaagcagcccaccctattcttcaagctcgatattgccaaggccttcgactcggtctcatgggagtacctcctaacgctgcttgaaaaaatggggttcagtactagatggcgagactgggtggctttaatcctctcaacctcctcttccagggttgcactaaatgggattgagggagaaagaattgatcaccatagagggctaaggcaaggggatcccctatccccatacctttttattcttgcgatggaccccctacatagactactcaagattgcaactgatgagggcctcctcagtgacctagcggaccgcagtgcacgcttcagatgctccctatatgctgatgacacggcaatcttcatcaaaccatcacgacaagatgtggacagcctgatttcgatcttgaataacttcgggagtgctactggacttctggttaaccttcacaaaagctcagtgatcccaatcagctgtggtgaaattgaccttgatgaaatgctacacaactttactggcccccgcgggacattcccaatgcgatacctagggatgccactcatgataagcaggctccgaaaggtccatcgccaatacctaattgacaaaatcaaggcacgattagccagttggaagaaaaagctcctctcggcaggaggaagaagagagttagtactatcagtaccaagctccatgccaatctatgccatgacagctctgaaaataccaaagcaaatcattcaagaaattgacaaagtaagaagaaaattcctctgggacggtggcgatgaagtcaatggcggaaagtgtaaagtgaactgacagcgcgtttgcaggcccctaaagtatgacggtctgggggtctcgaatctcaccaagatgggaagggcgcttcgcctgcgatggctatggtatgaatggacctcccccgacaagccatggatcggcatgccaacaccctgtgatgaacaggacaacgagctctttgcagcatccacgtcagtgacaatcggagatggtaggaaggcgctcttctgggaatccccatgggcttgcagctccaccttgaaagcaatggcacccaatctcttccaccacgctagaaaaaagaaaaggacggtcgcagaagccctacaagataacaagtggatcgatgacatccgatacaacttgacaactgtcctcgtcaccgatttcttcaaggtcttcgagataatctggacctcaggcatcacactaacccaagacattgaagacaacatacgatggaaatggacaacaagtggagtctacacaacaaaatcagcttaccaaatgtagttcctagggggcataccgtcggtatcagcaaatatgatatggaaatgttgggcaccatcgaagtgcaaattctttgcctggctactcctccaaaacagaatttggacggccgatcgacttcagcagagggagtggccaaataactacttctgtcagctctgcttcagaaacctcgagacggcacaccacctcttttatgaatgcccgatcacaaggaaaatctgggatgccatagcaacaaggctcggcatgcctcagctaagaccacagaactggtctaaaacgacaatccttgaggaccggtggacacaaaccgttagtacaatgcctaaggagaaaaggaagggtgccaaatcgatccttatcctactatcctgggaaatctggaaagagagaaataacatggttttcaagaacatagagacagcgacgcagggaatcgttgagaaagcgatcgacgagatctggctctagcgtgtaagcggggcaaagggcatccaatgtctaacgacccacaaccatggaagcataaccgacattacgtaaattagactcatcagctgcacccctcctttgtagctgcacctccctccacctgctttctttttcctttcttattgtaatctcctagccccctgggctattgtacagtttttccctctactttaatacaaatacaccccgcggggtttaaaaaaagaaaaattaaattttgaccgctaagcataagcctgagtgaaagacgaggcttttttagcttagcaaagtgagttcattagagcttaacagtagctacatcattggattttattttattattttgcgaaattttccctgccaagtgccgaccacaattctgtgtgctactgtggcgtcaaggttcgagatcgattcgaaccgtcaagtccacgaaaaaagatttgggaatagaatgtattccgacaaaaccccgcgctgaaactcgcttccgccaatggatatatgtgatacgcctgcgtggcgatcaggacgtgacggagtaaaaaaaagggcatgcgtaagaagcaaacacaagtctagctatgtaatctattttgagaacactagctacgtaatctcgttcgaatatataaagctcagcaaagaacgaaggcatatatgcactgcacttatctcagttttatctctgcagcaccaacatgcaggttaacccacttgactcgatcagattcgttggcttatctaatttgctaagaattctaaagaattcggatgttgtagagtcctaacaaattgagtcaagtctcatcagatgtataacacatttagtcaacatcttcagtcgtttattggacaagtctaaggctgaagttgactgacatactgagtcctgtcctagcaatatcttttttgctttttatttagcattacaggatttatattgaaagatgttaatggcatgtcattgtctgtccgtaagcttatcaactagtagaaatttaaattttgcagttaaggttttgtatttaaaccacaaattacataaatataaaagttttacctgtaaatatttgctttttgtttgattaatttttctatatatgactaggttgcgttcgtttgtagtagttgataactcattctctatgcacgaaaacaaagtagtggattaacacatatttaacaaagtattgactttttttctaaaaaaattggattagtatgatattttaaaccaacttttctatagaaaaatttcgtaaaacacacaagcttatgaagtatgcgcgtgggaaccaacgaaggaaaggttggatggtctgtttgttaaagctccaagctacttcaagctaaaatgctttaacaaaatgaattagaaaagtagagctatattcttcatatgtcttcttcaaactctaatttcttacagttagatttgtaagttagaatcgtgacccttaacagctagccttaacatgtacacacgtacgccacagaagtacagaacgcgtatctcccttggcccagttggggaatgagttaggcgcgcccacccgatcggatcgatcaaccgaagcaccgagctcgatcgatcatttagctgcctcgcaaaataagctgcaagttgccgctcgtcgcgcgcgcgcggcgcggcgaaccacccatccatcaaccgcggatcccatccccatcccagtgggcgcgcgcgcgcgcgcggccgagaaaaaggtctccccgtgtcgggccgcctccgcctctcctcgtcgtcggctatgtctccatttccgagtcattaacaaatccaaaccacacgctagatagatacagattgatgatcgtatcaccgtctcgatcgtccaagggtgactcacatcacatgccgacgcgatcagcacagtagttatcctgttaattgggtcttgctgaatgctgacactgacgatgtgggccccacgagtcagggatccaggcttgaggcgtcggattgttgggtcgggaaaatcaagtgcagatttttttttttttttggctttctcaaccaccgtggcgagccacatgtacatacgtggttgtgcatgtacacgtagtgtatatacacttggtgcgtgcttacctacagctacaggctacagcatgacagctaagctacactcctctcctcctagctaaattaacttaatttggtcaatggctcctccgatcaatcgatcagtttacacgtaactaatctaatgttttttttttcttcttcccgccgcggcgagctggctgggctagtttagctcgatcgatttctcttcgagacggcgggttcaagtgctactcggcaatggcgccgagatcgggcacgaagtcgcggccacggctgtgccgcctcgtcctcgaccggcggcaccccttcccggcggcgcggggatcggcggcggaggcggcggcctccgggaacacgaggggcccgtcgtggtcgcccaccagcgcggcgctggcgcggacagcgagcgccgccatctcctccgcctggagcggccgccgccgcatagcggcggggagcacgaagtaaagctgcccgggctggagctcctcgtcgtcgccgccgcccaccgccgccaccgcggccccgagctccagcccgtcggcgctgcacaggaaccacgacgacccgccgccgcctccgcccgccgccttcaccgcctgcgacgccctggtgccacccgggaaccgccgcagcgcgccgtccgccagcaccaccctcgccgccgtcgcctcccccgacgccgacctcccgttcaccgccgccaccgccgtcgcctcgcaggagttgcacgcccccatctcacagtttgaatgctcgtcgtcgtcgtcggacgcggcgcggcggtgggtgagccgagccgagcgcgcgccgcggtcggggactcgtggtcggggttgggcgtggagcgcggcgtgcggtcgcgcgtatatatacgcgagggggaggaggacgcgtcgcgtcgggtagtgtcgagaggaggaggaggaggcgatcgtgccaacctggaggttgttgaggacagcttgcaagggagcggggctatagtagttgtagtacgcgcgcgtaaatgtgtgtgacaccgtgcacgcatcctagggtgctacgagtctattttgctaccagtgcgcggtgagttgtgtgcacatccctgcttgcgtggcgcgatgccgtggtggggcccacttgtcagtgccgttttaggacattccttcgtttcaaaataagtttatttttagctcattttatttatcccaaaataagattatttttagagtgatcatcgcatcaaagtttataaaaatagagaataattgtatcggaagtagataaagtagatgtttttagtcttttttacttttgtattggtatatgtgtgtgacgggtgaaaaaatgaactaattttgtgatggaggtagtataagagcaggtacaatagcaggttataaacatattttaatgagataaaaaatgagagagaagaggagcggactacagatctgtagccagctgtagtacggactccaagacacagtgtgtgtatgacagatgggaacatatattaatagtatagtaagcaattattgtatgaattggctattagattagctatagataaattggagctagttgtgggttatactattaaacttgctcttaaaaaaccattaacgcatgattaataagttaaaattattataaattttaaaaatatatttatctaaggttttaaaataacttaatatataatgttttcgtacgaaatgcatcatttagcaaataaaacaccatgctaacagaaactgagataaaatatatatcataatcagaaaaagaatggcgcataagcttaactttggaattaatttagagttttttttccttttgtttttttaaccatcattttttgcgtgaaaaaacaaaagtccagtcctgctagctcctgctagctgcttcggtgcattaagccgtaccataaaaaattcctcctagctaatcagcgatacactgtacctattggtggtgcagcagcacgagttaatggttatggcgaaagcaattgaatcacgtgctgatgctgctgatcatgatcgtgcgaaagcggcgcttaatctaaccagagcttttggaagcggaggaaatggcgtcgaagcttagcagtagaatccttagctctcaaagggggcagcaaacaaatcagcagcaaaggtctaaaggagatgatgattgtagggacgggagagggagaggcatacatgatctatttagcaaagcttcaatttctaaatttaataccaagagttagttctgaagtgaagctgattaatcccagcttcacctgtctgcttcattttacggagctgaaattatttagctgggctatagcttttaagaggatagagcctgagctgaaactgtgacaaatgggtccaacgtcacaaaatcggcggaggatgaggagcagccaaagctgggcaacttcgcgccattttctccgcatgttggccgtggatcctccgcgccgacgccgagatctcgcttcgcattttttgcatgaggcgacaaatgctggtaagaatggaccttgattaataagcgtagcgcaagaaactttgattagcagggttattaagatgtgtttaaatgcgcgtgtaccgtactgttttgacataggattcttcctggttgaaagctcccatacagtcctactatatgctatgcatgggcgtttttactcgagagggatgtcgtaactatggtcacacacacaatgtcagagctgtacagccccagtcctgacgttagtacaggactgaccgtcgctcaagatctcgctccgacgcgacgacgctttcatggcgctttgtacagctggcgacatgcagccagccagccagccagtcctctcgcaacgcccatcaagcctagctcgtccatacaccattattcagacatactagatcggaatggatatacttctgtatagatgagagaaatggtttcggatcttgtagaggagaataggagaggaaaaaagaacaaaaaaaaaattaagatgaacttgaacaaggagatggagattcagggtttaactttttcgatttcgaattaaaaatcatatctcattggtttaccgaaatccgaaaaaaactagtaaaaaccgatggcttttagtcaacgccgtacgaaaaccgactaatattgaccggttttcataaactaacacctagcggtttcgtgaaaaccccccatggaatcatggaggtagcccatacatggtgatcattggcagtggcccctgcagctgcaggaaatgaatgataactgggacagtttttgttgcgtccgtgcggatcgcagcgtttcttcttcttccacctcctcccatctcccccactgacccacgcaccaatggcgccacaggtccacgtacccaaccactcctctcaaattaatctccaatcatccgagctcgacgcatccatggcttggtcctacatggagtgaatgcgagatgcgcccaagctagccattgaagacgtcgctgagctaagccatatacacttaagaggagcacttcagggattcaggctgaccatggcatgcatgcgtggcgactaatggatgaactgatcattcattcattcattcattcattcattcagcatagcggatagctgagcttgtgctcagcacggcaaaatgaattgtgtttcagattcagcccccagttcatcatcgttcatcacatattcacacgcacgccaccctggcttcacccattactctctgacaggatagtagatcaatcgatttactacaccgatataaaaactgacagactgttaggctattcccaacccaagacactagatatagtttccataaacttcacatcatcaagaaactagtactagacactactcttccaatgcaaacactactatttcatacttaaatttaatgctacttatctcacatgatgtcttggatgttgtgtagaaatcaagtctcatgcaagacatggttttcttctcttttctcatttattcacttgccacatcagtttttatcctaggtggcaacttatttaatgctatggacaccatcctagtcattgggttgggaatggccttagtgcttcattttgtgtcctagaatctgcatgctttcaatcgtccaatgaaaaaaaaaagatattcagtattactacgtaccaaaatataacaatttagaacatgatgggagacatcctaatattgctaatctagacagacgaatgtttagatttataatactaaaacgtgtcctgtcaaatcttatattgctatattttataacgaagggaatatatttttaactagacaggaaaattttcactcgattttattggcttgattagcagaacattgacaagcaagatgagattccaagtgcagaaatctcaatcccccaaacactggtaagatgatcagtacactgtaccagacgccagagacatttttgcaagcaccctgcactcctgcaggctgcagtgccaggctagccaaccccgtagtcaaacgaccagattatactattacaccagcacaacgacacttgtttatcggatccatcaccaatcaccctaatcaaactgccaatccgtcgacctgttccagcgtccaagtcttaagcacacgcattaagaaaatgtgaaatgttcctcctgttcagcgatgcagcatcaatcacacacagcacagaatctactgccagcatgtcgctgcatccggatgtaccgacaccggagggacacgcaaattctcagcttgttttcgtcatgtgccggatccaacttgccccttgactgactgtaaattcagagagtgttcagtgcttgtttcagaatcagaataacaattgatgcttagactaattctttgctgataaaaattagcctgtcagatactgtaagtactcaatcagatcaattacgctcagggataagaggtgcaggataaggtagaagataaaaaagcgaggttaaaagtgaaaatggttggttcatggacagtcgtgcaatgcaggatttgacaaagattggatcggctagctgctaccactaatattcttatgcaattgccgatgtctctccgtcatcagttcagacttcagagacgggagaatcgtttcgttttccatcatcatctcatctgcacgcgttggctggtgtccttttttctactatggaattctcggggttttgctgcggccatggggcgcagctgtacgagcaacgcgattgtcacagatagttacctgcatctgcatgaaagtagtaactgtgttgcgtgtcgacagtttttgtcgaggaagagaacaagaaatcaagatgtgattgctgaaatggtatgctgctggctagctagcatctggaagagggaaaaacataaagagcatttcttgtgtatggccttatgtggtgtagataatcagttcgatgatgtccattgagattgtctgttatccttcgttttgcacgaaataactagccacatagtcgctctttacgcaactgttgatcccatttaagaaattttatatatgtttttttagtttagcttagcttttatgagtgttttgacataagttaatttatttaaaaatatcgactggtctacccaactataaatttacttaagttatattatatgtttattagagaaatcaatggcagcttcttttttttttcttcattgtctttgccctcaatatataagaggaggcactagaaattgatctcccaaaattcccatatgtttagttcatttatgttttttattaatgaatgtaccattttgatttaacgactattgtttatccaaactctttatccttgtgaaaaaaccttgttgctttcactatatacaagatgtcatcgctgcaagttggcataccatatctgatgttcaaaattcagaactatttattcggcgaagatgattatacccaatctttctttctttcttttctggaaatgcaacggcagagttcctgttccagctatgcaaacccgagccgatctggtggtgcaatgcaaaatagtagcagcaggtaccacagctggctacatccagctagtcattatccaaataatgtgccttttcccccttttttgcgtaaaaattaagggcttttagtttaaggtccagctcccgttagatgcgactcataattaactcatggcatgtagtactacagcgtactgctcattgcagatctccctctctgataactctgatagtgatgatcctgaattcagaccactcatcaacagattcaacagttaattaagtatgtggtgtttgcaaagtgatgaagatgaggattaaataaggacatgtaaaatgataaagtcatcagcgtatgattgattaaattttaattagtataaacttataaaatgaattcatttgatattttaagcaacttctgtatagaaagttttcctataaaatacaccgtttatcagtttgaaaaacatgccttacaaaaattgagacagactatatcttaatcagaatggaacggagcctttgtaacaaagaaacctcggtcacaattatcaaaacttgctagataattaccggttggtaattaaacgtcagtttttcaaacatttctttgaatttgaccccatatgagagctgatgcaagagtagttctctgtctgttccaaaataaacgttgccatgagtttccgtgttcaactttgaccatccattttatttaattttttttataattaatatttttattgttattagattataaaatataaatagtattttatgtgtgactgatgctttttaggttttttaaaaaaaaattaaataagacgaacagtcagacacaaaaattcatgtctgcgcttattttggaacggagggaggagtagtggatggacgccattgtcattcctactggatcatctgagaataaacatcagaatcagcggtggaatgtctcactcaacatgcatgccatcacatcgcttattgtcacctgcagttgtccatgcaatttggtgttttcagtgctccagctcttcccgagcatacagtatggtcgcggagtgactagctgaccatgcacatcatgtcgatcgatggccaggcgaaaggtccagacggccacaatcacatggaaacatatcgtagatgatggcataaatatatgaccagcattagctgtgcaaaattttgatctcgcatggtctctattactccctccgtttcgaaatgtttgacaccgttgactttttagcacatgtttgaccgttcgtcttatttaaaaacttttgtgaaatatgtaaaattatatgcctacatagaaatatatttaacaatgaatcaaatgataggaaaataattaataattacttaaattttttgaataagacgaacggtcaaacatgtttaaaaaagtcaatggcgtcaaacatttcgaaacggaggaagtataaaattggcaccaaaactaccgtccacaaccaaacacaggaaaaataccatagaagattcaaatattatgacaacaacgatgcacaaagttactacgaaacctactccctccgtcccaaaaaaagacaaaccctggtttccgtgcccaacgtttgaccatctgtctgatttgaaaaaaaatatgaaaaaaattaaaaagacaagtcacgcataaaatattaatcatattttatcatctaacaacaatgaaaatacgaattataaaaaaatttcatataagatggacagtcaaagttagacacggaaactcagggtttgcctttttttgggacggaggaagtacatccgagagcactagttacggatgctcctcctctatccatggtaactataactatcaaggtatcaatgaccttccactgattacgttgctggccatttatttctttttcttacgctatcattatcatacgattacattatgtgtggtatgcgccactctatttaagagagagcttagggtaagagtcttaattctacttctatatctttaacactcaagtcctaatttatatctaattttgtatatatacatatctgatataaattctaacaatctcgccttgaatttccagttcgatgttgttgctgtcacagtactctcagttactctgtaagcagttatccagttgtagatttgaagctgactttaagacgagagagctacagagagcatgagcgctgtagtgtacagtaatacatacagcctggagatcacaaattaaaagcgatcgatcagcagagtcatcgtctggcactgtttgacaatcaaagcaagcacgacgtaaatgatggattgtgatcggcagaacatcccatcccagtgcccatcaagtcatcaagcttccccctttcaattcgtcttctcgctcaggaaaattccatgtcggaggaggcagcttgcaagtaggagggagagattggctagctagccaagtagccagcgaccagctctccatcggccagctgctagctgagtcttccaagtccaagtgtccaacggcgcgccgacgcaagatcctagcgggcgagtttgatgcgcgccacggtgtgggctcccgcccgcagccgccgcgcgagcagttgctagctttgtcttaaaactttcttccaaaaatctagcatgtaaggccctgtttagttctaaagtttttttttctaaactttcaactttccatcacatcaaacatttcatacacacacaatttttctatcacatcgtaccaatttcaatcaaactttcaaacttcagtgtgaactaaacacagcctaagtgtaattgtaaaataactactccctccgtttcaaaatgtttgacaccgtcgactttttagcatatgtttgaccattcgtcttgttcaaaaacttttgtgaaatatgtaaaattatatgcctacataaaaatatatttagcaatgaatcaaatgataggaaaataattaataattacttaaattttttgaataagacgaacggtcaaacatgtgataaaaagtcaacggtgtcaaacattttgaaacggagggagtatattgtagtttgtttgtaacttacaatacaattttttttaaaaaaattctatgataacacactatttccatgaagcggatgtctcatgacataatcccctcagctataagcacgctgtgattttttttcttcgattacatgaatcttgaagcaaatataacggttcaaaatttatttgaaagttacattacaattaagttacaatataattgcactacgattttactgtatttatatctataaaattttttagaaaaattttgatgacaaatatataacaaattcggtggtcaggtcctcaggccccgattctttttgcttctccactgaattattgttgtggattatttcttccacatcttcaaaattaagtttttcttaaaaatactttcttttaatgtgttgcaatgattccttaatctatgttatatattaattaatttattaaaatatttaatttacttcaataattattgactgaattattataatagattatctacatggcgtaaatatgtctcctctcttctctgtccactgaatttgttttgcattattttcttcagaattcagacggggtgggtcaactgaatagtgcattgctgatttgctggtaagatttgttattgcagatttataatagattaatcgaggctcataactttgctgtgacttgtgaccagctgccttgcaggagggaacgagcgaacgagcgagatcttgatgggatccactcgcacacagtgcagtgaacattgctcaatgatggtttgcttggtctgattggaccatggatcttgcatcttccctaccattcccaatcattgggacctttgttttggttctggggttcaattcaattttaggtggtgcattatttgggctaagaatttcaattggtggaaggatgtgagaccatccgagcctatgtgagacttctgaaccaaaaatagcatcatggtggtttctctaatgtatagtgaaatagacttttgtcccgttttggagagcttaaaattcggaggaacggttggttcgtagttaggtttaaaaaatatggaaaagccgggtttcccaacttttggcacgtagttcattgtcgcgcccaaaaatttcaccaattctcatactattctgtgtataaatctatgtccaggaatcaaactaggatacacaaaatgacaaattaatatacatattcaaacgtaaatacttacagaataaatacttagtcctcataaagaaaaaacaaagcaacagtgaaaaaggacgatcctactggaacttcacctccactccacaagtaaaacgcaactgaggtataaaccttggtcttttaactccgtctttagcataaaagcactaaacttttgaaatgtggaaaacaagatagaggagtatggcgaggctatttataccctcgagaaactggattggggcggggagaggcgataggtgagccaacgataggtacaacataggtgagatgcggctttgacgatgtatgatttgcgggagagtggtggggctaaaggtggacaagtggaggagacttgtaggatcgaatcataagaactaagccaaccagagggagggtgaatggttggtatacccaaaaaccgaaaacttttagcggaaataaaagttaccctcgaaattgatggaagtcggtctgaccgagattgatctgccggtctgaccgagtggatgccgccggtctgaccggtgatgaatctccggtctgaccgccgagatcacctgccgcgcctgtcgccgccgccggtctgaccgccatgctcccgccggtctgaccgccgcaatgccgccggtctgaccgtcggtgagttgccggttagaccgccgaaacccggtgaaacacaaatcaaagaactcttaaagttgatgacgactttattgattctttctgtgtttacaaagtgcaccaacagcactccttacaaaaatttcgactaaactcgaaaccctaactcaaaactcaactcaattgctctcaaaagcgataccgggaagcctcacgctccctctctatttatacccgaggtaggcagcctaaagccacgaaccaaactcatactaggagtcctaaacaccttaggaaaccctctagtacaagaaagaaactttacataaccaatcgtaccatatttggactccttctaaatttgactccgcatcccatacgcacacaataactccatcgtatgccatataaaatctccatcaaccacgtgcatcaactctagcctaagtatctcgcatgatctctgaccaccacggacgtcgtcttatccccaagccgactcccggtccatcaccgcaaatactcccctgagacatcgagtcacctacacatggaacaaacaaagaaaccatattccgagaccaagctatctccaagttgactcatcagcagcaaacaatagtattacatacgtatagtatccatctagaagtcataatcataaaataaattcggatatccaaataaacaacccaaaattgaaaccgacacagtgtcggccggtctgaccgcgcattacacgtcggtctgaccggctaccagagcccggtctgaccgatcacataaaatgacgaatcctgcgatcacatgtgaaatccaatcatcttcaaaaccacttcgtgaataaattccaaataacaaaaccaataatctccaatgcccaattgttcatcacaaaataataatcaaaaacacctttgattttacaagactgtgtccacgcacctggagacgcgagtgtggaagcggggaggcccaccggagaggtcgtgatgtgggaaacggttgctggctctcaagccgaagaaaaaggatgatgctaacaggtggaccccacattttggtggctcaaggcaggagggaggcgaagtggacttcggctgaaaggaggctgggccaagaaaggcctgcgcgcggggggggggggggggtg

SEQ ID NO: 5846 - DNA, 113832 bp, Oryza sativa
ctcacccccaccactactcctttttaaaggagtatagactagccaagagcccgtgcgtcgcaatgggaaacagattgagtagtacttttattatttttcttattgaacaagtaggtgattttgaaatttggtgagagccaacagtggaacggggaaggacttgttgaagggtggtgttggtgtaatagtatggattgtggggcccaagtgccagtggtaggggtggtgtggcagaacggacaccaccactactaacattttaagtagtatagatatagatatagattttgatagagcactaaaccctccaaacatttttgttggctcactttaccccctgaactgcttaaactatggttgcccttggcgttttatctctcaagtttattgcatagcatattgccgtcaagatatcatagtagcttttccttctgtaatagcatgcacataatattgacattttggttgaggaaccaaggacatttccattaccaaacaggaatccacatctgctgaaatctccatttacatcaacttagcacaaatgatggctacactcttctttttgtagctaggatgtttcataagttcgaggacatgctattctggtttttatgcgcagtctgctttttgtagctaggatgtttcataagttcaagaacatgccattctgatttttatctgcaccccgcgtggatgtcagataatcttttttatctgaattcataattcattttccataatgttggttattcatgccacttgtcttgatgccatgaaaggggattccataatttatttttcgtcattggttgagctacggcttataagccgaacaaaaaataaacgaagcaaccaaaaatgattttagggcaggacttttagatttctactcattgttttaaaagccaaggttgaaaaatagaaaacaatgaaagaacacctagattaatttgaaaaaaagtttcccatgtcatgattggttgaaaacatgagtctcatggactaaatgatgcgaacatgtaaaagaatgtagactatacaatattgaaaaattatcttaattaagatcacaaaacgttgaaagcctgaatacacatactcgcacaaagctgtgcacagttataaatttatgattgcacacacgctgtacatatttatctcttttgtagggtgttcatttttactattatgcgcaatttttctgtagctgcacatagtctgatatgttttacatctatgtacttttatatgctatgtgcatttcgtaaaaaaaatggtgcatttggtatgtttgctagtttaggaaaataatatttgtggttgtgcatgatggttctgacattttgcttttcaggtcacatatcacccattttcaaaggaagaacagatggaagccctagagtctgaaaagagagctatcgaggagagaaagcgactcaaggaggctggggttattggtagtacaatggatgctcttggtggtgctgcttcactagttggttctggtgttggacttgtgggcactggcattgtcggcggggttggacttgttggatcaggaattggtgctggtgttgggcttgttggttcgggtgttgggcttgttggttcgggtattggcgctgtcggcagcggcctcggtaaagctgggaaattcatgggcaagactgtggccgggcctttcagtatgtcccggaagaacggtagcagctcaactgctccccaggctgaacaaccttctgcgtgacttgatgtacagtgattgcaatggacatcgcatgttcagttgcgtgttaattctgtttgatataaacttgtgatacctagaattatagggttgcataccatgcatttcagtgttctggcaccgtcggtgtcaattatatgaccatctgttgcttttttttcttcgttctgtttttacctgaagataaatagcaagattaaactgtaaattggcaagctagacatatccagatcctttctggacaatgcaatggtattgaaatttgtcgttattaccgtcttgaaaaaagttactatatactcgcatcgtttctattttccttttttttttggagatgtctatatattcagatgtactactagtggtgtatgatgtgattaattgatgactcgtgccagacacacctagtatggttagggcatctataatgtagtacaaaagtagtccatagggaataaactattccattcagccacctagtaacattgtgcaactagtccatataaagtaaataacaaaaggtatccatatgcatatggactatccatataaaataaataatattatctatctctacttctctctcttctcttaatgctaccttgtatccatacggtagaggagtgatcctctctagcgggtggtcgtgagaccctcctttatgagttcggccgggggaaatggcgcgatgatcgggagcctacttccgctcgcggtctaactgctagattgctctcgtggctgtgcgtgagatcaaggattatacaggttcgggccgctattgagcgtaataccctactcctgtgtgtgggattaagatcaacttttacaagaggtcttgagctctagagggaaatctagctgttcttcctctagagcttgagctatctcagagtcgtcctttttctcggtgggcgaggtcctccttttatagttaaggggataccacatgcaccgtttgcacctacccctccatgggaggggaggcccacatggccctaatcataccgctatcctttgcttcaaccggaagcagcatggccacctggcttcaagtggggcccagcgccgccccccgcctgacacggggaacatacctgtcattccctattaattgtatgaaaactttggcggctcaccatgcgcgtggggcgcccctggcaacgtgtcaatgggacagggtatacctgcccccactccgcctgacacagggcagaacgtgggggcactgcccccgtcccatcgcctatgaacggtcacaggccggtcaagctcgattgacatgggtcaatcgagcggcgccacacgtccctcccacgccgcattaattgcggcgcaggacggttggggcgccgcacattgaaggcgcggagcagtgtttttcgccccgcctgctctccccgccacgtggtggccgggcgagggcctcggggtagcacgccctgaaagcccgaggggtgcgacatggcaccccgaggtcccctggccacctcagcgctacccaaggggcggggggaggcgaggccgtgtagccacgcgactagatgggaaggatactttcctctactgtgcgtacccccgggcccatttcaccgacacatacatattgtgaggattgctatagttaaagtttatttatgtgggtctcatctatatagactacttttgccatatacattggtgatgccctaacgatcgtggtagctggctttttttgctgcctttgatatatcatttttatgatacagtaaatatccctgaatatctacagtatctcttctctataggtgtatataaaggagctatggtggggagctgagcctgtgccgagttcgacccttgagttgcaagcttagggcctgtttagatccccaccctaaaattttacaccttgtcacattgaacgtttgaacacctgcatgaaatattaaatataggctaaaaaaataactaattgcacagattctgattaatttgcgagacgaatcttttaagcctaattgctccatgatttgacaatgtgaagctaccgtaaacatttgctgattaattaggcttaataaattcgtctcgcggtttactaacggattctgtaatacaccctatattattttttttaataataaaataatacaccctatataatatccgatgtgacactctaagactttaccctgaatctaaacacccccttacctgcgtgagactgggaaatggctgtgattgtcgtacaacgtcagtacgtccaggggtgggaagggtgcagcgagccacccatatgcagcgagtctgcggagcgtaacggtcttccatccaaaggatccttatccttccccagcccagagggcacggcacctctccctctaagacggcacgagcgacattaatcgcccccctctccatctccaaatccaaacgagttgatcgtcgcatcgagaccaaataatgccaattgccagtgtctctgccaagcctctgtctcacctccccgcaaaacgaggcaagtgaaaccatctatcgaccctcttttaacttctaccctggatgtatgcgtgctgtacaattctgaatttatctgcatgattctttcttggcggtactttcaggatcatccaggttcacaacgaaaggtacatcaagagtaagggttatgatgcttaggcaaaaaaatccgggaggccagaagaagagctttgatggaacaggcgagcctctatatcttgggatagactttggaacttcaggtgccagatatgctcttgtcgataagcaaggggccatacattctgaaggcaaaagaacttaccctcctgtacgagttttgtgaatctctgatcatttttttcttttcagtttggctgaagaatgtagatgaacaactgattatcccaagttttgttttattggcttaaaatatcagtaaaactgtcgtttaattggatcagaatcaaccagctaactccttttcagtccataggtagaacaagattgaaaaatatggctgtaattttttctctgccatcatcactgcattggattatttgttcactcctaacgagcatacacatcctttggtttgagttactaggtaggttggtagagtcacaaactgggcaagctcctggagagaagctctcttccatcttctgggtaatatcccagccatctaccggccatccatctcttccatttcaatcgacgggacttcagccaccactttcatcatcgacaggtttctgttcctcagatccttacacattccacatcgcttcaatgcaaaattcagtcagacaaaaggtgcatcgctaatgcaagtatctgaccatgcatgctcgcaattaggaacaatggagggattcttgctggcccatatctctacaacgagagcttcgcagacgcgctgccagcagtcgaatcgattgccccggcaaatcatacggtgcgttctggttcgtccaccctgtgcaagcttgtgtcatggtggaattcgagctcagcaggcttgagcagtagagattcagcgatactgatgcaccagtcagactggttgctctggcttttgcatggagaatatggtgtttctgattataacaacactctgaaggtaattatatatcttgacaccccctatccagagagcctttacttattaatatgactgaattacacattgggccaccttttattgtcatagcttcacattgaaccaccccaaatctaattttttcactttagactagctaactttacatttcttgcactttgaaccatcctgactttcttctctagccatgtctatgactatcctatactcgggtaaagatatgaccggctcataggtggaggatttcactagcgtggtggagccaagtcctcaatgccgttgatgtgctaaagaagtggttttggatggtccaaagtagaacaaacataaatttagctagtccaaagtgaaaatgcggcaaccaaagttggtctaaagtgtaattcactctattaatattaatcatgtacacacatagcgagatgaaactatatgaacatgtaactgacgatgaatgtccacattagtgtcctatatatttttcttttgagaaaaaaacgcatttcaatgtagtacaggaattgctcgccagaaatttagggcccctttgatttggaggaaaaaatataggaattttggaggatttcaatcctatagaaaatttttttatgaatgcctttgaatcagaggattgaatcctaaccaatcatttgaaattcctatggaatggacaatcatatagagattttggagaaaatttagcaagaactctaaccttttggaaacttcctttgagtctctctctctcatttgatttttgcgtttttcctgcggtccaatcaaacgatcattcctgtatttttcttgtgtttttcaatcatctattttacacttcaatttctgtcagaatcttgtgtttcctattcctctattttttcaaccccgcgattcaaaggggcccttatttatagtgttttcatgctgcaggtgggctacgatccagagattgactcgtacccaagttggttgatgtcacagccatatgcttacatgttgccgtctgttagagcacccggagctccaattggctcaatcaaggaggatgtacgcgcacagtttggtacagatccaacttaattctcatatttttcttggatctcgttaaactatatattgatttggatgtcgtgactacaaaatgacatcaaacttagtagcttttattgaaatgtatggcattggcatgtcaggatttcccaagaactgcgtggtctgtactggaacaacggacagcatagccgcttttctcgcagcgcgcaccacagagcccgggaaagctgtgagttaattctacgacacggatgaatcgcaattcacaaaatgttttttttgtatgacacgtacgaatcaatcagtgaatggatcgatgatcaggtgacgtcgttgggttcaactctggcgatcaagctgctgagcaacgcccgcgtggacgacgcgcggttcggcgtgtacagccatcggctggacgacatgtggctggtcgggggcgcgtccaacaccggcggcgccgtcctcaggcagctcttcaccgacgatcagctcgtcgctctcagccacgagatcgacccgtcggttccttcccttctcgattactaccctctgcctaagagaggagaaaggttccctgtctccgaccccaacatgatgccaaggtacacaagtaaatcatcatttactaattcaactcttttctttttcatgatatatactcgtaacactataaatctacaaaattattacagaatcctaatactataaatctagaaaaaaattacccaaattcatagtagaagaatgtactaggtttattttatttatgggacagaaggtgtaggcctcattgatcttgacaacatttatttgtgtttgaatgtttttgtctcatatatctgcattaaggctgcagcctaggccggagagcgacacggcgtacttgcatggcatactggagtcgatcgcgcggattgaggtgatatcttttttctgcgctgcattagcatgagttaaaagaaaaactgaattattggacattgaaatttggtaatttttagaaatcatgcaactttaatggaaaattataaaaatagatgttgtttatctgaaatcacaaattaagcaccctattgaacaatggttgtttgacaaggtttaagaagttagggacttagatgtgtgtggatgcatgtgaatgggctgtgggacatatcaaacttcgggaattcgttaggccaccccatgcatgctcttttctttttttaatcaggccaactaagttgtcgaacaatattatcgaactacggttgtttgataggggctaaatttgtgatttttatcaaccaatatttattttttataattttccattaaaattatattatttctaaaaaaatgaaatttggtatgtggacgaacggcaagcaggcaaaggggtacaatctgttgaaggagctcggcgcgagcatggtggaggaggttttgacggcgggtggaggagctcggaacgataagtggacggcgataaggggaagggtgcttggcgttccggtgagaaaggcggagcagacggaggcggcctacggggctgcactgctagcactcaagggtgctaatactacgcactagcgctctaatttagcaaaatatatgtacatatacagttttttaatgatatatttgtgtatgcgttgcaatcgcaaacttataatgtacttgcattgtttctaaatatacgacactgtttacttttggacataatgtttgatctttgttttcttgttaaagaaatagtgtgaaaaagaaaagtcatatgcctcataaagaaacatagttaccgcctaacccaatagcaagataatggtctgggtagtccatgaattaatgttagagagtatgataattttagtcccatacaaatgaatcacatttcgtaacatatgtacagttcataagttaactttaaccattaatatctgtttaatggaaggattcaacatttaaaatgttgagacgatgaaagaagaggtaaatgatgacatgatgccactttgaggaaggctggtcatttaaacaaaaaatctggtaagtcatttagtgccactgctgccggatcaacctatatatttattgacaaaattttcttctagaaatttaacagatgcaactatagtacaatcgtagtataattatactgtaacttacatgtaacttgtatataactttcaaaaatctctctgtaacatgctatttcggtgaaacggaggtcgtgggaacgaatcctctcacatatgtgcgcgcaataacttttttccttcttcacttgcacaaatcttaaaacaaatttaatggttcaaaattatatgaaagttatatgcaagttatacattatagttacattgtagttacatgcaatttacagtattataattacatctctaaaatttttaggagaaaatttatcgataaatatatagcaaaagtgttctcgttatttgatgggcaatctaagtagcaacagcagctaggatacatcagggataccacacacacctataggttaatattcgaagctttggccctaactcctacatgacaattaagggcagcacactatgcgcaggatttggacaaaaattaacagtatcacacacgtttttaatccagatagctaaagccgcacggatatcttaaagggttaatagtccatgaagtgggctctaatgcttgttcaaataagatctgacccatttagaaagttacagaccataagatggcagaaaggaacactgtaaaagtacgatatatttgaagactgaaggcattcagataacagctctaggagcaaaaacagatgagtaaaaatgaagacaaccggtacagaataactagcagaaaaacaaacatgaatctgcattgaatttaatgtgaaagaattactcgttactaccagtaaccgagaggaaacactaaatggtgatggatatttgggaatatttaaataggaaattcctctctcaagaagaaacaagaaacctgtcaatggacgcaaagcagacagaataatacaaaagaattacaaccgagtcttgagctcttcatttctttttcttttatttgtgttagtatgcactgaaacctagtccagagaaaactaaaatatatttggttataaaatcttgaattgttctcagaagtgtgcgtagactacagtgataaagtagagtactggcaaataaagccccagagtaaaactgtagcatgtatttcctctgtagacatcaccatagttttatacttaaagaaatgaagtctttttttttcaagaaagaaaaagacttgaagattttttttttgtgaggaaaaactgaaatatattaaactccaggagcattacaatctcgaggtaaaggctcgcacgcacacacaggaacttgaaaacgccacacggtagattgcttagatttcagagccagctgagcaagactatgggcaacaccgttatcagctctgtagatctttccaatcctagcactgggaagcagattcaacttggctttagcctcggagagaatatgccacagcagtgatctgtccatcggcccattcttcagcatatttaccgcatttgcgcaatcactctctaggatcatcggctgcttaatccattccaccgtgagtcttatgccctccagacaagccagcacttaggcctcctctgccgacccacaatttcttatcactttccaagaagacagaagaacccgcccttcatgatcccgaatcacaaccccggcacttgcatctcccgtactcctgacaaaggcaccatccgaattaaccttgacccaatccaccggaggcttcctccagttagagaactgaactccatcttcctttaccggctccgatctctgaggacaacaactcgccttgccatggagatccagagtctttagggcagttttgtttatcttgccgaagagaatcccagtaacttagcaggaaaaggaaggatccctctacactcgcccgacccgcaccaaacaagatatcatttcgtaagaaccacgccctccagagaacgaggagaaagcaggacctcacatcctttgacacatgttgcagaatcatcaacagccaaccggccctgatctcaccaacagatttcagccgggagaagccattccaggcgcagtctgtcacggagctcccgcgcccttgtacatgaaataaaagcgtggaactcatcttcctcctccagaccacaaatgcgacagatagcattattttccatttttcgagttatccggttgcacatagtagccacctttagccacacgccaagcaaaaatcttaaccttatttggaactgagttccaaatcttctccagatgctccgttctccactcgccgagcagctagatgcccccatattggaaggcagctgagacttcaaggcgactttataaacactccaaactgagaaaacacccgacttctcatagtgccaagcaagaaaatcctccgactgatactgcggtagtttaatcctcagaatttcagggacatcacaaggttgacacacctgatatatcagtccaacatcccatgatctgtcctcctgattaatcggttcagaaacccatcgcatccggcacctacccttctggcctgccaatttgagagaagtctccctcagtatccactgatcacgccaaattttaaccttctttccatcaccaatgcgccatatcaacccctttttaagaagttgcaaaccatattccaccgctttccaggtaggagaagaatcgctagggaaaactgcatctatcaagtcacagttagggaagtatttggcttttagaatttgagcacaaagattgtcagggaaggaaattagccaccacgcttgtcgactaagaagagcttgattgaagagccttaaatccctgaaacccaggcctttcttgacaaattaagcgtctttctccccattgtcttcatgcctgacaacaatttgtagcacaatactatgagaaaagctataaatctgttaagtgtttataaaaaaaggttggcggactcatatataagcagattggagagagacaaagagtgagagtgatcatctgttaagactaccaaattaatagcaatgaaattaaagaagaaattaattatcacctccgaattggtgcttactatctttctaacacataatactttctgaaatgagcaaaggtaatgctcttcctaaaaacattatgctcacttccctctgtagcacacagaggcatttcaacatgcaccttacaggtgctttactggagagcctcttatgtactaacacagggagcaatttgtgagcacatattaatggcttagcattgaatacacaagcaactaaatatagcaagctatatgctcagttgctcggatacagcgtttgcaagaacaggatgagtccatcagctgaatcagtccaatggaaaatcacggaatgggccaacaggcacgctcttctgatgtggccattgcttttgctcgccgctgcaacaccctgtcacattagggtgaccctcgacaggctgaaactagagcaaaacgataataagcttctggatgcaccgaatattgttcaaatataaacttaatgagagaaaaaaatagaaggaagatcaaatgataccaatggagaataaagccatatggtgttaatttgcatatctgttatttgccaatcatacctttgatgagtggtggagcatgcccagtgatgctgttaatggccagatgcagcagggcctcaactcacttgtcatccttggggcatggattatctggaagcatagaaaccattgtgtgtttgatggtgccactcctaacctgacgagcaccctgttacttgccaagaaaaaagtgcagttctggagtttggctggggcttgaggactctctttcctaagagccctatcgcctggatcttagtcttttagaggtggttgttggtagtcttttgtcataggcgtgaacataatctgagttctactaaggtgcacgtgtgtactcaggattctaccctttcttctttagtacaatgatatgacatgccaagaaacagtgtggtgggggggggggatgtgatgaggtccatagaggatttcgctcgaccttggtgttgtcatggattggactagggaaagataccaatggtagggatcaacaccattgagtctgcaccagagcagagcaaggcctgctcagtgccagtgatcgggaagcactacagaagaaggggggggggttagaaatattgtcgttttcattacaaattaccgtggataacgcaattaatttgttcaggtgggagcaaacatggtggcagaacaaaatcaattcataccatacaaaactattttatctgttaatagcaaatcaactgcaatatcatcataaagcaacttcccagctttgtgaatagaaacctcgaattaaatttctgacaggttgctggaagtaaacaacagtaaacaacataatggggtgtaatggtccaacataacaacacatatttgaatcttcaaaatcttgtgaatgtagccatacaaaagtacaaaacacaatgtcttatgaaactcatattagcctaatcagttctgagaatctgctaaaataagtgtgaccacaatacacaagaaatagtacatatgcatttcaccaaaattgaaaaataaaggaataaagggaactgttggagttgaatgcttacttatcaagagcatctttgagacaaaattggatttatcttcaacctgacatcaactcttgcttcattagcaaccttcaaaatggcacaaatcgataaaaatttcagaacgatccgaggtactagaatacaggaacagtcaggtaatttgggttttattctcaatatttttcaccttaatgtttttcatgagcttcttagacagtcctgccatcctttgcaatttgggttgtattctcaatatttttcatgagcttcttcgacagtcctgccattgtttctgattgtaacagaaattccttactactttatgatcagcaccacctggtttaaaagaaagttacagctcatggttgattgggatgcacaaactattttctgattgcaacaggatggaattagagcttgaagactgatacacaacaaattagccaaacagcaaagaatgcaacaattttcaacataatttcaagaggaagaaattctcacaatataatgcaatcaaagccatgcactcatgaataaacgaagccaagatcagttacaacctataaattattcaggtacaatgtacaactcagtttttatgaaaattaagttacattcattttccattgctatattctactccatcctacatcctgcatactattgttaaaatatgcaggagcaaagaattttgcagagtgaaacctgtagcaactaagaagtaccctcaatagggagagggatgccacaaaagactcgcaggtaacaatcattaacctctcagaatcgtatcaatagaattaaatacattaaattatttggtatcagcatgctggtgatatatgttcctgagataatactccatgtgctttcttgaagaaaagcactcaagccacagctttggagctgcaggatgcacattgtacaggttggaaatgaacctcttctctgagttagcaagcacagttgcaggggctaatgttcttctaagaagaccattctctcggagccaccgaagcattgtatacctaggctttacccggttctccaaatcaaagcacagaaatgctggaaataactcgaggtactccactgagtatcctagctccttagtcatatagttcaacttgtcattaagcatcttctttccctggttgagaatctttgggaatacactcacgatctgacacagcatcttgtactccaaccctctttccaggaggcaatcaaatctctcttgcagagtatcccgattgctgtgcagtacggctattatctttgtggctatcttattctcaccatatccaatgctcttcaagaattccagcttgccgtcaatatgctgagctcttttatcagccttcatcttaatcatccctcccaagaatgctcgctcaatctcaacgtcataactaacatcctccaacacaaaatctggaaataaataccgcaaactctccccaccatcagaaatcttctccaggaaccaatgatccagttccattgcccgcagcacaccagggaggttctgcagcaggttcttcccaacaacgtacgggtgcttctccaccgctgcattaacctcattcactgccaaaccaactctcctcaggtactccggcaccgaaatgacaacatcaccaaattcaagataaaaaaccatgggattggtaagcaagaatctccccacctcctctcccgccatccccaaccccttgaaaaacttcaacattttaccaatcctctcctcctcaagctcaagaaacaccctctggttgttgcagccgacaaggtccccaatgcccccgacctctgaaccagcatcatagaacatccatgtcctgcggcaaacccccaagaaagcatcaatgtcattggaggtccccaaaccagggcccagccttccaaacaccttgccaagatcgtcgacgagacggtcactgctggagagatcgttctcaagaagcgaggggaaggcgaggcaggcggcgatgatggcggcacgggggagcgggccgaggcaagcctcgagagaggcaaggcgggaggtgatgaggtcgggcgggaggcggaggaggacggtggggaagaggaggccgaggcgggaccaggggaagccgaaatgcgcgagcgcggcgacggctgggaggagggacgggtggtcggcgaggaacatgaggtcggagcgcgtggtcgggggcaggccgatggactcgaggaagaaggggagctcgttgagcgggtggaaggcgaggtggcggcggaggagggaggggaaagcggaggtgcggagggagctgggcacagcggggaggccggcgaggaaggcgtgcagggagcgcggggagcgcgcggcgatggtgtcggcgtgggaggagggaaggcagcgcgtggcgtggaggtactcggagacggcggcgcgcgcggcggggacggcggcgcgccggaggcggtagggaaggttccatagcttcgggggtgccgacgaagccgccgcggtggagagcagccggcggagcgccgccgcgcggaagagcggcattgcgccgcttttgctccacagaggaggtggggtggggatgggcgagcgaggtttagggtttttcagactttgtttgcttggcagataatggttcggttcagtgaaaaaaaagagtgtgaattacagtttggtttatcttttttaccgttcactttagaacactcataattcaatattttattttggactagctaaatttacatttattttactttggaacaccccaaagccactttaccacatcaacaatctctaggatattagttatggcatgctgccaaaatcctccacctctgagcaggccatatctttgtccgagtataggatggatattaaagagagtcgaggtgatccaaagtaaaattaaggtaataaaagatggtctaaagtgcaattcactaaaagaacctgaaagagggataatataataagtaacatttgcaaccgagatgttgcaaattacttctaccgactcaaaaaagagtgcattgttacacgagagaatccacactactgacttactctcttggtttcaaaatagacaaacttagtacgagatgcataacaatgccaaaatgaaaaccatacatttaccttcaatttaaatccattctcacccttatcaaagaaactctattcccattcactcaaataaacaaacttaaggcctgttcggcaagctgggactgcagctgcgactgttgcagcccctgctatcttggagcttgtcagactgtactagttggttgcggcgcagctgcaactccggcagccgaataggcccttagcacgagatgcaaaacaatgccaaaatgaaaaccatacgtataccttcaatttaaatccattcccacccttctcaaataaactctattcccattcactcatttccattaacctaaaattggtactctctctttcacaatgtaagtcattctagtatttcctacattcatattgatgttaataaatctagacatatatatctatctaaattcattaatatcgatatgaatgtgggaaatgctaaaatgacttacattatgaaacggaggaagtaagaacaaagaaaaaacccttaacaaaatatccaatatgttgataccagtttaaagaaatgtagcactcagattagttttaaatcaattaaagcatcactcaggacaagttgcaaaaacctagtaaaaatgaaaaaaaaaggacattattttttttaagataatggaagatttattgaacttggcaaaattttttaaggacactcctagcctctacactacgaaagtgcacacaaccaacacacctcacacacaaagaaaataaaaaccaaactaaggttcaagaaccttgcacctgaaaactatgttgccacccatgcaccaaggtgaaaaaaaaactcattggccacatgctccaaatgaatacaagccgaagtgacaaaactatgtgaaccgggcttctggagaatagcccatgctcgaagctaatgtgtaaccaagaaaataactagcaaaggagaagaaacatatttgctttcaaaacccataatcattcctcgaaagccaagtgacccaataagttgttgctgcccctacaagaaaaagatgtctgagctatttggtttgtcgcaaagtccattgcccaaacatatgtgacacaatcctaggcgaacaaatgttcgaagaaatctggattagagaccaaaccgaccgagctagccgacaacaagtctgagctcctctcctctcctgccaccgcattgcacgccactcctctcccccgccgctcgtgcactccatggccgacaatagccttgttacggtcgccgctgcaggatccggcggagagggaggaggcggggaggccggcgagcgggtgggggaagaaggaggccagcgagcgggcggggggaggaaggaggccagtgaggaggccgtcacagagcctcagccgtcaccttcgcgagccacacctaccgttgctgagtcgccacaacgctggcatgccaacaaccgtagccgactgacaaggaagctccaggagggaggaagaatggccaagagggagaggggagaaggaggcgccgacgtgccgctgtcgagggcttcttcaccgactccggcaacttcttcggccgtatccacgcccgcctcgtcgacacctcctcctctgctctctcttatctgtctcgctggtgtcgattggttaaggagccactcgcagctaacatgtgggacctatgtagggcccacgctgactcaaccggaggacatgtgagccccatatttttttaatttttaatttgtatatttttcttctagtgccatcatcaccacgtaggacgatatttttcttctagtgtcatcatcaccacgtaggacgatgactaagtcaaaccagccacgtagacgccatgtcaacttaagccaccgttcaaaccgtattagaccttattttcaccggttttgacagttgagggaccagtgtttcagagatgaaatcggtgtcaagtgaagggacctcaaatgaacttattcccaaataaatcaacacagtaattctgggcccattcttcccctctctcgcaggccgcagaacggcccagtaagtttactattctttcgtgcaaatcaagaaacggacgcgaaacctgagagaaaactgcagtgggagacggaagcaaattccggcacgcctccgctccaagcgggctcagacccgaacccggcaagcgcggcgtcgtcgtcgtgtataaaacggcggccacgccgatcattcttcgttccacctcgcctcgcatccaccgtgagcggagcgccaactcgctagcaaatcagaagaggaggttagagtttcgtcgtgagcgagcgagagtcatggaggcggacaagagcggggagggggagaaggccggcggcaagacgatctccttcaggtgctcggacggacaggccttccacatgccggtggccgcggcgatgctaagcacggccatccgcaaaatgttcgacaagtaccccagcatcgaccacggcggcgtgatcgagctcccccaccaaatctcctccggtatcttccccaaggtcaaggaatactgcaccaagcacgccaaggtcgacgacaagggcaaccccaccgtctccaccaacaccggcgcggcggcggcggcgtcaagcagcagcaccgacgacgaggaggaggacctcaagaactgggacaaggagtttgtcaacatggaggtgaagcccctccacgacctcctcctcgtcgcccacctactcgacatcaaaggcctcttccacatcacctgccgcaaggtcgccgacatgctcaagggcaagacctccgaggagatgcgccagatcctcaacatccgcaacgacttcaccgaggaagaagacaaggcaatcaaggagcagaacccctgggtcttcccggatccggagtagaagctagcgtcccctccctccccgatcgagcatctgctctgctcatcatcgcttaacccgtcgcgtgtggttgctccccgtagttatctctggtaggttcgttcagaacttcagatcgaatcggcgttcttgcctttttacctttcctttgcatcatgtccaactagaacagaatctggtgtgtgtcgatcgaaatgttcaactgcttaattgtttgcatcaactgaaatgttttgcccctgccgctttatgctgatctgttcctgcatgcagttgattaattagtcatattaaatgatttctttgtctatttctggattagtactagtattgatcaattagtatgctggttggcacaatggcgtgtggttcgttgaggttgtcttaagaaatttggttttctgatttctaacgtttctctatagttggcatatttcttctctgttttttttggtttgagtgttcagatgtgtatattgggcttggatgcctgcaacaagatgttcttctctcttgttcatgcatttgcgtaggtagcaattctacacttcgatttgtgcatcgtggcacatctgtgaagacactattgtgagatttatgtgggctcacttggtttcagagatgagtggagtgatctgatattctgatcagtatggaatgtgctctgtgactttgtgttgttatggtaaaccggatcccctcaggcctcagtgttctgctgcatctttccctggtgtgtttggttcccctagatggtggtttcccgttgtgttgtttgatttgcatgtgggttctctgaattctgaggtagagtagtagatgtatgtgttggttagatactaatttgtgtgttgttgttgctttgaagagtatggtttgtgacatgtcaatgtgctagtacgtatatcacttgccatcacatgttgcaggttgtgacatcatggttggtgttttttttcgattgtcatcccgattttccaagtctggaaaaatttctctgttttttcttttcgttgttcataacacactgcaaaaggcaaaaaataaaataaaaaaaaggataacactcttgattttctgaactgcgcagagcataccaaacacagcactttttgtccaactaaaggcctagtcaggtctagaaagtggccctctcttagagaactgaccagtccgggaagaaacctcactgctctgaaacagaggaatcaaatagatcaggggaacaccatactaatggctggtaaatttgagaaagaaaataccatttcaagttatgagtagctggcattttgtgtaatccttgtggaagcttttgtcccgaactccatcagtgtacttgtttggttttaccaatttatactgaggtgccaaaaagacagaaaaaagagattactggatttttgtcaaaccaaaacattttaagaaaattgtttggagtggacatttcgttgtctgcaacagaccaacgcacctgcatagtttcaagtcacttgtgagttatgaagatgcaattccttaatgaacatttgcagttgctggtcagcaaaacgtgagatgatacggtaatattttgttgtaccaagtgatttgcatatgaagacccaaaagtaaaaagacaactgacgctttaattttttcaaataaatttctttaaatttgatcaagcttataaaaaaagtagcagtttttataatacaaaacatactattaaaatatattccatgttccattgttacaattgcaatatgcatactagagattggaaagtgctttctattagaattgaagcaagatccgaaatttcagatacccccaaatattccaaaacgaaggtcttgtttagatcccaccctaaaattttttaccctgtcatattgaacgtttgaacacctgcatgaagtattaaatatagtctaaaaaagtaactaattgcacatattgcgactaatttgtgagacgaatcttttaagcctaattgctctatgatttgacaatgtggtgctacagtaaacatttggtaatgacagattaattagacttaattgctaataacggattaattaggcttaataaattcttctcgcagtttactgacggattatgtaactagtttttttattagtgcccgaacaccccatgcgacaccctgtataatacccgatgtgacacaccaaaattttacagccctgccctggatctaaacacccccgaagtagaagtgtctgtgtaattgtttcgaattgacaacatggcctagtgctgctctccctaagaaggaatagactacctggataaaagaagaagcaggagagctcaccgttgggctctataagtcccggcacatcctcagagtccaaagaaaaagaactagcatggcaaaaagtgctatctattctattagaactgaagcaagatccgaaatttcagatacccccaaatattccaaaacaaaggccttgtttagatcacacactaaaatttttcaccttgtcacatcgaatgtttgaacacctgtataaagtattaaatataggctaaaaaaataactaattgcatagattgcgactaatttgcgagacgaatcttttaagcctaattgctccatgatttgacaatatggtgctacagtaaacatttgctaatgacagattaattaggcttaataaattcgtctcgcagtttactgacggattatgtaattagttttttattagtgcccgaacaccccatgcgacaccctatataatacctgatgtgacgcgccaaaaatttacacccctatatctaaacacccctgaagtagaagtgtgtctgtgtaattgttccgaattgacaacacggcctagtgctgctctccctaaggaggaatagactacatggataaaagaagaagaagcaggagagctcaccgttgggctctataagtcccggctcattcatcctcgagtcttttggctgacgtggcatcctagttggcaaaaagaaaataaaaaaatgtagaacgcacatgtaagtgagcctagatataatagggcccacatgtcaaggatttcttcttccttcaatccccctctccctcctctattcctaccatctctctccccacctctcccctctttccccatctctctctaggccggtggtcgtcaacggtaggaggaggggcagcgatagcgccttgccttgttgcggccaaggcgatggcgggtggggggggggggcacaacttcaccacttgcacctccattgcggcaaccgcaaaaggactctacagtcaccatggaaaccgcctcccctttgttgcctccatcaaggaatccacaggagggctccctggctgccaaggagaaagcctctcccccgctgcctccactgcaacacaaggactccctcttctctcagatcatggcaaccacagacccactgcccccatcttggagcagtgtggtccctccccgaggaaccccatgtcatgaagcctgagatccagtccatcatcaagttcgtgaagcctgagatctagtccatcatcaagtatctgtgctagagcaaccgcttctctccatcccacgctcccgttccgtatcaacttctgcacccttccctcattcggtctcaccttctagctttggcctccaccctcctccgcctgctctcggcctccctccaccctcctcgagcttggctcgaaaattggcactgctagccttgccctaggcgtggtgctgcccatccatgccacctctgtcggggaaatccgcaagaaggctccatggctgctgaggagaaagcctctccctcgtcgcctccactgtggcgccaaaaggactccctcttccgctgggtcgcaatcaccaaggacccactaggccctgtcctagagcagtgcttggatatccccacgacgctccctaacctccgccacaacgcctccctcaacacacccctactcgactcccatggacgcttcgtctttgtattagcgctcccttattgggacaccgtcgcgatggaggttgtcgccgtcggccacctcccacagacaagctcgccaaccactagctctttccccgccagcaaactcgaagagaggagatagatggggagagttggaaatccacttacatgtgggtcccacatgttttttattttctttttgctaactaggataccacgttagctaaaaccacctccaatactactaaatgatctgatttgaatggtttcggaaagatggggcgtgaagatttctggtgttagggttagggatatcaattaaactcaacgtaaagatgagggatcgcaagtggacttactgcccacgtgaagattccttgttccgaatggacaagagtacttctcggcccatcaccccccgcgcatcagggcccatgtagtcggaccattcgtgcagaacaaaaaacggacgtgaacgtcacagattgagtggactgatctgatagtatgcacagtatgctctgtgtgttgtttaaacctgctcccctatgtattgtggtgcttttggtttcacagattgagtggactgatctgatagtatgcacagtatgctctgtgtgttgtttaaacctgctcccctatgtattgtggtgcatctttccctggcgtgttgtttccctagatggttttccggtgtgttgtttgatttgcaagcatgtgggatgtgtattctatgaattctgatgtagagttggctatagagccaatatgtgtttggctgttgctttggggagtatggcttgtatctgatgcttttcaagatccatagttctcaatgttctatatcagatatcgctgcccatcacatggtgcaggttgcgatatgtttggtgttttttcacttgtcatttggaatttccgagtctggaaaatctgctctgtttctttttttcctttcagattcttcatagtgctctgcaaaattctacgctgtgttcttacattgttcaggacactgcaaaaatagaaaaaaagtatgacatgaatagtggtagcactctttctaggagattttctgcactaaaagaattggccgctgctactactctttctaatatgtattgatggcacaaattgtctgcggctactgttattttgtatatatggttggaaaatatcgcctatggttgaaacaaatatattctggatgtcatcacttcatatttgtgtacaagtctgctcatgtgtgatattttggtggattgaattttcaggattttcagtgcatgcagcagtcgtggatactgttttactgtgtactctgaaactacgtggttcagtgttgggtagggatcatcgaattttcctcagttagagcatactaacacaagttgaaccaatttcagatcgaactatctccaagcatcagtatattgtaggaattgtgtgcatcagtatttcctagaaatagcaagtggttcagcatggcctgcaaactaggttatggaaaacaaggaacaagtttattttcggaatcaagcttactttcaaaaacaagtttcaatttcaccaacaagaagcagaaatcaatgcacactttgcgtgtttatccattcagataccatacagtaacaatcagtatatcacagtcaagcttatatagaggctggcttcattttcaacattcaggtacagagcattcagatggcatcattcattcttacattgcagttatacacatccatgctaccgaaaggactgttgttgccaaacaaattaccaagctatttccggtcagactatttgcagaagctaaggctttaaccattgcagaaagcatataacagttcacaactggagcaaagaaaccaatatgcgatacgcagccaaactcagttcacaacctgtctccacgacttctttgtgcaagctagcattggtttcccaacaaatgcttcaccaagtgctttgctcagttaagaaaagagaaaaattcagttgctgatgttagtgttagcggcagaacatatttgactgctgatgttatcatgttattgttaactgcagaagcagcagtgagtagtactagttttcattcgagacggaaatcccctttgttttaaactcgatcagtgtttactcttttccccgagcgagaaaaaacggaaaatatgtattactagattttgcaaatcaaacatcttaagaaattatttgaagtgaacagtgcaatgtagacaattgcgtcgtttcatgtcgcgtatgagcatatcatttcatgttgaacaaatttgcagttgtggtcagccaaacttgagatgatacggaaaatacactgtacgaaatacgaagtgaatgttaatgaaggcaaacaaacaaaatgccactgtcaaaagccaaaacattaagataattttcaacctcaacactgaaaccacagaacatgctttcaaccatcaggttactctgttaccaacttgtagtcataatgttcgcaccaggtggctgctttcctcctctaaataatctcttggatagaaaatgctcccaagactccggtgcattcttttccaagtagggacaaaaaaaaatgaaaccacagaacatgctttcaaccatcaggttactctgttaccaacttgtagtcataatgttcgcaccaggtggctgctttcctcctctaaataatctcttggatagaaaatgctcccaagactccggtgcattcttttccaagtagggacaaaaaaaaatgttgttacaaaacttatacaatctttttcagccaacatgcaaaaagaacagctgacttcacaaaaaaaaaacatagtagacattagatacatcagcggggggcagagagagagagagagagagagagagagagagagagagagagagagagagagagagagagagagattgagaagaggtttctatcatcagtataaattatatgaaactatttgttgaaaattgcttgcactgaactgagaggatcacatcgtacagcagcataagttcgaagtgttaggctcttccatcccaaatagcgaatgcatgtttggcaatgactgatccaattgagaaagaaatagcaagagaagagaagacctactctatatgagagctttgataccaacttgctggatctcacgcaaccgccaaaccgggtaatatgactcttcctctggcacctcatcactatccatcagttgcatggcccatgcataaaagacggtttggatggtgtcctaccagaatttcaagcaaaacaaaacgataaaagtattagtttatttgttacaaaatatgggctatgctccacctttgaattaaaagaacctaataagagcaaagcattattccctaacaatgttttctaaaggcaaccatatggttcattatatattttttagaaattcataggatcctacccaaaaattccatgacctacttggttctatagaaatgaaataaacatttatgctatttaatagtagaccgtctatttaatggtagactgtacaggtccaacctcccattcaggtttataataagaaactactatttaacaactctagctacatgattagctgtgtaatcttgaaaaaagataattaatggtgcatgctcctggtgtaaaagatatttacccctggagaatattgccatgagttttgcaagattaaattaccaaatgggcaaaaattcatttagttaaattctatcaagcaaggagctggtatgagagtgtaatcaataaggccgttgagctaacaacaaagctaccatctatcagattaatgcacaagtcaatagaaagaaaaacattagtacaacaaaagcagcatatagccctatggatagcctacctgccctccttctgttacttgtccttccctatcacgaacacagtaaatttgctgtgtttggaactgaaacacattttcagaaaagtatatgtaagcagaataaacaacaaaaatgacacatttaaaatttaaaatgacacttagccaattacccctacaataatgatgggcgtagatcccatcatttttgtttctcttacatcagcatctgaaatatgcaaaatctgcaaggcaacagaaaatcatatctttaatggggttatatagtccagctttagttccttttatggggtcatatagtccagcttacaagcaacaaataatagctcacatgaatgaatccaaatctacagaatggggcttaaattgactaaatactaaggaaggcatatgtttaatctgtagtttacaaaaagaaaactgcaggacagggaatgttgccaaatataggacagaagaagtgcctactttgtgatcgaaaaatatgccctgtgatgcataagcatctctctctcctttgcagcgttcaatcacttccttggtgcaatacttttttaaggtcttcacatcaccctgaaagcataatgtgtagtcttgagataattagattgtttaatataatatcagacaatatctattaaaaagcattaaagcaagttaattgaccgcttcaaactcacgcggatagttttatatcagactcgttagttttcataattccactacatcattaggaccttcaaccacacaatcatgctagttcaataatgagaatttatcttggtaagatggatgctaccttggaatatgcagtaagaacaggtttaatcatttcttgaacatcaccagcaaaatcaggcaaagaaaaggatctgtgcacaaaatggtgacatagttcagatatatcctaaaattatcaaactgtgagttgcatatattcttgaacatcttacgggtctctctgccgaatttccctgaaagacactgcagttgcggtttcctcaaaaatagattcattcaaactgcaaggaatgaacaaagacaaatcaacagaacatcacaagttgatatattctgaatatgaccaaacaaagagaaaatatattaactaattgcaactgtaagaaagagattattgcatttagttttcatgtatcatcaatgatattctgtttatttggaaaccatatgtactttttatacagaacataatgtgttaagttttcatcaattcatgtatcaccaatgatattctgtttattttggcaaccatatgtatttttttatacagaacataatgtgctaaatcataaaacaaataaataacatagcataactctgtttgaaataaatcagaatcaacaatagcacaaataatggagttcaattactcttgaattttctgaaccactggattgtcacttgtctcccaccgctctcgtacatcctcagctacctgtacaaatgtaaaacatcactggtacaggaaaaactgcattccaccagtttcatgaaacaaaattgtacagaattccgatggtacctcttgtcctatgttgacgactggtttggtatattcattcactctcttataggctggatgacctcgcatcttaatagagaaaaaaaggtttcagatggaagattaaagtagaaaaaaaggagatgaatgttcaggggtcccctttagtaccttattcttaaatgcttcccacttttcacccagtactgatttctttgttggtacaataactaactcagttcgagtactcttttcaactgttccagcagaagcatgcctggcatgatttctcttctttctgctagagctagagcttagctcatctttgaaaatttcatatccctgcttagcataagttgagactctagtatccctcaactttgcaaatgcaccagacagcacaggtgaagcagatgaaagtgttgacctcagtttattaaacaatgtatagccacttgtgccagcttgtgacttgtcatctgaatgtgacgatgtctcagagtactcatgtttcgaagtttcaggtgagccatccttacaacttgaagtatcttcttttcctagtctaaaactctcctttacctatcaatagatcccaacaaagcaaggaaactccatgtaaaaaacagtaagttacatactggactgatgtgagatcgccataatgatttatcactaacctcttctgtagcggcagacattttttctttcacatttgcagtaacctacaataaagccaaattcctaagcatgaaatggaacaaataaagtaataggacatgtttttctagaccaaactatcatacaagaagggccactgtaggtgacatacctttttagatgttgcctcagcttcagtcaaaacatcatcaacgctcttgtaaattgtctcagctgtttgcttagtcctgcagaagttattttatgatatcttcaagtaagcctatgagaaaaactggaatttcttacataaagaagaatataccgataaacatccacatgtacaagactcaaaatggaacaagtgcattgcttttattaaattataccttactttaagatcttcttttaccccactaagtttctcactgaattccttcatggatttctggaactcaggattactgcagccaaaaaacaggaataagtaagaagtgctgataagattaaggtgattcccgagtaaacagctgaaggccaaatatctaatactccttccattccaaaatgttcgtttagaactctagcattcttctctaaatataactcactacagcacatttaggcacttatttcctctcgtgtgcttgttaattgcatgatgcctgcctcatgaaaaaagttaggtatcttttccaatgttttagtaacaaggaaaaatgctcccatgccccctgaaaattttactcaatccactatttaaccaccatgttccactgacatctgggtccacagccaacatgccagagaaatattaagggacaagaagggatatcacaatttttttcacaaacactttgttaattcctgtgcaaaagtcaacatgatctacaattggaatgagtggaaatatcaattgtcatattaaggctaacctcttagcctcccccttcaattgttttgagaactcattaaagacacttagattccgattattcaaatgcctatatccagtaactccttgcaccctgacacttgctgcctgcacacatgataagggagacggcaatcagtaaactgtatgcataaatactccctccatctacttttgatagtcatatttccaaatctgaaaaatttatttttgataggcatattacaatccaacaacttatcatcttaatggctttcttggatttaatgcgtgactcttcattcttccacacaagattggctacataggcatcgagaaatgtaaatattaatgaatcacttgtttacgaggaatgagtagtagtatatttaaatggatgataagtataatcccttatccttggtctatgtgccaagatgaaatatgactatcaaaagtagatggagggagtataacgcaaggaataaagttgaaataacataagcaccacatagtgaataatatatccacagacatccctcaattcattttattaaagaaaagaataaagcatcaaaatacttttagaagtatattacactgattggaagccattatttattccatgtttacagaataatgtttatctactcaacggaaatcttaaccaagttcaataataaaggcaagctctttgctaatgcaaatgcataagcagcaagtaattatttctatctctccgagagatttagttcaagactgctatgctgtgacagcataccagtctcaaaataaaactccggcattctaagctacacgcacaaagtgttgaagtgatatgccatatacagctcaaccaaagctacatccttgttgttcgtgcatcattccccggtgatattttgaaggattatatatgttaactaacatttctccttcaacaatttcgattgagatcagttatagctaactttctctttgggattctcaggcgtatttttcttccaaataattcatatgaacatttaatatccttttatgtgctcgacatattcttcatatgattactaagatactgaactaaaggtgcacaaaaaccgattgaaaagtacccattttcctcagatcaaaattccattgtcagccaacaaacagaatttttcctctcattccacagcgttctaaatgttgaattttcaacagatggaccagagcgaatgaagaaaaaaaatacagtaacataggcaaaccaagccacaatttatagtatctcgctcagtatactaaatcaacaatttttattccaacctcattattctcctatgcccccaacatcgatgaacaacaaaaacgaacccgaacaagttggctggcgctccaatcttcgcaccgcaataataatagtacagcccccccgcgcctcctcgaaggcgcttcgcggacccaaaaaaaaaatcaaagaaacagcataataataagaagaatcacactcaccaatcgcagcgcggcttccgacgagggccgcctcagagcccggagcagcgccgaggtcgccatcgctggagggggaacggaaggaagcggcggggggcttcggcgaggctcgcagggcgggggaggtggcggcgcccgggcgggggggaggggaggagaggcgggcgggagggggagaggggagaggggagaaagactaaggcggccctaggatttttttacacgagggataggttagcctggtgtttggatgaaggccgaggctggaggctggaggctggccgggagagcctgggatagggaacggaacggaacgggcggcgaacgactacatgtctagggttcgcagcggatgaagcccgggggacggggggagggtggtcggctccggggctttcctttcttttttctcaagacaagagttttgcaggggacttccccattggaaaccgatgcaagaaactctaattaaaattaaaggttcataaaatcgagctaatcagacaagtatcacagatggtactataataaacatttggtgttataaaatggcactcttatcttctagtaaatttttttgttggttctcttccatgttccaaaatattataacgtcgaccatatgcaaaatttgttcaaactagatatagaaaataatttctcatattattacaaatccattaaaactagcatttgagttgaaaactaaaaaaatcatgataaacagttcaatggcccatgcctatacagtagatttgggggagggatccttgtggaccaaagtcgaagctcctccaaggagcacctggatcactccatgaatatctcattgcaagacaatataataaagagtaaatttcataaaactacatgttttatggttcaagttacagaaaagcacacacattttgacactcgacacttaagtacatatattttggtagtttagtttcacaaaaccacactatcaatgaatggattcacccgtgagatgatgtggttgttccatctaggataaggatgtggcatcctattaatttcatgcgatggctgataataggatgccatgtcctcgtcctaggtgaaacagccacgtcatctcgcgggtgaatccatttatcaatagtgtggttttgtgaaattacacaaccaaaatatatgtacttaagtgccaactgtcaaagtatgtgtggttttctgcaacttggactacaaaacgtgtagttttatgaaatttactctataataaaagattatacttctttaatgactcaaactatacaacaactaatcaaaacatcaatatagctccgtccatcagaattttttgagtcccctttttaacatagtatcatctctaaatttcatctgactcgggtgtgattgcggaaaaaatatgttgtttcacctatcatgaatctttgggcttgtaacttcgtatagaagctcagcctaagtagggttcatattgtgtgtgcctaacctagtggagcatggctctagaaaaccttaatcgtccttccactttcgaaatagttaggtaccccttcaacttctcttggtttttgttatattaaaatttagccattactactttatcttattattatgtgtgatagctatactgttcaattacttatcttcggaacccacctttcaagtatccgatttatcatgggctttattcctatttgcacttttgttttttttaatcttgttttgtttttcttgtttagcgatttgcttgcaggaataaggttgatctgcaccgacaatatcaacaatacacaaagaggtatatcgaccgctaagacgcaacacaacaccatctcgcgcggttgtagttgagttgctaacttctctcctaaatcatgattatctcaactcatggaaagatcatgccactattgctcatatcacaagagtttcatcgagaattagaaccaaaaattattttttatttagttttaaattgtgttgaaaatgttgtacaaatttcattaaactaaatttgaaaatatatttatttaaaaattttaaattgtagtcgaataattccatcccctttgtttttttacgagtgactttttttcacttgagaatagtgttctctcgcaagtatgagaaaggggcaacatagtcattttgaaaaaaaaagatgaactaatataataggtatagaagggattaaaatgagaactcaaaggcatgcataaggatgagacaaaatttagagatatagaagaaattgagacaaaactccgggacacaaaaatttctcagaagaaagttggtgagagtgagactagtctccttttagcttggggcactagggtgcaacctgatgggtgtccagtgctcctctttttttaaaaacggatttgctatactgctgtcgacagttaacagggggtgaaaactttcaaattttaagccatctaatatgctttgagatttgtgctggtgaaggaaaacggtttaaaaaattcagacgcgtgcagtagggatcgaacccaacaacctccaacttcgagttttgttcacctaaccactttccctatcgtgcttttttgagttacactcgagttacatattagttatatagtagttacatagtaggtacaatgtaatagtagttacaatgtaattacatagtagttatatttgaaagtatttcatcccaaaaactgtcgacagttgtatagctactcccttaagaaaacatgggataaatctggcctctacatataatcggatgtacatagccaagggtgtctagtgatgccttccaactgggagtaataaacaaataaataaaaggaaactcaactcccagacattttcttatttctatatttacagcaggttgtcgatttctttatgaattgccagaggacgctagtgatctaatggtttctttcgtcatgagttaaaagacctggattttgtaatgtactctacccaaatatttttggttaattggattcatgccattgtaaatataccatattaaaaaatgccactactattcgcgatatcggttaagtgccaccataatttaggaaaattggaaccataccactacatcacggtatcggtcaaaaatctccgatagctctaactgtatgtgggacctagctgtcagttccatcttcttcacctccctctcctctcttctctttccccttcctctctccaatctatctcttcggcactcctcatcctctaccaccgtcgccgccgccattgtcgatctcctcccaccatggacgagagggctcgggagccaccaccgtcgtcatcgaccacctcccatccacgtcgaaagggaacgggagccaccgctattgctgtcgtcatcgtcgacctcctcccagccatagtgggagggctcaggagccaccgccatcggcgacctcctcacatccatggcggaagggttcgaaagccacggccgtcgccgcggtcgtcatcgacctcttcccatccattgcgggaggactcaggagccagcgtccttccaatttttcctctttgtcggtggcggcgtcttcccatatcctcctcttcgtcggtggctgtgacaagggctaaaggctgcgccggcgagctcctttatcaagcggtagccctggatggcaagccgatccccggagcggtggccccagctcatcatggacgaggttggcatccatatctggtggggggggagttagcaacctcgatgccttcccacttcctcaaatggtgctagaggccagctgcgcatgttcagcaccaaggattccacctccaagccgtcgagcgtcgtcaagctgaagagatgggcatggtctatgccattgctgccaacctcctcccttccacggcaggagccaccgctgtcaccgtcaacctcctccagtccacagcaatccaccaccaccaactgtgtcatttgcaccgaccagccaagagagaaagagggatggagggagacagagttgacagaatatttgacggcaatggcatggttccaatttccctaaattccagtggcacgtagccgatatcgcgagtagtagtgacatttttctatgagtaaattgcacccacggtacaacaacttggcaggtgggtgcgatatagtgcaacaacttgagaattgagcgttcgagtgcatcaacgtggcgaggcatatgctaggtgagttttttttttcccgatatcaataatgccattacatagcaatcctacggatattacctcagatattaaatttaatctttaataattgtattgctcatacagtttacatccaattaccttaagattttttttgttttctttaccttctcaaatatcaaccgaaatataataatttttacatcaagtttaattgacttcaagttattaattattataataaaaaatataaatatgcttatacaaatccacactagtatattgtcaaaaataattacttaaattgaatctatatagaaaatgatccaaataattaagttgtcgcatactttcttagtttattgtatcaaaatcgcacctaccttacaagttacaagttgttacttgttacatttatatgatcacttataaagttcttatactaaattgcacatattagttgttacttgttacatttatatgatcacttataaaattcttatactaaattgcacatatttgccaagttgttgtactagaacactcatttctcaagttcttgcaccaaattgcacccacctgctaaggtgatgcaccgtgggtgcaatttactctttttctaatatggcatatttgcaatagcatgtatccaattaacccaatattttttttgaagctgaattctacccaaatatgaggggggagggatgaataggtcatccttcacacaaacgtatgcaagacaacgtttaatttctcgaggcacatctacagattagctggctagcttcagtcctacatgtccatattaatttacatcaagagcttttctggcaacaattttgattacacgtgtcgatgaaaaatattacaacaatgactgccctttgttcacttttgtgaagtgtgcacagctatgaaaagctacgatctgtgaacactcctcggagtttgtacattgcgtgaactcatgcttgcagttttcaggagcctgcgaaattcatctaggcttatttttccatctctgtcaatgtcagcctcctccaggaggggatcaatagaacctttcagtcctgtttgctgcagacaatgtaagaatacatatatgagaagcatgaactggttgaataaattacgatcttatgctatgcaccaattaaggattggaatcttataggaaataaatcaattctcacgtgaataggaaaagagtaatgtttcacaggtatttgaagaggtgtaccattctcagttcatcagatgtgatatagccatctccgtcaacatcaaatttatcaaatgcagcttgagacaatgatttccacttctcagtatcatgttccactagctgatgcacatgtaatgttgcagcaacaaactcttcgaaatcaactaatccatctgtgttactgtcaatctgcccagcaatgaaaatctttatgccatgatagcaaatactcccctttgcaaggagaaaacttgatgatgtccgttcaattgcatacatgcaaatttaatagaaacaatggaacttgaaacattgcatctggaactataatttaaaacttactacaaagctatatttgaggatcatcagtaaaacaacatcaagcattgtcataagagtcatagagagggaagtggatgcatttgcttagtcaaagaacaaaaaggcagagaggaatatatttactcagtttcaatactgttatctattattaaacagtaccatttaggcatcttaactcatttgacctaaaaccccccacatcatctcgaaatagctagaataagtatacaactactccaatcttctatatcttcagcactaaataataaaatatatgaaatccatataatttttatcatctcttaccctagctgccttggaaaaatactattactatatactaaaacatggaagatgacttcactctcaaaagctgtcaaggatgggacagtgaaattttgaaaatgcaaactatttgcataacgtcattaaatgttttagaaagatttaacacttcattgcaattgcacatagttccaaccaagtgaccacaagaaagcatgtgaatctgagaccgataatagataatgttactacggtaaattataagaatgagaacatactgcctcaacaatctctaaaacacgtggaccctttaatctccatggaacatcctttgcaagagcctgcaaattagtgttgacatcatatagtgatagctaataagacagatgacttataatgtgaggtaaaaaattgacactgccgaagttccgcatgtcatatgtataagagaaggtacaacatagaatttgtttctttgatatgtgtataagagcaaatatatggtacttcttcaaagaaaaagaagcatgtttccaattctttgaatacaagttaaaaagaaaatttcataatcaaaatgtctatgcatcaatgactaccaaaagaactttgatggtgcagctgtggtcatcaggatgctttccttaatgaacaaaagagctttatcgcacatctttcactagggagagtaacaaatagtagttataatctctagcacttaacagaagatatcattaaatctacctgacttacaaacaattaccaattgaaaattttagaatagttcagaataattgagaaaacagaaacattttttgtggtgtgatttcttgagaaatgtacaaaagtaaaattttaagaaaaatctgatgctttgtcatggtggaccagcatgggacataactatgtaaatggattttgtaaacaccctttcattcaatagttagaatgcatgtgtatatgatttgttgagttagaacagcagtatttgattccatagttgcaaaatagccccaaaagagttccagccaacttatatataagcttgtgctgaaaccttaatatttattttttcaaaggatttataaatattttttcttattttctgatttactgaataattgagtattatttgctttaatagggagctttaggtttttccatgtattaatgtttctttacaagtttgtacccccatctccaaaatcctgcatcagccactggggtttgtacaatttaacaatggcaatccctaaacagttttgccattatatacttcttacattatcctatggttttccctattttcatttttctacatttccagtatttgtttccaaacggacagaatgttggcatgagggaagtggcagaatggaagagagcttggtcagaacagtggcccaaaaataagatgaagagaaattacaaagaaatgtattccatggattatgctaaatattagtaaaaaaaaacaagccaatagtgtagcgaggaattccaacaaggatgtacctgcttcagttcttccagactaattgttccattcttgtcaacatcaatggcattgaactggtcacgaagatcagacaactcttctgcatttagtgtagaagctaacgcctacaagagatgtaaacatttaaaattgactccgaaatcatcctgagtcatggataagattcccttaagttatggtatgataacttacccgtaaagcaaattgcttaaaccgactgtattttacaaactgacgcatattatgtaatacagatatatctagaggtatatcagatgcctgtcctccttctctcacccattcatgtgctgaagaaaataatatgtaaattttcatgttagtagagcactgtgataataagattgtttatttttataccaacagtatgccatctgtgataactgataaataaccaactgaacagcaaatgttagttgctatgatgtaatgaaaacatgaattagttggtattggttatgtatcaatattagattgtaccaagccttagtaactgaaccaaccatgtctaaccatgaaaaaacaacataagatgtttctatcaaattcaaggtataagctgttattttacgcatggtaatcagaaagtgctaccatatacatagcaataacttaacaatcaaatcgataaaaggcaatggaggtctgaatttcatgagtagcaagcatagccacatggcttcaaataacaagccaaagctgaacccccagcagaagttaaacaaataagtattaagctaacagggagtatgcactgcaaacccattaatgatcgctgagtaagcctttgaggttggaccctcatacataagtttccaacctgaaggggcccttcataaatccccttagatatatcccatctaagagtcacccagtaatcaagttgtgaatttgcatgactgcactcagacttagcaacagtttgccactagaatcccattattaaataaccagatttgcaaacttgcattcaagatgtcccaaaatgatatagagtttccctaatcagattatcatacttaaatttaagacatccaaaaatgatataaagttacatacataatgcctgagcagcagttaatcttgcacggggatccttaacaagcaacttttgtacaaagtctttagcacaaggagtgatatttggccagggcttgcgacgaaaatctggcttgtttttcaacacctgcaccaaaaagaatatgccactttgttagcattgtggaaagagaagcggggaacagaggatggacacgatttgagacaaggtcagtaattccaacatgatacccaaagagaaacataaatataagcagccaccagggtagcggctacccaagatatacatatttttctttatgcacaggcacagctaatgttccatagactgcaggcttagctccatataggtttaggtaaggagagagggtgaatcatgtagattgactccacatagatcctcctatgctagcatttgtacacattacgatacttgttctaagatagttcactcggttcatccatggatgcgtgcttttctggatagcatataaacttgttgacgcttgtggtaagctatttcccaagtatataatcagtgtaaatctacacgcctgatattgtgccaatggcaaactcgtatgctatgaagtgcactgcatagcaaggtattttcatcttttcaacaagttggatcatatttttcagatttgtcatgacacagatcactagatcagatatacttgagcataaatcctgagaagataaagagttagtcttttttatctaaaaaaggggaaagtctatctttggtctgtcaactcttcatgtaggtcaatttttgtctctcaagtcaactctaagacaacttgtcactcaacaattgaaatcatgcaaataatgtccctatgattgtttctcaagtggttttaagtgaggtggctttccacatcattctgttttgccatgtcatttgccacatcatctagacccatgtgctgatccttcctcttcctttttggacaagatgaagagccacttaactgaaacataccagcctaagattctgaatttccttaaaacagaccagaagtattttaagaataacatgcgcacttccttggaagtatggactactaaaagttagaacgatatcaaagtaatacggataatacggcaacatcgaaggaaaaaaagaagaaaatatagtgattgtaaggcaagaaaatagttttaatcaatgaaacacatgtaataaaatggttgtaagacaaagatagtttaggcaaaatgacctctttaaatattccatcttcagttttgtcccagaaaggtcgtcttccacacagtagaatataggttattacgccaatactccaaacgtcagattctgggcctgacttacgcttaagcacttctggtgctacatagtaggcacttccaacaatgtcacgaaagtgtttccctgtgagtgcggcaacttaatttcaattacactgagaataatttctttattgagaaaattctttatatttgccctcaaaagttagtcgtatccttcatttgcccatgcggaactgctcaacccctcatgcccatctttctcaactttgtttctatatttgcccctcgtattacttctccattagtttgctacttgaattatgtgtgaagtacttttttaccttctaatgccttctcaactggaagcaaggacaattatctcttcttttttagtcttcctatttctaatgttgtcattaataaaaaaaaccaatatctttttaacatgtagagagtataactttagcatgttagtttttttataaatgcatagtaaaatagctgtttttctttttaattggctcgggcctaaatacctttttctatgtctgctactaaaatttgtaaatagttttgtcattttctatgcctgcagacttggttctctaaaaagaatgtatgttctaataaaagatggcgatcaagttttactactacttataattatcaacatttttttatgcacatggatcggtgaatgccctttttacattgacaaggaattagaagggattaacatagaaaatataataagccatacctctaatagaataggaattactagaagggtaaaaaggtttagtttcgggagagcaaataagggatatggctaacttacaaggccaaatagagatttttctcttttatatttcatatggaatggaagaaagttaaacaagaaaacaatagaacaagtagttacaacatacacacaaacctggtcttataaaatctgaaagaccaaaatctgtagccttgagggatgagtcctctttggttgatttgaagaggaagttctgtaaatacacatatcaaatgatcaattactcttataagaagacttagtcttgtacttttagagcatacctcaggcttcatgtcccgatgaaccaaaccatgcaaatggcactcagcagcaaccttgagcatttgccgcacaactactgcagcatctttctcgctataacggctatctttcctgtaagagcagaacaaatgtgatatcagtgaatttgctttctacatacatcaaatattcaaacgaacttaataataaataaaaatctttgaacattcagtcgaaaaaaaatctttgaacaattcctgacagttgatggctagtggatgtctcacataaacttatgtcaatccctgtaatattttggttttatggtaataggaaaacaatatatgactatatgccatacatccatattaaattccaagctctttgtggcacgaagcactaattgaaatgctctccggttcaacatccctatatttagaataagtaatcccaacacaaccaaaaaagcatgccacagttctgtggtaaagtaaaaatttttgacaaacttcaaaaattgacttacttggctagtatccggtcaagtaactccccgccttcacataatctgtcaaatacatgtaacagggtcagatcttcattagcttgcacagttccttgatacaaagagaacaaagatgagaaacatgaaagtgtttgccaactatttatcctgaacttgatatttacccggtacaatttctagatttttacgagggtattaatattatgccagtttgcatgtggtgtttcttttccatgtaattagatcctgaattgccaaagtcctgtttggaggggcacaaactaaaatactagacctcagtaagatcaattacttaaaatatgggtggtttctaaaaaaaagcataaacacacatatgaaccttccttcaacttggctaaggccatgaaaagttcacttagacattttatggttatacttagatatacttctactgatttcataaacatttgagagtttttccatgacttactccataacaatatacacataattatcatcttcaaatgcattgtaaaaatgtacaacattttcatggccttgtaaggccttcagtattttaacttctcgctttacgtcttcaacggcaacaggaagaaccatctgcaacgaaaacatcccatttgagaagttagagcagtatcatttcttttcaaaatagaggctagttctctacttctgttgatgcttcaattcagcatagcacatgctgacaaggctttacaataatgcagagtccagaaaatcagtgcgtcctattttctgaatacacatattacatttctctgctcatgaatttatgaccttcatgtacaggagaagtagggtcatatacgaatgtgttacgtttcagtacatatcagtgtctttcaggaattgccttgccgtatctgttaggaggcatttgtgcagtctttatactggttttggaactaaacaaatttgtatacgccacatgtgtccattacgtatgtgtatagtccattatccacttgttgcctccatcctgactggttcctattttgctcaagaatgaagatttaaacatcccaaaatagtttggtattttggtttgaggattgagatgtccattgaccacttgatccaaaatagtttccttggtttgaggaatggacctcatccctgaaaagtacatatactgagtgaagaaatgaggaatggagtcatcccaccagattcgatggtttagatggatcacctccatggcaatctgcaagttgcgctagtactaacatgcagcagcattaggtagtggcagtgcatttttgatttgtaccactaccactacagtatcgccccggattcacatttcacatttcctcggcaacccaaccccacgtgcaaaacgcgacgccccccgcaaaggtggtcgtcgtccaggctagcccaactggccgatcgaatcgagcaacacatgggcacatggcccccacgcgtcagccgcacaccaccacgctcgtttgggcccataccttgttcttgtcgatgcgcttgacggcgacgcgctcgctggagcggcggtcgacggcggcgaaggtgtagccgaactggccgtggcccagcagcttcccgagcgcgtaccgcgcctcgaagtccttgtcgtacccgaagtccgtccgcttcccgcacgccacgatccccttcctccccgcgttatccttgttccccgcgccgttaccgccgccgggtgtgccggcgtcccggcgggcgctggaggaggagcagagtcccatcgtcgtcggctgcggcggaggcggcggatccaactattaccatcaatgtggcggcggcgcgaggctgccggaatcgggagcagcgaagcgaagggggaggggtgttgggaattggggtcaaagcagagcagagagagagagaggagaggagtgaggagacctcaccgatgtcgtcgtcgccttcttcctttttaataatataagggtaataagaaatggtgggaccaaaggggcgtgaatcctttaccgcgcttggcggtcttatgctgatgacacgtgggggccagtggatgtgggtcctacgagacggtgggggagtgggtggggctgacggtggggtagctttggatgtgggggtgacgacgtgacgtggtggtggtgggaaatgggcaggaaaaggcacaggacgcgaactggtccggcggccacacgcggccacgcgggggtagtagttttctaactctccgtaaaaaaaaaaaaaagacaaacctaatttccgtacccaacgtttaaccattcatcttatttaaaaaaattataaaaaaaaattaaaaatataagtcacgcataaagtattaatcatattttatcatctaacaataataaaaatactaattataaaaaaatttcatataaaacggacagtcaaacgttggcacggaaacccagagtttgcctttttttttggaacggaaggagtagttgagtaatatattttgcagatataccctccaatgttgcaattttaagggaaatgagcctcctgtggtattcttattttttttcataaaaagacaattgaccatgcaattgtaatgataagctctgtaccacctgataagctttgagcttcctcgatatgctcatagctacgattaattcaatatttcggtaagttgataataactacaatttgagagaaaagttaatgacccgactacaactgtacgaggagttgttgtgttgcgccttagcgatcgccacatctctccgtggattgttgatcttgcgggtgtagatcaaccttatttatacaagcaaatcgaaaaaacaagtaaaaaataaaaataatctgatattgcaaataggaattaaatatacatgataagttgggtctcgtagcgagaaaacaatgatctaaccgatcacggctttatctagaaaagtagcaatagctagactttaattaaaaaaactcaaaaaccctgaaggggtacatagctatttaagttgatgggaggatgaccaaggagtccctagggacgtgctacactagcttgggatgcatcccacttgggatccacttagaccggggtcacaaacaaagttataagtccagagacctatgacgggtggcacaactctttatttcttcaactgcaaatgatcgaggtggactttgaagatgagctggatccgttggaaagagaactccaagagcttttcatcaagtactcatggatccagcacagagctcgtatggacatttggtggccgtttgaagtcaatactactgcaggtgaccgaatctaatttcggaacatgaacggcggtttgatctctttgacctttaatatgaacactgctagtattcatattcgtagtaattatcatcacatcatgtaaacttttggatttagcatggtatggtgagtaatatgaaatattcataacatgttcacaaatcaattgtctctttgtttagtcggaatagtaatatataatttcttttcatgtgcttaaaatccaaccttccaaggggacagtacggattcaccatgtttaattgcatgtgtgtttaactgaaagttgtgatcgacgtattttgcatatgttatttttccggtgtcactttgtttgctgttaattttcattttccatgtttggttgatcttgttattggtattgctactaggctaaggtcctgattgggggagtttatgcttctaagaagcaactatttattagttagcttttgagaatcacctagcatctcgattctagtttattttctacattttataactatagttctcagaatcagaataaaaaggtagactctttggaggagtttttgattttgaaagcagctatggcgtcgtgtgcccctaattaattacaagctatatatatggtcttacccttaccaactaaattaccttgcatttttgtaatagcactccccaaatgtatcactaaccattgtcatatgcatttttgtaatagcactcccctatcaatagccattgtcatgtgcacaccgactctatgtaaaattcattattaggtgtggtttaccatgtaaatcacggcataaaaagttatttggggaatttaaaaaataacacttatataaatatataactaagacgatactacataaaaatgacaaaacagtgaagaaggagatagaaaaaaaaaggaattgtgttttttcttcgttgtgttttaattttctaccattgtcctagaattttatatatatgattatttttaagtttctactatatattttccttaccaacttaacatttttctacatatgcaggagagatgggaaaccaagattctcttttaataaatgggcaagatcgagggggcttatttcgcgaccgatcatatgcagtggaagctagcgaacaccttatccacatcttatgccttccacccaccatagattgattcatcgagtattcctccacatctcacgcctcaaccacgcaatgtcgcctctgcccctcacgtcgtctcttctccttgatgcatcaacgagcaacagtgcgcaccatcatcctcactaacgcgccgagccctccactccccctcccctatttcttctcttccctagcaaggcagatggtgtatgcatggcaaaggccgtcagcgccggtgcagcgaatggcgaagtgggtgccttgttgcggttgcgagcgttggtgacgatggggttggaggtgggctattgccctcgggtgagctgcacggttccatgctaagttgaatgttgatgatttggagtaggattgtggaaagtttccaatttagagtgaatagttcctgagatattgagaatgcttgattttgaatatgaagttttttgagttttttaattggtttgaaatctcatgtctataaaagtttatctgtacccaaaagtttatggcttcatctctacaaaaatatgtatgtaaaagtttctataaaaaaaatcaaaagagagtttatgcaatggaagtttctagagagagttgatgcaacaaaagtttctcaggagaaaagtttatgcaataaaagtttctatacaaaaagttttgcaatgaaagtttattcttgttatggacgttctcaactctcttatggaccgggcagctcgggagggttggattcagactcttgatgttcggcaaatgtagcaaaggtgttctttttatgccgatgatgttattatgttttcaagaccaacggtgaatgatctctccattatcaagaatgttttggatatttttgtccatgcattgggcctaatgaccaacatgcaaaagagctcaataactccaattaggtgcaatgaagaagagttggaagtgatcgtgaatgtgttaccgtgtgagatcaaggattttccttgttcctatttgggtcttcctttaaatgttaagaaactgtctaagaccgacttgcatgctttggttgacaaggtagcggatgatctccccatgtggaaagcttccctcatgaatcggatcggtcgtctcatctcggtgcgggttgttctattcgccattcctatatatcttatgattgctatggatctaccaaagtgggttgcaaaagcaattgacaaaagaaggagggggtttctttggtcaggacaagaaaacaccaatggtggtaattgcttaatggcctaggatagagtgcgccgacctctagcttatggtggccttagtattcttaatttggaatatatgagttgggccctttggattggttggttatggctccaaaagatagacaatagtcgtgtttggcaaggattgctcgtccaagttccccgtgtttctcatgacctttttagttcggcggtgttgtcgcaaattgggaatgggcaatctaatttgttttgggtggacagatgggtgcatggaagaattattttggaaatggcccctaacttatgtgaattgaaaaggataatcaagcattgtacagtggctcaagcattggacaactaaaagtggatcatggacattagaggacctttgacggtgcaggtgcttgcagaatacatcaggatttgggaagcagtccatgagggtggtgctgcaagaaggaattctagaccagcactattggaagttctcaaagtcaggagtttacacttccaaatccgcatatgagaccttcttcatgggggcagtcaagtttgctccttggagaaggatttggaagagttgggcacatcttaaatgcaagtttcttcggtggctggcaatacacaactgttgttggacggctgatcatcttgccaagcgttacttgcctcatccagccgcttgcccctttgtgatcaagccaaggagacaatgcaacacattttggtttcttgtgttttcagcagacaaggtttgtcactagttctccaaaggcttggctatttctccactctaccgaaatcatgacacgcgcaagttttcgtgttggtggtcaaaggcagtaaagggttgcaaaagaacgagaaaaagggcttaactctcttattatcttagtcgcgtgggaaatctggaaacactaaaatgcttatgttttcaatggtgttactcctagcgtgacaagtgtggttctatccattagtaatgagggcacactatagtgtatggcaggagcttctaggttccaagagttgttggccaacacaatagctcttgtgccctaggaggaggggaggtgtgtttatgggtgtgtgtgtgtgtgttttccagtgggtgtgttggcgtgtttttgttttcgtaagtccgaccttttattctttgcttattgaaatgatacaatgatttcacgcgtgttcgaaaaaagtttatacatacaaagtttattatgcaataaaatttggtgataaatcgtattgtttagaattaaatcgaaatgcccctgaccacgtttcctaaaaacaaaaaaacaaacgatgcgtgacgaatcagggatttttgaaaaaaaaaacacctacgccaaaaagggaaacaggaaccgatcacgtgggcctaattccagtgaccgatcatcaggtagcattttcagagttaactagaaaaaatgcccgtacgttgcaacgggtaaactgaaattataataaatataaaaatattagacgattacggtttagtttttcatgatatgagccttcaaaaaaatatattccttagaaataaaaaagtgctaaaaaaagaaaaaaaaagaaaaggtccattggaccctatcggcctgctattgcgctccttgcccatgaagcatgcgtggcccagcagtgcggtggcccgagatggaggtcggcctgacgtgggatcgatctgtgccattcattttgatggacgggtcggatcgattctatatccatcaaaccgtcagtgctaaaaacactaaccctaatcacactttcccatcccattccaccatcgtgagaacctcctcccccttccctctctctgccgctcccgctcccccttcccttcccctcaccggcgtcgccagtccctctcctcctctccctcctgtcacgctggcgcggcgtgaagacgacgagggcacgactctattcacgagcggataaggagagagggggggcggagtgtggtggcttcccgtgggtagatccagcggaaccgacggcaccggtcgcttcctatggcttgatccggtggtggcggcgcctttctgcggtggatccgatggcgccgacggctccccgcggcggatccggcggctatccgtgtgtagatctggttcgcggaccgatccgccggcgatggtggcttcccacgtcggctacgacggcggcggcatatccggcggctacccgcgtgtagatccggtggcgtagtaccttgcccgtatgcggagctgatcctctccatcaaatctaaatcttttttgaccggttgaggggttttatccactcggtctagtctttctgttttttccaaaatcggaacggatccataaaatttgggattgggataaaaatggccagccgagcatcatcaaccaatgagattaaatccagtgaattaaaagaggaaatcgtgaaaaaaaaataataagagtggagtggggtatcgatttttacaatcaatgggaggagaaaacacaagaggaagtagcttgaagtacaagtgcgcaacagattggataagataaaaaccggatgaaaataccaacaaaaaaaacacgaaaaaaaacgaatcggaaaaaaagggaaaaacagcgggaaaaaacagagcgagaagccacgggaaaaactgaattgggcaaaaaagagacggacaaaaaaaacacgaaaatggaaaaaaaaagaaaaatagccaaaaaaatgaagcaaaaaattacgggaaaaactgaatcggaaaaaaaggacggacgaaaatttttttttacggaaaccttgtgtattttttagttaggtaaaaaccagatgaaaaaacaaaaaaaacacgaaaaaaacgaatcggaaaaaaaaaaagaaaacagcgggaaaaaacggagcgagaagccacgagaaaaaaatgaattgggcaaataaaaaagagagacggacaaaacaacacgaaaacggaaaaaaaagaaaaacagcgaaaaattacgggtaaaactgagtcagaaaaaaggacggacgaaaattttttttacagaaaccttgcatattttttaattaggtatagatatagacgtgaggagggcctaaagccacctaacatatagaaattcatgttatgccaacttatcgtgctaaccgacggatatggatttcttaactatttattttataaaattatacccataactattcaaaataacgtttatcaaaattcaaaattcaaattctccctacttttaaaagattacctaacagaaaattatttttcaagaccagacatgatataacatagaaattgctccttttggaaaacttaacatgtagcacataaatttgctctatttagaaaattatcattctcacatgtcaaacataattattcatgttgttttatagcaaagttcaactacaagattcgaaacaatacttgtttgtgtttttattggagggagcaaaacaaagatgcatagggagaaaatgtttgcttgcacagagcaattttctctttcttcaattggaacaataaaaaatgtttttagtacacacgtgcttaacaagggtgccaaatggaatcatagaaaaactaattgcagatttcactattttttaaccttttcgtattcaacaacgtgctgcaaaagaatgcaaagtactctatatgagccacattaggtgttaaccactgaaaaaaaaaactaaatataaagggatgttacatggggaatcatgaagctcgtgcttcgctacaaaaatcccattattgcttgcacttttgataaaattaagattggctatttatttgccataaaaaaaagcaagcaaagttaatcggtggcgaataaaaatgtatcaactcaatattttccgatcaaacctagatgtgcatatgattagaataaacacattattgctctctcttcatcttaatttgcagctacattaacacataatcataaaaatctttgaacaaattagtatagactgcttagagtcgctaaccacaagaattaagcagtgaagggaactattatctccgtcccaaaatataactacttttagctataaatctgaacacccacacccagttatcaaacccagttatcaagattcataactaaaaaatacttaaatataacaacttttagctataaatctaaacacctagttgtctaaattcatagctaaaaatacttatattttgagatagatggagtagcttatttggatccctactgcccatcacttgttaagaataacaaatgcatcgaccaaacaaacagacaatgcacgacctctttacaacgtacgggaaaatgatgatttggagaacacagcacatgttttattaacaacattcttttctttatttatgctagtataaaccagctttaacgtcagatatcaacgagatgaaggggccaaaggaaaacaagcacacaccaagcatcaaaatggattaagcaatgcatcatttactctgaacaattgtgaatttctcgttagaattttgcggagaaagggtataaaccaaactccccaagatttgcaacttattacctctgcgcctcttggttttgcacaaagatgaaaaaaaaagtaaaaagggggcaaatcgtataaaggctatcctgcatggtttcccgggaatttactctgctgtcaacgaacttgcggagtaaacccataaaaacgggctaaaagaaggcttgtaaattgatcctaattcccagtgtaactggaacgaaacaaacaggaaaaagaaaaattaatccaaaaaccaggtcatcctgcccttggctctgtgctcttggttttcaggtcctcctcgaaatcatgatggaaatatacaaaatgagacagcaccgttctgtgcatcattcgagaacaagggaagaatagttttgatgatctttagcttcacagtaacattgaggttggattctcgatatagcccttgaatgctttcagaaattctgccccgattgcacctagagtaagcgcacaagaacaaaagttaatttcttgcccatgatccatgaagccatcatttattccgataagatctaaagagtataccatcaataaccctgtgatcacagctcattgttgccgacatgaaggaaccaaactcgtattgaccattggcgctgccaggtatcaccctcctctcagctgcccaagcaaaaaagcagttgagttaaaaatgaatccctatgtacggactaaaacagcatgactaagtgaatgagcctgcctagcaaatagaatacattaacaaaaggcactactagcccttttacgaaaaacaactaaatactactataaacagctggtcctatgtgcatgacttctgagtttaagtactagatcagggacttggaaaatatacttttcaaaatacactaaaataatgcagataaatatataatgctacaattatttttacagagtaagctaagtggcaacgaattagtggaaacaaagtaaaagtgcaacatgacttattaccagaaccaatggccaagattgccgactgaggaggatttatgatggcacaaaattgcttaattccaaaaggacctcccaagtttgatatggtgaatgtgcctccctgaaaacaccacataaaagttctcatggaaaaatgctgttgtttcatgcaaaaattaactaccatacaatccatatacctcataatcatctggtttcaaactgttatcccttgctctttgagccaactgcttcacctcctccgcaatcataccaagtcctttcttgtctgcatcctgcaacaagcaaaagttagaaacattttcttacacagattagacaagtttagattactaaccctgattactggaacaaacagtccatgctcagtctgtacagcaacattgatgttcacgttgtggtatctgcatgcgaaatgaaattttcattatctcctttcttgccaaaactttagtcccaagatatgcctggtcagaacttactggcggataaaatcattcatccaggagctattacactgagggacctttcgaagagccagagctgcagcctgtacatcaaattaagataaattcagaattggaggtcagaagaaaatggacagtccacgaacataaataggctgaatctgcaacaatccagtggttggcacttggtagacataagaaaccacggtaacacgagaaactggtaattacctttataactagatcattaatagatatcttcttaccaccggaggactcctgcaatggattcagttcccctcgcaacctgcattagattaaaaaaaaagaactacttttaaaagaaaagctacaaaatccagagagatggactttgaaggtgatccatcacatatgtttcctacaaaatatagtgatttaataacacaattagcattcaacatacttgatgagattatcaacacgtgtgtcaactgtcaggtaataatgtggaattgtttgcttagagcttagcaggcggttcgcagtaacctggacagaattgaagttaaaacactatcagatcaataacatcgcataaaaaacgacttaacagaaagaacgtatgattgaaattacctttcttatttgtgcattgggaacatcggtgtaacttagccctggagccgcaagagcttcctttctgcaacccttagctacagaagtttgtttaagaaaaaaattatcaattgaattctcacagatagaataatagcataacacaaaataaatctggcaaatataaaggaaagcataaaaccacacatttgaacatacagagttcaagcaaattacattaataatatttcatttggatcaaccaggatggtgctactaaaacaacaaaattatttagaaattcaggcacacaggaacaagtaaactaacagagttgagtgaacaaagcaagcaaaaacagattttttttttcttctgataacttgatatatgggtgactggatgttcaaatcaagtgatcaaataccatacaccacaaaatggagtacataatacgcatcaacatatgtctgaatatgattactttagaatggataataagacagtaaagcacaaagatcagtggtacagcttaacattaagcaagaggattcagatcaccagtatactggtgctttcttatcattgacactaacagattgctattatgcaggaacctgaccagagaagggcagaaacaaggaattgcatgggaagaaagtagatttatataaggggagtgccatagtacatactagttacaaggaagttttaacatgttttcctcgcctaacatcttttccacttggccattaggattaaaattgaatggtgagagaagtatatataaagtgtgtattacagggacacagtcataaccaaaaacctaactgctcttgcgagtacaagtgcatgcatgattcaagtgttctataaaatccctagcaactgtaacacttcatatattaaacaagcaacgagcagcaaaggaaaaacatcacaataaaatttgacatcaagagttcatcaaattcagaactagcatgatatgtcaaaggagcacacattatagcttcaaagcgatcttgttaaatataaattaatataatggtcattgttgaattctaagttactcaactacaaaattctaaattcctatagagttcatcatttattttatttatttatttatttattttaattttattttattttttttgggggggggggggggaactataggagaaagtgacatacccaagtaatcttcaatgtctgccttcaaaatgcgcccatcaggaccagttccctttacactcgacagtggaacctgttttaggcagcacaatccttgtgttcattaagtatgttacaacaacagttggcaagtaacaacctagacagctaacatcagaaaacttacattgttatcttccgccaattttctagcaagagggctggagaatattcgatctcctgaccgcgaaggttcttcagtccttggggcctttagctcagatgctttggaaggctctctttcctccacctttggttctgtaggctcagactgagccttcagttcagaaggggctacaggtgcagccaaagttgaaggtttataatccttaaacttcttgatgtcaccctcttcttccacggttacagcaataatctaaaatgaatagcatggacataattcaaccaagattatgtcagcgaaacttaaagactgaggtatttgtaataactgtattagtaaacagaggataataaatgattgttcaaatatgtacctcaccaactttgatctctttggaaccatctccatgaatgatcttagcaagatagccctcttccatgcactccatttctacggtggctttatcctagtcagcagaaatgcattcaaaggatatttagattctcttgcagcttaaataaaagaaaataattgagcaccactaaaaataagtactaactaagatattgctgccttagagatcagaaaacttacagtctccacctcacaaagaacttcaccaggtgagaccttatctccttccttcttcagccaccttgcaatgttcccctacagacaatacaagtataaggtgtaatactaactagatgaataccccgccgcgttgctgcggaaaattaagttgcataatatgtacaaaactaaaacaatttgatacaattttgagcttgaaagtaattgagattgcatgtttttaagagagaagaaaaaagagacaatttggaccatagatctatcatccaaaggctagaaataattgtggtgatgtggcttaatgagagaagagagaaatagcattaactacacttagtggggatgaactatataagtatataggatacatgcaattcaaggaaaaacacaagaggacattatgatattcatgattcataataaaaaaaattggtgagatatacctcggtcattgtaggagagagtgatggcatccctatttcctgatgtggtggcaggtctggaataaagaaattatggcaaaacttaagaaataagacaattaacagagtgctatatggattatggaatcattgactggagttatgtactacctccatcccaaaataattgtaattctagtttgattagcatatattaagatttgagataaaagactatgatatccctcatcaaatggtgtatacataagagtgggaaggtaattaagggtaaaataggaataaatttgaatgagaagtgattatgggacaattagtactctattgtgacaactattttgggacaaatgtgaatcctagaaatacaattattatgggacggaggcagtagacaattttaacatagtaaccagagcaatgggaagatgtggactgaatttcaaatagacttttctttttgaagcggataaactagatgcttagatatcattaaaaaaagaaagttgttctgatttttttaaaaaaagaaataggcgtggagaaaaatatccaaaaatagtggaatacagcatcacatgcatgtaaaaataagtacgtgggaagacagggtacagtaaataaaatagatagtaaaaaagaaaaagatccgcaaccaaaataaccaaattagtaatctatcgtcaaccaaatatgtttataagaaaccctcttgcaaaaacatgacaaccaaaaggactgaacagctactttgcaatatcctggttattttatgaagttatcgcaattaaagggcataaaacacgtaagtaaagtacctgcactgcttgagaaagatcttgctgaagctatctgtccactggaaaagaaacagggaaagaaaagggaacattataaagacgccatggtaaacagaagtacagaacagctatcaggcgttaggagaacactattagaaatttagaataggacaatcagattcaaatctcattcccaggattggagtttgttcttaagtaaaggagattatcatttagacatgtactaaaaagcagggagccagataggcatgattcaggggccttgcaaaatatgccagcgattttttttatggtgtatcttagccaacaacatgagacgcagtgatcaaatatcgctggttcatattctcttgtaagggtggttctctcatacaatatgtcccgacactgccacataagctaacaatatcatagcagaaaatgacacataccatgacaatgaaccattgagaccagtaatagtatttgggataaagttgttaggtgatctcctgcaagtgtagcttccattaagtcctagtgacaactgaaagagaaaatgacaaactagaaagtcaggacaagacaataatggtctcaataaagtgggatatatttcaaggacataaccttggaggtctcaagctcttttccaggttgcttgcgctgaggaaatctggcacctccaattcttttctcagcacctgtggaaaccaaaagcactaaaacttcaatggtgaaaattgcttaatgaggacattcaatcaagaaggtgaattctcactgtacaaataaattcccaaaggaaccaaataactactatctcaagacaaaatgagtgtgcctatactatgtcaatgagaaatcacgccttaattaaaaattatagtatcagctcaggaagccaacccatgcttagccaaaggtacaaaaattagtggagaggtaatgtgtcaagaaatgaaaaaatgaacatattggattgtacttctgttgcaacatattttttttgtacagatgtttgtaatcaattgacaatctgtctatattagactacagaccaccaacacacaatcaatgaatgcctctggaggatccaggattaccaacacctgtgaaaccaaacgttttataactaaattgcctatgtaaggctctatattggtttcagttatgatggcaggaccattttggtttgacgccaaaatgtgccctaccaaattgttgacccttcgaatagtactttggctagtgtttggtttgctaccaaaatatgccaataacacacataggttgccaagaaaaaaaaggctaaaattcacctaggttttggtattgctaatattttggtatggtaggaaacaaacaaacccataatacagaaataaaaagttattggaacagaacagaactgcatgattaaaagcagcagacacttatgaaagaaataaaggtatttgctaactatcacagcaattagtcatgtggaaggacatctccagttgagttggacaaacaggttgcttgcgtaccgtggtcaattagttgacaaatacacacaatcaaaataaaatgataaaagatgggtagcacataccatttcccttggtggggaacgaaccagaagcagtggagaagtagcgcacgaggccagaacgctcacagtctagagcattgtgtaaactccgcaactgcagtaaagcagattgaaatgtcaccgggaattgattgacgatggcgtaacattactagcgcagaaacatttctttcccgctgcagtaggcaatagatctcccgatcgaccgaaatcaggtgaattactagtcaattcgcacagacgggagcacaaggaaatccaggaacgatcgaaaattcaaccacatgcggcacgcaggctccacgcagcgggaaggcagatcagaacagatccgatggcttttccgacacgttgggatgggagacggatgcgcaggcagccacagagagaggaggcagagagagaaagagagagagagggagagagacgaaccttgcgagagtggcggaggagatgcgcggcggacatggcgacgggagaaggcaatgggcgtggctagggtttgtctcgatcggagatcgttggcggcggaccgacgagggggcggatctccttggccacggtcgccgtggcggcgctggatcggtcgaggcaggcgtacgagcgtctcccggactggctgcggctcctcccggcgtggtcgaggccgcgggacagatgaggacggaggggggtcgtggtggtgtattgggaattgggatgtcgagtcgagtcgcgtccgggaatcacgcgccgggagggggcgagagaacaagatcggtagcgagtaagcttaccggggggccgggcctgggaagggagatacagtccgatggtaaaaaaaaatatagagttaatttcattttggatgatactttttctttaggtttcacttaaaatcattctttgtttaaatttttcaatttggactaggtaattttatctttgttgcacaattgatcacccccaaaccgcatcttcatcacttcaatgacttcgagtaaattgttaaagacatgccggcaaacttttatatctatatgcatgttatccctttacccaaggagacgctagacatgactagcaaatagaattaggttggttcattatgtaacaaaggtaaagttacatagttcaaagtaagaatattggttatagggtagtttaaagtaaaactttggcaataaaatatggctcgaaatgcaattcactcaaaaaatatatactagatgagtgagtgagagtggggcaggggatagttgtaaaattctttaatgttttgtgtggagcggatactatatgaaacctccagtgttgcagcggatcgttcgtgtgtaatgtagttataaaaattttaatatatatgtatgaaaaaaacattaaaaaagcctgtaaaagcatcatctaagtactcccttcatcctaaaatatagcaaacttgtactggatgtgacacattatagtacaacgaatcaagtaaaaacaacaaggatagtatctgtactaattcatcgagtccaagaataatagtttatatcatcatgatataaggtcattcccaatccaatgactaggatagtgtccatagcattaaataagctgccacctaggataaaaaatgatatgtcaagtaaataaatgaggaaagagaagaaaaccatgtcttgagacatggtttctacacaacatccaagacatcatgtgagataagtagcattaaattgaagtatggaatagtggtgtttgcattagaagagtggtgtctaacactattttcttgatgatggggagtttatggaaattatgtctagtgtcataggttgagaatggtctaagtacacttaaaaagccacatggtccacagtagaacaatgaattcagaaataccataaaatattttgtgcttattaattgcttctgattatgcacaatcatcaacggttgactttacggagtcataatttggttgaaaatgtgaccttttcatccacattgccttgcacttgagccgattagtcaatgttgtacatcaagaataactcgatggacatgccgtgaggaatgaccatagtggcacaatgtactatgggcaatgtaagcggaagttcttattctttttatctttggaaagatcaaacataagatgctcctatttcttttatggagtgtaggtacctctaggtaacacccctcgaggtaggcagaaattggtccaatggcaagcatcaccgtgaagatatgtatgttcgggcttgtgttcattctcgttgtcccaacctcgatcgggctgtgggtatcgtatggataaggcaaacgctgcagagtggtactgtatttgaatatactatgctcctgattaaaggagatatgtctatgagtgaatcctaattagtggtatgagaagtctcttaatggaacatttgaatttaatgaggaaaaggcctgaaatgaaacaaccaatttttgaaatgtaaattgattacaaattggccattttgaactattactaaggtttacagttagttctagtttctatccttgtgataccttgcattagcacatgttttgtcatgcatcttttgggttctagtcgtccaaggaggttgttgaaggtcgttatcgatcagtttcaactgtcaatattatcaaaatagaggagaattagtgatgcttgctatgcatatatatgttagaataataatattccactagtattaggtctactaaccttttgcagagaatgacaataaagtagagaagaatcgacatcaactcagacgataatcaatcggacgatgtcgagaaccagacttatgtatgaatgggccaagaactcagaattaacacgacaaactgggccaaaattcacaagtctgcggagaaaaacaacagaggaggccaccagccaaaccatgggctagttgggttggccccaggttcggccgaacctccctcatcgtcgctggatgcagggtttcttctggacggtgtggattagctcccaatgacggttggagggtatttccgaccattccaaccgtcacaaccgtcattgggaggctatataaacccctcaccttcttacttcactcatacacctcaagcaagagctctctcatttttctcaagtttagtttagtagtatctagctggtggaataggaatagagtagaaatcaggagtccggaagtcttcagaagagttcaggtatggctctagtagcttttctcttctcttttgtaagctttgtacttttattagaatactcttctatatacatttatggtatgaaaatactttccgagtatatgaatgcctactttacattatgttcatgttatactgaatatacggctagcttatctgggagatgctttggtgcgggtataatgtttgcttatgcaattactctatgtcatgacgatgatattagagtagtatctggtagtttagacgtggtgtctagattacgagatatcgttatttggggttatatgctgcggatgagatgtgggccgctgatggtgacagctcagtacgggtattcctctgcgcctgtatataatcctaagttaatttcctggggatggtactcctccgtatttagccctagttgtatagacatgacgggctgtcgtaaggaactcagcagtcaggggtggcttctcgaagtaccaggagggcatcggataaagggtattaactagtatatcggttaactagaatatatgtatactatgtatattagaagtataggaatagattgtctttctcttttctttccacttagcttagataatatattatgagaatgagtagctaatgcttatgtgtcactctacccttgattatcttaacacctgcttaaaatatgattattacaggtaatatttaaattattagtcaagttctctcaacatgatctttccacgagataaaataaataagatacccttggaatactctcgggtgaaatgttataatgatatatccgtgcgcttgtggataaactctttaactataatataccaggagtatttctacgccattgctgaaaattatatttctattaatgtcgttaagaaataccaacaaagtgtaagtgaagctttataagaagattgatcctattaatgtcgttaaaaaataccaacaaagtgtaagtgaagctttataagaagattgatccgttcaagttgtatgaagatgaaggcggtggtgccaagttgcatcttttagttgtatgtatggtcgtaggtcgggatgaaaacggcttggaaatgaatggaaatcagatctactatttttgttttcttttttaactagaatcgaaagtggaaaccccagatacgaaaattacatagaatattatcaaacataaatatggagtaaatatgaatcggagcgtatacggtaacgaatatttatcggaataaaaaataattctaactaagattctaaaatcaacgaagagatgaaggccattatttttttatcacaataaatcagcatttctatttttatcaattaaataataatacacacgtacacttcacttccctaaaaaagtgcaataagcaaaactatattcatctggcattgcctaataaaagaaaataaattaatagtcattaggcaaaagagaaatagatctaaagcaccaaactataaaaaacatctccattcaactaaccacatcaacactcggtgcaaatctgaacatccggaagagaagggtaaagctaatcagctgtatattaaaagcaatttgtttccagttccgagaaaaaaaaattctaaattcgtttctagaaagtttctcatcaatttcggtttccgacaggtagtagcattaccatgtcaatttcagtttccaagaaaatattccgaaatcatttaagtttcctatattttctgaacaaattactcactactaaaaaaggcaaatagctggctgccaggtttttttttgctagcgggcggtggtgccaccagcgacctaaggccaatgaaaataatacatattcactagtggccggtcggccactagtgaaaatcgactttcatagataaccaagctaagatggtcaccgacaaaatacgattttagctgacaactgcgtaaagagacctgccatcgaaaatatttttcaaagcaaaaaaaaaaagaattgaaaatcaggatccaaaacagccagtacagaatcacaaattctcaaaatcccccatcacatacagtccttgcactgtggtcatcgttgtagttggcgagagagagcgtaggtcgtcatctttagatccatgctcgtgaggaatagcatggccgactggtagttgccaatctggcgtcgtcttgcatgcccaccaccgccggatgtggacgtgtgctcgcagtagaggtagtcgttgccaccattgtcactgagccgcaaccctagccaccatcaccactgagggtcagcgtcaccgaggctgcgtatcgagtcgtcgctaagcttgtgggcagagccatcactgaggacggccgccaccagatctagcggtccaaagcactaccgctggctatcttcttgctcctcatcgtagtcgtttcgtccgtttgtccgcgccggttagcaagggagcccgaggtcgccagaactagtgtccatggtctcattggttgtcaatgcggtggcggtatttgtagacggtggttttctcgttggggtatgtgatggtaatgatgcgattcggcggctgccgcctccatggtggtagaggaagggcggtaaaaaggtgatgtcctgaaaaattattttagttccggtcgatattttctgtttcggaaaatacttaaggcatctacaatgtaagacactcttagagtgccctcactaactgagggtactctaggggtactcacctctacaatgtaggccacttctagttagtcaaatgagtgtcccaacccaaaaaagcccctttctctcctcttcctctctttcctattctacccctctcttccctctctctctttctccctccgcacgaccgcacgcacgttcctctctccctccgcccgtcgttccactcgctgcctgcttccctctctctcgccgccacctactgcgcttgccgacgctgcctccctcctcgccctcccttcctctctccgacggcgagcggtcgtatcgaggagacggtggcggtggcctcatcgacgatggcgctgtcgccttcttcatcgcgctgccgccgccgcctccctcctcgccctcccttcttctctccggcggcgagcggcgcctccgcctcgcccttgacgcgtgggccggtaacagaggggagaggggtggaagaggaaatcgaagctatggggtacgtcgcctcaataacctacctatgcaatgggttgcttcactccgtccccttggaaaaagcgagcgagcaacacgttccccatcaggggcgcgcgttctgtcccagggggacgacgcagacagaaagcctaacggacggcgctagggggatgggccgaagcaccgcattggtgatgcccttatcgatatcggaaacatcccgaaccgggacagttggtgcgtgtgtcaagtttggagttttaacagaatcttgtcagttcgtataacgaacttcctgagcggatacgtgttggtggaatatttggaccatctcggtgcgttcccacgtacagttagctcctctgctaattgtatggacagtttgccaataccatcgagcaacaacagaggtaacaggccgcctggttacgcatgggctcagttgacccataatttaatttgttattatttttcccttttcaaacaaaactcttgtggatatttatgtttggtgcattattttttctataagtaatctaatgaccccacataaaattattactaccttaattgtttggaacttactccgctactaccattttaataattgtaagggtgagtgtcaaaattctttccatgcaccatttgactaaaaggcgctaattaattataattataattgttcgggagtgttattaaagttttctttgaggtggcactcacttcaagtgaattggtgtaataattagctgtagctcgttaagcaaaagtcaggatgatattctattacaagcaaaagtatggatgatattctattacattatctaaaaattgactaaaaggcgatagtcttttcacccatactatatcatttcagtgataacaacaccacaacactgccacacgctcctaattagtactccttccgtcctgttttaagtgcaaccatgagttttcgtatccaattttgatcgtctgtctaatttgaaaatttttttaattagtatttttgttgttatgagatgataaaatatgaataacaatttatacgtgatttatatttttaattttttttcaaaaaatttttaaataaggtgaacgattaactagttgagtacggaaaagcatgactgtacttaaaatgggacggatggagtatatattcttactctacagactgtattactgtacgtctgtaccctttatttacagatgcatgcatctagcatggctgcatggggaccatgtccactaattagtccatgcaatgcaatgccccagttcactgcaccagtaagatatacgggcaggtactatatactatacgctacaaatggtcaccaatttgctcacgtgtgcttttttgtctgaccttaattgtcactgtgcatgtgatgaaaggcaagcatgagtccaattttatgtcacgatttgaagcagttacgttgcagccttttttcacatggaatccactaccaactgatcggtcgagttcacacactgcattgcaaggcatggatgtgatcgagttgaagtattgaactcgcgatcgatcgcgcgcgagagctatgtttttgcaggttcgttcgcatcatcatcaatggctagtttgctcggacatccagaggagctcctctaggtagtcggcgccgaggtcctccagctcgaggacgatctgcttgtgctccccgccggtcgtggcggacgtcgtcgtcgtcgtcttgttcgccgtcgccgtggcaccggccagctctgatctcttccgccgctttcgcttggagtgccgccccttcagcgccagcacgggcgagcctccggccgcgccgagcgcgagcgcgcggagcgactcgcgcacgcgttccacggggaagttgagcgccgcggccgcgccccgcgccgagagcgcggcctggtcgtaggccatcgcggcggcctcggccgtctcgaacgtgccgagccacacccgcacgccgttccgcgtggagtccctgatctccgccgcgaacctcccccacggccgcttccgcacgccgatgaagcccgccgccgccgccgccgcccccgccccgccctcctcctttctcgccgccctctcgcggcccgcaccgccgccgggcgccgacacctcggcgctccccgccgtctcgtagtcgtagccagacggctgcgattccgaggatgtcgacgacgccgcgccggcaccggcggctgcggtgacagccatgccgccgccgtagtaccagcagtggctgtgttgctccatgtgtgtgactctgtgagctgggaatgtttgacttagcggctgcgatcactgtgatgtgtgcggcgaagtgacggggcgtgtttgattattccctttccaggaaggcagcggattaaattagcgcggggtttatatagagccccgagagggttgggtggctctgtgggcgacgaattttccaggacggtgcggtggggcccgcgcgtcgacaaatgactatgacatgtagggtcatgaaaacctggaagtttgggcgttgtcgttggacttggctgacgtagggcggctgcataggacaaactagcgggcgtcagcgtacacgatccacacccttgctttgctggtggtgtccactgagcaggcctcggcgcgccttcgttaagtggcccagatcactagatcagaaatggattactgtgtttttaagctagtactccgtatctagcatcaccgatgatccaaggggtagtataagctataacacacgtgtctcaaattagggcttcttattttatttatttacatataagaagcgtcagcgatgatatggaggatggtaacgtactatttgctgcatggacaagcatataggtatataggtggtatttgaatcttctgaagatgaaggtaaagattaaatgttccacgtaaaatgaggtggtaacaacgtgtgcttaattgcgttttaattattacaaacttgaaacatggattaatctgatattttaaaacaacttttatataaaaagttttcgcacgaaacacaccgtttagcagtttgaaaagcgtgccacgaaaatccaaaacttcatctaatgtttgtagtggaaaccagtggcagatttaatttgggggcggggggtcttgagaccccactactgccactgggaccatggagaccctcctaagcccccactaaaaattatttgcatagattcataagatatgggagctgaagactctcctaatttgtttagcccccactattattttgttctagatccacccttggtggaaacgaacgtggccatagccatatactacgtgcttccccaaaaaaaaaaagaagagagagagagcatatactacgtgctgaaaccgcgcaaacaacgaaattgaagagcacctcgcaaaaaaaagaaggaaaaagaaagaaccagttaacagcggccacaacaataggctgtactctggtactagcggctggcgtggaacaatgataagtgggtataccaagaaatggtttccccatcgcaggttgggttgagtttgccttggcatgatggaaatttgggctgcgtggttatgggctgttgggtagctacttactcatttgttacgagcacattttctaaacgaataagtctactatacatccttaactctttcctggatcgaatcatatcccttaaccacaaaaccgggtataacacctttcccaacttaaaaaaccggtgcaaatcgactctttaggtggtttgcgaagcgattttgctgacgtggcataattgacttggtccaagtgcactaatgtggcaatccagtcattaaaggaattaaaactagaagtgggccccacttacaagtgacaagggtaagaataaaaaatggtgggcccacctatcagctccactactactctctcaatctcgaacaaatttttaacacaattttgttttcaaatttagatagcttgcaaaaggacagtgacactgccccttaaatttataaaagtatttcttcaggtttgcaagttcagataatgcaaactgagcaatgagcatgctatattcgtttgatcgatcaaagtcgacaaataaattgtacttcattttataattatcagacggatgcaagtagatctacagtgttgaagaacaaaatgaaacacttgagggttatagcaaggttgagtactacccatcgtacttagcaagtcataccgaatatgggtatgatgcaagggattacaaggacaacataagcgctcatttgtataaagcactagtaaacagttgcggttgaaaacaataaagctatggataatgttaagcaatactccctccgtactcgtaaagaaagtcgtttaggacaatgtttaagtcaaaccttgagaatataaatcatgaataactcttaagttgttaagtttgaaaatataaaaattatatgaatagatttgtcttgaaaaatactatcataaaagtatacatatatcacttttcaataaatatttatagaaacaagaagtcaaagttgtgttttggagactgtgtcgctgtccaaaataacttcctttacgagtacggagggagtattgatcaccgatcaatgctacaccgtgttaatagggcccagccatccacctgtagtatactcccttcgtacttgtaaaggaagtcgttttggacagcgacacggtctccaaaacacaaatttgacttcttgtttctataaaaatatttattgaaaagtggtatatgtatacttttatgaaaatatttttttggacaaatttattcatataatttttacattttcaaactcaacaaattgagagttattcatgatttatattcccaaggtttgacttaaacattatcctaaacgacttcctttacgagtacggagggagtacctattctaatattccattaagtcaatttaattaagagtgtgactaatcacggtgaatcttggtcaatcacccataacagcgggcttgactatttgaatagttttactttgactaaaggtgtacaactatactcagaagacacatcccccatgcatgtctccatacaccagcgtatcgccatggtaccctagtaagaggctgtgataggaccctttgcataaccatttacaccacgttgaggttttgcccctacccagaccaggataggtgctagtatttcttacggttatagataaatccgcaagatcacggataccgatctagcattttaccctggagtattccaagtgtgctgtatttatatttctgcaggaaaggtaatggtgtaaagatagagttcatacatccttaatcaagctataattactttactatagtctaaacatgggttaattgataaatgataatgggtaatgtgacacacaggagattttctctaataaatatacactaggcagtggagaagaactatagaaagctaaggttcatatgtacttgtatattactaatgtttagtagtttacatttaacacatacatgcttacaaagctagcacttaattctaagcacacatgtactaccgagagaccactccctattggtctgccagcgtggttatggtattttacaaactcttacgtcatacccgggcgtggcagaatacaagggacgaacatggctgtcaccacctgccacctgccatctacctcactttccgtggggcatacctacatccaacgatatttagctaacctaagaaccatccttatgttaataaataatgtcaccatttcccccaggactcccacctttcagatggataagttggaactagtgcaatccgttaagatcattggaccgttaccgtagcatagatcgactagcctaatcgatcaaatgaagcatataaataaagtacaatctactcatagagcacacatctagtaaactagtagataattcctttattacaactatagtcttacaagaagggtaaagtactcaaggcatacaggaatctccgagaagactatagaaccaaagactattgtaaccctaactccactactactagatataatacaatatggaatgagagaattgcttcttgaagtgtgtgttgaaagtgaagaatctcctctccttttatagcctcctaatgatggttgtatggcggattggcggttactgaggtcggtgcgctcctaaccgtcattagggagggctgagatgttgccacatggaagatgaagatgaggggtagccatggcggttcggccgacccctgggccccacctctctccactgcctttcaccaaaggctgccagatgggcccctatggtggttgaggatggtttggccccactttaggtcggtttggactgacttgtgagcccatcaatccatggactcgtacgtgattcactggaggtatgttttttttgcatgccggctcattcccccttcactttattgtgtaatctctgcatgcacattaattcttcaagacaagtggaactacattatttaatactagcatacatataagaaatgttagttctcttttatttattatggtagttgacggtcgaaattggtacttaacaactgtcaactaacaccccaagctaaacttttgcttgtcctcgagtaaagataaaacttaggttgtttatgatcaggagttgctaccatgttttatgtcacaacagtatcatgcccacaaaatatccttctacctagaatttgaataagttggcaacaatactttaacctctcttatcatactcccatgggttttttagcttctcctcgtcttgggtagttgagaggtagaacggatcgtagagcattaatcacttagtctttgttaaactttctttatggaggttttcaagaattttgcaataaaaccaaagttcctccaatgatactctcagatcgctcaatgtgtacaatttctcaccaaggcgtagtgttgcatctttttcatcctacctctaaaaggtttatagtggagctcaaggtgagaaaaaataatgagacaatactttgtacacatattttgcaaaatcaaagagaggatccaaggaagaaagcaaatcatacaatatgatcaagatgtgcaaagtgtgtggctatatggtggaaggtggtatgtggtactcctttgtcataggctctctttattcctaattggagatatgactatttttgttctaactatttttctcatgttgctcaggaattattgtgagcatacactccttttctcctttttctcataatatgcttgagagcattttctattttctacctcctccttttttttttctagagccatatgttttgcgaactgctaggagcaatttctttactgacatgaatggagtatttatttggtggatgaaaatgttgctaaccgcagtgaagaggacatcaataccgcccatacatcgacgtgtacacaagtacaacttcatggttctattacccgcgctcatgcgcatcaactcaactatcagatgagttcattcgtgagttcatgttcatctgatttatactctcgagacacgtgcattcttgttttaattaggaatgatggagaggatcaacaggggagaggattcatgtgggctggattcagactgcagaacatcaccaacttatgacgaccaccacgactttatgcggactccgttttgcgcgtgcgcataaaaagtttgactgttttgagctccacataacaaataaaacaaacatgcaatggtacatatgctgtgctaaattcccaacatagaacttataaaaatgtaaaaaaaattgagaaatagagtagtacaaattaagtataactaacctttggcgcaatagatctatcaaaccattcgagttcaaaacattctccccctatgtttgtgttcataagagagagaaaatcgtgcttaaatagcatggcagttaaggctcgaccttatataggagaagctattttcactagcggacaacttaagccaacaccatagaaaaaagtaggagtggcggtggcttaagtgggccgcagcgaaaatatcttcatcttcactggcgacccacgtcactagtccgtcatcaaagattttccatcttcgctggcggtcacttaggtgtgccaccagtgaaaacctcaacagcttcattggcggcccgcttaatttggccgccagctgttggcggctgttaaatgccgattttataccgccaacatctgcataaaagttcagataataaaatatccaacatagtaataggtgcttaatctcacatattccacaagtgttggtatatatttgtatgcagataataaaccctaaagttgggaggaaaatcaaactaaagtgaggagaaatgtgtatccatgcatggatgggttgtgaacttcatcaaaatgcccgagaatcaacccaaaatcttgagaaaatagatagaggaggtccagggggaagatgggccaagagccaggccagatgggcctagcccaggttcggccgaaccaaaatctcagccatccaggctggggtttggcgtggacggtcctgatcatctcctgatggcggttgcgaggcatttccgacaattcgcattgtataaccgtcatacctacccctatataaggacatcatctcactcactttaacacacacttccaagcttgaactgaattatacaaggctctattgtactatattgtatactagaataggaagagagtagagtagaagaagtcggaagaattccggagttgtcggtaatcttctcctatttcttttattttgtttattactctgaattcaatataatattcttcctgaataatttagatttatcttgtgagaattatctcttgattagttcctaaacagcatatgggattattgttcactataaccaactaaaaatataatgtttgctttgttgagttataaacactaaagtagatattaattgcttagacgtggtgtttaggtagttgttatccagtaattgctgcgtatcgcacagtacgtttgaggtaggtgtagaggtggtgacagccctcgagatcacttaagtcctccctgtccgggtacgtagtagagcgacatctgagaacagcgggttgccagtgcctgaagtattgcattaggattaaagttaagcttttcgtagacactgtttctcactagtaaatcctctctatcctttcctatcatctgcttggtgtccttggatgaaccggaggaagatctgaccacacacgttcccttggattcgatatccttggaatactctgtaggggaagtgctacatcggtatatccgtgcgcttgcggattctatctgtgatcgtaagaaatatcaataccaacgaagatcggttttcgctggcagtcctaagccccccacccctccttacgttgttgctggcggtttcgcgtatggccgccagcgaaaagttttgtgtaacgccatgaaaaattatttttctagtagtgattgcatatatcagtcatgtagggaaagattaattatgtcccaaaatgtccaaaacccaaaatgaaatatatattgattagtgaacgtattccgtatgtagcaaataaaactaagatttttggatttgataacaatattgagccttcagtgccagtgtccagtacgttattccaaactgtgtgcacctggtgtagtatttagtttttttaaaataatgttgaacgaagtttgccaacatgttttattatgtttgccggggaacggttgctgatcatttccaaaccttgttcatcctcgtatcctttttacttttttatctctagctctgcccctgctatccgagaaaagtattcttgttaaactcttcttgatcatggagcaacctctttttgagctgtccgctccttgaggcgaattctatgagccatctccttcatcggagcccatatatacaactggctatgaaattcgccccgagctaatcaatatggttaaggaaaatcctttttctaactttgatccagaaaatccctaccatcatctccgagactttgagcaagtctgctcatgccttaagattcgtggcatgagacaagaaactgtgcggcggaaattgtttccattctctcttccagaaagggcaaagcaatggtacacctctaccgttggatgtgtaaacggtagttgggaaaagttgcaagacagattctgtcttgccttcttcccagttactcgtatcactgcccttcgagtagaaattctcagttttaagcagatcaaaaacgaattaatcggtgcagcttggtccagattcactaatttagtgcagtccggaccaaccctgtccttcctcgagtatgtgctactacagcatttccatatgggtctagataaggagtctgcattttatctggacataaccgccagaggatcgttcatgcacaaaatgccgtcggaaggaagaacaattttggatcaaattctagaaaatacttccttcatgacgcaatccgatgaaccccagacagaggcatctgtgtcaaagatagaggaacctctaacgattgagccactctctgaaccatccacttttgctagcttgattgatgagaaggttcctgagcagccgtccgtcgaggatgaagaaattcagactccggatcatgccgcaattctgtttagggatggttttgacgaagattatggcaataccctgaactatttcagtaagaataaaccactcattcctttgtcgcctctcgatcctatggaacttggcttcttaagggaaactgttcgggagctaacatccataatgagcgatgaatggctaagggaggtatagctttcatccgaagtaattcgggtaaataccgctccccgaatcattcgctgccatctggaagggaacgacgtcggtattctctacagcccgatcgtcgaggtcaatctcatttctgagtcttttgcattcgcttatctaagcgataaggcaataaccccaacgaacaaattcttcaagcatccgaacgggaatatcattgaaggatttgggattgtacaagatgtgcatgtctgctttgaagatagggaggcgatcttggatttccacgtctttggaattcaagactttgacatcctaatcgggctacccattgagcagcttcttattaacacaccccgattagacagcctcaaaataactctaggaggaaatgaattttcagttccattctcacgggcaaggatcgccctaaccgaccctctcccagaaattgagtcagcagaggaggttaccgcagttccccctcacaagtctcccgaggcccttctggaagatgaagtccccgatttcatcaaggaagaagcggatcccggtgagactctcgatctgccaatcatcgaaccgctacctcgacttccgcttgagctaaaacctctacctccgggcctatgctatgctttcctacacaatgacagagaagctcctatcataattagtgacaagctctctgaagacgagactcaacgtcttctcatcgtgttggaaaatcatcgttctgttcttggctattcccttcaagatctcagggggattaatcccgcactttgcactcttcgtatccctattgaccccgagagtactccctttagggaacctcaatgacggctcaataatgcgacgcgagaggttgtaaagaaagaggtcttgaaactcctacatgccgggattatttatcccgtaccatacagtgagtgggttagcccagtccaggttgtgccaaagaagggaggaatgacggtcgttgcaaatgctcaaaatgaacttatcccgcaacgaaccgtaaccggatggaggatgtgcatcgactacaggaagcttaacaaggctacgaagaatgatcatttcccactacccttcattgatgaaatgttggaacggctggcaaatcattctttcttctgtttccttgatgggtattccgggtatcatcaaattcccatccatccagaggaccaaagtaagactacgttcacatttccatacaacacctatgcctatcataggatgtctttcgaactgtgcaacgcgcctgcatcttttcaaagatgtatgatgtctattttctcggatatgatcgaggacattatggaagtcttcatggatgacttatctgtctatggaaagaccttcggtcattgtctgcagaatttagacaaggtcttacaacgatgccaagagaaggatctggtacttaattgggaaaagtaccatttcatggtccgtgaagggatagttcttggccaccgagtgtccgaacgaggaatcgaagttgatcgtgctaaaatcgatgttatagatcagcttcctcctcctgtgaacatcaagggaatccgcagcttcttgggacacgccggcttttatagaaggttcatcaaggacttttctacaatcgcccgacctctgaccaatctgctagccaaggatgcaccctttgagttcgatgacacgtgcctgaaatcttttgaaatccttaaaaaggcacttgtctctgttccaatcattcaaccgcctgattggactctgcccttcgagatcatgtgtgatgcaagcgatttcgccattggtgcagtcttgggccaaaccaaggataaaaagcatcatgcagtctgttacactagaaaaactctaaccagagcctggttgaattatgcttctactgaaaaagagctgctcgcggttgtttttgctattgataagtttagatcttacttagtgggagctaaggtaataatttatactgatcatactgctctaaagtacctactcagtatgaaagatgctaagccacatctcttaagatggatcttgctactccaagaatttgacttggaaattatggataagaagggagtagaaaattccgtagcagatcatttgtttaggctgcagaccactgacacacaggaacaaccgataaatgacttcttgagagatgacatgctgatgacggttcgcgactccaacccgtggtatgccaacatagtaaactatatggtatccatgtacataccaccaggggaaaactagcgaaagctgaagtacgaaagtcgctgtcatatatgggatgagccatacttatatcgagtctgttttgatggcttatgcctcaccctatggtggccattatggtgctttccgcacccaggctaagacttgacaaagtggcttcttctggccaacaatgtatgaagactcaaaagaattcgttagaagatgcacaaactgccagaggcaaggaggaatcactactcaagatgcaatgcccctcacatacaatttgcaagtcgagatatttgatgtttggggtatagactttatgggacttttccctaagtctcgcaactatgagtacattctggtggcagtcgactatgtctccaaatgggttgaggctatgccgtgcagcgccgcggatgcgaagcatgccaagaagatgttcacagaaaccatcttcccaagatttggtacccctaggatggtcataagtgacggaggttctcacttcattgacaaaaccttccgagacctcctacgagagatgggagccaaacacaatgtggccactccataccatccacagactagcggtcaagcaaaaacattaaacaaacagatcaagaatattctgcaaaatacggtcaacaaaatgggaacatgatggaaggatagattgccggacacacttgtcacgccctaaaaatcgtctaatgtaaaaatacattgtttaaatcatttttagaaattaaaattaaaagcctacaagctaaaccctaattatctaggaaaattttcaacataaaaatgagctagataaaattttattaaatactttgcttgttcctctattttctagaattttctgggaattgtttgagcaagggaagtatttttaataattggaacaacatttcacaaattattttaattaaaaagttcaaaaaacccttccttaagtggttgggccgtttttggcccaactttttccccctcccgcgcagccgagccggcccagcgccgcccaagtcggctcaagccgagccgcccgcccctcctctcatgggacaccgacatgtggggcccacatgtcgggcccttctcctacctccggccggccggccttgctagcccgagccgccccttttcccctccaaatccacctcgaatccggccaccccgagtccctttttttgaggggtttttatcctctcgttctcctctatctttaacctcaaaaatcggagcaaatcgttgagtattttatccgaatcgaactcgttttcgagtttatctctaaaaccgagtttttgatttcccgagtcgatttcttgcgggaggagtccgatctcttcaatccaaggctatatataggaccccctagccctcctctttcgtttgccccatcacccgtcccctcccgtgccccgtagctcgccgccgacgccgcctagcctcgccgtcgccgccggcgatctccagccgcgccgcctccgccgtcgccgtcggtcgtcgccaccgtcgtgggcttcaccacgccgtagggaagcacggccaccctctcctttccgccgccggccgccgtagcccgctaccaccgcgcaagccgagccgccgccgccatcccctcgtcaccggccgtcgtcgttcgtcggtagacgtgttggtgagcaccgttgcgttcatctcgtcgtcctccacgtgttcttgtcctcctaatccgcagccggccgctctatctccggcgaggtcgccatcgtggttcggccgccattgatgaagtcatcatgtcatcatcggtttttttctttttcccgtttttctaatagattaaatcttcggaaaatcataactaaataaccgtcgatccgttttaggtggttcaagttgctaaatttttctaaaaccgagatctacatgttaaaaatatccacatgtactgtttatgcttgtttttatactgttttgttgatttttgtttaattgctttagtttccgacgttccggaggagagtgtttccgttgaggaaggttccgaagcgtttgcggaagcccaaggcaagtcacacagatcccaaacaaccatttgagcatgttgaacccacttaaagctattattttatttcaactatgcattgtttttgaatgtcatcgggtggtgaaccttttccaattaattaatggccgaagatgatcttattttcctatgggttataatttgattagcatgaaccttatatgttggattggttcagctaaatgctatatgtaagtttgcttagccatgcttagaaacattagctaactaaagggattaattataaactatgttatattattattaattatggttacattaaatggtagctcacgatggttaatcgtgtgatgttaattaattgataattaaaacctggttaaggtgggttgtgagcatatggttttgatggttgtgctcatgacaattaaggaccggttcgcgagctacttttgtgaaacatttatcgtgccaaccacaagccagcgtgggcaacagctttatcttttgtatagcatgattcattatagtgcgccagactgtgaagcggcgagaagtccgtgggggtcgctggggagtccattgcctctggttttgagggggagattatgatccaggaacggtgcactgcggtgagttgtgttgtgcaaggggtattgtcacagttcctttccgaggtatcgtggtggtactaaggcgcatggtaacatgttgtgggattgtgtcttgtgggtacagtggtacacctctgatcagagtttaatctattcgaatagccgtacccgcggttatgggtgagttgagcaatgtttttcgtgattagtctcacactactcatcaatgttaataatgtgataattaatttgactcctggtttggaatggataattcctagtttggaggtttaatttgttcaactggggttggttgttcaaatgtggttgggcctatgcaacatgggtgtgttgtatggtgtttatttaatattgattaattatacaactgttttactattctcttaaatatttgttaaatgctgttatgcaaatgagctatattatgccatcctttgttatcttgtgcacttgcatatttgctgtgtggcttgttgagtatgttatgctcattcttgcaatattcaatcatcagaagaggagtatttcagcgaaggtgatgatctgaaggattgagcttgttctggttaagatgcctgtggagtggagtcgccatagctgttccgtagtttgttatagttttatttttccgctgcgtagaatgttattctttgagaggaactatccacctctgtaataatttattatttgtgaatattaaatagttatttatttgtactctattatcaatttgttattgtgtgcctcggttgattcctggacgagggtttaacacacatgtaagcgtttggaattttggatagaaattccgggcgtgacaacactgtgggcataccggacagcatacaagacacccattggaatgtcgccatatcaggtagtctatgggaagtcatgttgactacctgtagaactcgagcacagagcatattgggccatcaggaactggaacatggactttgagggagcaggagaatggagaaaaatgcaaattgctgaacttgaagaatggagagagaaggcttaccacaacgtaaggatatacaaagaaaggatgaagcgctggcatgacaaaaggataaagatcaagaaattcaagtcaagagacaaagtactaatgttcaactccagggttaagctttttggccactgaaaactgcgcagtaaatgggaaggaccgttcgacgtcatcgacacctcttcgcacggggcaatcacactccgcgatgactcaggttttgaataactgtgggggagatatcccagcttctgacgtgcatatactctgaaaattgttgaatctctgaacacctagaaggaactgaactcagcagaaaattgcagagggattaggcaccagagtggttcggccgaaccagtgttggccctaattgcccacaatttttacaggtaagtaggtaagcacgtctattatctgtatatctctaccatggtatagtactagaggtgaaaatttaggaaacacttggttcaagcataagtgaaagataaaatttccaactaatgaaattcttcatatgattgatcttgtataatcattattctcagccgaacttgtgcttgtgaacaaccatccatgtgtagggaaccttatgcatctaggtaattgcttcatgtgagatgatttatgatgaaaggaatttttgcaactcttgttatgactattgggaatttgttttcaaaataaaatttgttttaaaagctcattcctccaattgacttcattttatacctactaaggccatatgcaagtatatcaatgatcaaccttattacgcatattactgcttgacattatattgagctttgtcaaatttgtgtgactcgtgttagatatctttcatactctcatgatcaaggggtcaatttcactttcatttccacatacatgataaaaagctaagcttctacactggaagttggcttctcacgaaaaattccattcgaataaactcctacattagactatgctttcttgtcctagaaaagtttttggtaaaaagaaaatgagaaaagcagggaaaggcatggctatgaaataaaaagagaaggaggaaaaaaagagaacaaaacttgctctcgaaacattgagcatgatgagaagaaaatatagccatgccccttccataatcatgccaaaagaaggagaaagtgtaggaaaaagggagaatcatttctttatgccaccatttcacaaaatattttacttttccatttctcaccacacataaagacccctgatctaggagtatgactgatgatcttattaagtccgtaattttggctttgcaatatatatttgatgcaggtatgtcacaatttgtcccaccgagctccacgtatcagccttagaatagaggtatattctggcactctttgccctggtaaggatcaaaaaagaaaatccttgagagataagagagaaagtcaatataaggaaaagagctggtttgcgaaaattcataaaaatcccatgagtctgacagagaagcaagaaggactggaatcaggatcattccatctatcaattactcaagatggtaagatagccactgataaagttcacaagtataggtatggttatgaatggtgtatatgcatgatccagagttgtcggtaatcttctccaatttcttttattctgtttattactctgaattcaatataatattcttcctgagtaatttagatttatcttgtgagaattatctcttggttagttcctaaacaacatacgggattattgtttactgtaaccaactaaaatatagtgattgctttggtgagtttttttttttgcggggaacgggagatatattactcggcaacagcctccttacgagccacgtgagaaataaagttacaagagttatctggcctgaacttagttaagctattactacggcccaaattggccaacaagtggctcagatgattttgatttctatgaatcttgcacagctttacctccctgcttcccatcaagaggtcacgaacctccctgactaagaacaccatgtctgaacgcaccattgaatcggactgaacaagttgcttcgccatcagactgtctgtctctacgacaatcggaagaagagtccattgtagcgccaaggaaagcccatctctgcaagagaggagttcagcttccagcgcactgccgtagcgatccacaaatccagacgctgcaaaaattacttctccttccgcgttccgcagtactgcaccgattcctccttgcccgtcgctagcttggaaggacccatccacattcaacttcatccagatgcctgtggtatctgccattttgggctctcgtcacactgtatctgaactgacacactgggcttcgacgcgcgagcatccaccacatgtttgcccttaacaaggttggctcttgatgttgcttgatttctgccaaagagtggatatagctttcaatgaatctttttgatgctgcaatccccggaacaggcttgccatgggtaacctcattccgcgcgtgccagatacgccacagtgtcatcagagtaacagccctctcagactctgcaatccttcctaggtgatcaagaatccctggtgtactccccgcggcaatgccggacggaagcaccctacgcagatcaacccccatcgcttcccaaaacagacaagcgtgtgggcatcggtagagtgcatggccagtgtcttcagtttcaacaccgcatatgctgcacacgttcgacacctccagcttccttttcttcttgttctccagcgtcggaaggcagttagtgactgcacgccacacaaagattttaactttttgtggaacattgcacttccaaaccatattccatgccttacttaggttgctgtctgacgagcttgacccctcctcagcacgcgccagtgatactgccaaactatatgcacttcttactgatttcttttattctttttattactctgatttcaatagaattatcttcctgagtaatttagatttatcttgtaagaattatctcttggttagttcctaaatagcatatgggattattgttcactataatcaactaaaatatagcgattgttttggtgagttataaacactaaagtatatattaattgcttagacgtggtgttttggtagttgttatccagtaattgctgcgtatcccacagtacgtttgaggtaggtatagaggtggtgacagccctcgagatcacttaagtcctccctgtccgggtacgtagtagagcgacatctgagaacagcgggttgccagtgcctgaagtattgcattaggattaaagttaagctttccctagacactgtttctcactactaaatcctctgtatccttgcctatcatctgcttggtgtcctaggatgaaccggaggaagatctgaccacacacgttcccttggattcgatatccttggaatactccgtaggggaagtgctacatcggtatatccgtgcgcttgtggattctatctgtgatcgtaagaaataccaacaccagtgaagatcggttttcgctggcagtcctaagccccccacccttcctgatgttgttgctggcggtttcgcgtatggccgccagcgaaaagttgtgtgacgccatgaaaaattatttttctagtagtgattgcatatatcagtcatgcagggaaagtttaattatgtcccaaaatgtccaaaacccagaatgaaatatatattgattagtgaacgtattccgtatgtagcaaataaaactaagtttttttggatttgataacaatattgagccttcagatgccagtctccagtacgttataccaaactgtgtgcacctggtgtagtatttagttttttaaaataatgttgaacgaagtttgccaacatgttttattaagtctatcattttgcagcaataattacattttaccaaatagaactattaatttttcactctatttttatcaaatgtgataacatacgattgccaaatttttttccgaacatttatataacagaaccaacatataatctatacttcttgaaaaaaaaagttattgttggtggcagtgaatctgccatcccatctactaccattgtaaattttacaagttaatgcctgaacttcttaataacaaaaagaatcaaatcttaactaatgaaaggtaaaacttaaaatgaaacgaggataaatgaagataaatgaaatattagccgttggatttactacaaaacaaaagaggataaatgaagcttgaccgttggattagatggatggtgaaaataataatttaagaggtttctgaagatgaaactactagaaggaaagaaagaaaggaatgggaaaagctaaagaataaacatatgaaggtataatgctatacatataatttacgatttgcatctattgtaaaaactattttactaataaaccctcatcataacaaaagaatcatgggtcaagaatcaagattgagctatttcaagtatatacaaaatgtatgttcatttgattaatttttttctaacaattaattttaatatatttgagaaaaaaaatacaataagtacatgcacaattatggtcgcccaaatataagtttaatgattttcacacgaatttaaatgaaatcaaacccattccttaaaaacctacaaaatatttgtgcatagactaaaaaagcacgtgccaaaaaaagtaagagggtcctgcaatcacgaagacctacaagactataataaaatttgtaacaaatattaagctatttagtgtattatcataatattagtcaatctaacctatgttttttgtatgagcaacgagaaactcatacaaaagattaccagtggtttttttgtaattttaatatgtttttttttgtaatttaccactcccacataccacataatagaagacctagagtcgcgtgaatgtgcgatatcataggctagtctaaatggattgccatataaaaaatcagaggaagtctctatagcaaaaagatgggtaacacattaatacattttttttttcttttagctagttaccattatagcataggcaagcagtgaattagttctcccaaaaggcaaggaaaagtgatcaaagtttttttttgagggaaaaagtgaacaaagttatgcagaatctgctagcttgcacataatgcttcaaaagtctgtaaggatatgatgtatatataataccgtgttgtagatatgtactcttgtagcacaccatgcatgtccatatgtatgaatttctcgagccaattccccgctagattttccttttgttcattcagttcatcttcttgtacacactagctagtattccgtttaacaacaagctgaaagtgtttaatggtagcttaacgtatttttgagttactctcttttaccttaattactcgagggagcatagaaagttgttaagtacagtgaatttcgagagtaaaatcacggtcatactagtacatataaatgttgatagtactaatttgggcacatgccatacaaagtttaataatattattatgtgtacccatggggcaagatgcatgcatcaagctagctagcttttgggaagtaggtccttgtgtccgataaagacataaagttcagtccccgcccaaagtacacaccttgaaaatacttcagcatgttgtgcgtataatatggtggtgaccaccaaattgttgcttgctccagcatgtgttgcattgtctgcactttattggcactctagagagagccagacagcaagtagtaggatgcaataacacacatgcatgtgttcaagtagtacttgcagttgcatacttgcatgtgttcaagtagtacttccagttgcagttgcatacttgcatgcagctttttgcagtttgcacgttccattgcaactgcatgcgcgcgaaatgtaattcgcaagaggtgccttgcaaattgccaaccttttggatgatcagtcagcagggtcactaccaccattgatctccgacagccagagaagctcctccaggtactcggcgccgaggtcctcaagctccacgacgaaccgcttctgctcgtccgtcgtcgcagtagtcaattccgtgctcttgctgatcctccgcgtctgcggcgtggcattcgccgtcgcggcggtggcggcggcggcggcgagtagttcagctttcttgcgccgctttcgcttcgagtgccgccgcttcagcgccagcacgggggagcccccggccgcgccgagggagagcgcgtggagcgactcgcggacgcgctccacggggaagttgagcgccgcggcggcgccacgcgccgagagcgcggcctggtcgtaggccatcgcggcggcctcggcgctgtcgaacgtgccgatccacacccgcgcgccgttccgcgtcgagtcccggatctccgccgcgaacctgccccacggccgcctccgcaccccgatgaacgccgccgccgcctccgtctgtccccgaccttgacgatgatcaccgcccgcgctcctcctcctccccgccacggaggatggcgcaggtgtctcgtcgggccagcccgtgtcgaaccgaagcatctccgaggaggaagacgacgaagacgaggaggaggaggaggaggacgcggcggcgtctgccgtgtagccgatgtacatgccggcgtggctgaaatgctctgccattgatttgcgcgcttggattggatagagagatcgatggtggcgtggattgacttttagctgctgattggttccaggaaggcagcgaatcgggtagcgaggtttatatagagctcgctaagagcatgtacaatagcatgctataagccagctgtaaacatattttaagaagataaataaagagagagatgggcagcgggctacagatttgtaaccagctgtagcacggactccaagatgcagtgtgtgtatgacagatgggaccaagtattaatagtgtagtatgtaattattatatgaatgagctattagattggctataaataaattggagtccgtagttggctatactattaaacttactctaagtgcagttggagggattaatatagtgttcatagggcattagggcggcagggttgtggggcccataaatgggctgtcgcttttaacgggaaaggcgtctggtcgtgtagggcacatctggcatgtggctgacatagggcggctggataggacaaaagtatatgacgtaagcgatcccactgtgtgatagtggtatgtggagtactggagtgtgctgttgccttgttcgtacgtgaagaagcttttgcttactaggaacagtgttccccaatttagatcgagatatttctgaaaaagtaaaatgtataggtgctctcttgtagctcctagtacatttttattcttaaacattgataataatgattggaatttaatcatgttaaggctggtttccattggggttgggagcccttctcaagtacgtaaaatggagaggtagattagtgcatgcttgattaagtattagctaaacaaacttaaaaaattaattaatatgattttcaagtaactttcctatagaactttttttttttgcaaaaacacaccggttagtagtttcacgaaaagtatcagtggaaaacgaaggattagaaattggattttaggctagcagtggatgcgatatgccttgcatccccacctcttccttccctatgttaacctcttccttccctatgttgtgcgggaatggctagcctagatttcttacaatttaatcttttctaaaacttattttataaacaaaactctcaagaaaacttatgatattaataaatctttttttggtgcaaatgacgctgacgccgtggccattcccctgccaccatggaatcccggtcgacggggcacccgggggatgacgccaatgacattggcaccttgggtcaacccataatgctagcatcatttgtgccatccactgagaaggactaagccgcgcgggatctcccccctcccccaacctcatttcccccctgcctgagtgaagaacagggagggttcctcccttccctctctctccttcctcacctcttcttcttaaatgtgatcgatttggagatgttttttatgggatttgttggcggaaatcgaagagcgcggtatactcacattctccttggtccatccaagaacatctttcacttgcaaccttagttcatctatagtgggatgggtgggaataaaaatgtccttcaacatcatatcctcgaactcaatatgtgcaccaatataacgtttaattaaccaacctacaacgtagtaaagacgagcaagtctatccatctacaccgaaaacgtattattataatcttttgaaaatagtctatcattcttcctaaatgtcgtacaaacccaaaagtttctttatcaatgcataaattaagattgaccacaacataagcctaaaaaatgttatcaactactagcctacaacaaatatttaattgacatggaaaaaataccctaaaaatataaatcgtgtcctaaccatacattagtctatcatatatacaatgaacacatacaaaaatcaaatgcatggctcacatctatcatatcgatccgtacccaacaataaacctaacacatatgctctcaatttaactagcgagtagagttgcgcgttcgcgcgacccaagcctcctgtctattagatttggtaggaagtgttgttacatttttttatctctaataaacaatattgttgtgataataaatagttaacatgtctaacgtgtaaaaattattgtaaatataatattggaaggttctaaattatgtatattattagcatgtattatattttaaatatttgcccaaatattttttcatttaaaaaattattcagacagatatttaaaatataataactgctaataaacttgtggagaaccctgttgttttgtattataaactttagtttaagtcattctattgaaaggaagcattgcacgtgacaacacaagcgaaaagaggcggcaccactatctgttggcatgcaatggcaactcctcaacccttttatcttgttcattcatgttttatttctccatgtacaccaacgcttcttccatcccaactcaacacgttccaccatctcctctctaacctgatattttttggatgtagctgtatttatggcaccatattttacaccaaaattagtcataattgtttttacagtatgtaaattacatacacccacattgtaattgcaccgtaaattttaaaactcaaattgtaattacattgtaaaatttaatatttacattgtatacttttctaatacacaatgtataagagaattagaattaaaagtaatttattatctacttggaaaatgagactggagagataaaagcatagttacatatgggagaaagcaatcatatggagaaaaagtgactgaaattaaataaaaaatgcggtgccatatttttttgcaaacccatattttttttctaattttgtatttttttaatgatatttttgtttttgccaaagttatctatgattgtgtttttactcccacatgtattccctagatccttctaatggaagcctcctcactgttctccttctctccatatttttagcccttctttccaaatccaatggctcatattttaaagcgtacgtggctcaatcaggaaatgaataaactttcgtcattcaatatgatgatgcctaaattcatttttccatatactccatacacatagtcactaaacaattccagtggcaagtatacatttgaaaaaaaaaatcgaagagtgtcacaacctgaagtttccccccttttcttgctttaaaaattggataaataaattgcccgaagaaattatcttaattaacctagagctaaatccctagttaataaatgcaattaataatcggaaatagcgtggtggaatttttcttgagttccccatgctccaatgcattaataagatttttagtggaattttcagagccttggaaataattttaaccaattaaaaatcaccaaagtgcaattttaaatcccaggaaaaatcctttcttctttttctttttcttttccttcttttttctcttttgggccgtcggcccactccctcccgcgctcggcctccttcctttgggccggcccgttcccctttcccctctcttcgggacgctgacaggtggggcccacctgtcaggtcgtccccttcctccagccgccagccccacgacggcaaccgccgccgaaaccgtccgcgccgccgccttctccgctccacgccgcgcccccactccgcgtccccacgtcgccgccctccccgccattcccgcccgcacgcgcgcccgcaaatgggcgggattcaatttgaatccccccactctctctctctccctcccacgtcgccggccaaatcggggggtttcccgaccatgtccgcccctctcgagcccctataaagcttccccgcatctccctctcccttttccccttttcgtcgcgctctcccgtgcctcctaccggtcgcgcgccgctcgctactagctccgccgcttgccgccacctccggtcgcgcgccgcagccgctagagccgccgccgcgccaagccgccgccgccattagcattgccgccgcgtgagccaccttggccgccgctcggtttccgctaaaccccaccggagcccggttctcctcgcacaccggtgccgccgccgcccgtccgcccctcctcgtcgccaggtcgtcgccgccaccttcatcctccgctccggccgccatactcgccggtgaggatccccccctcctccctcttcccctctctctcgtttgcgccgcctctctccacgcgctggccgtcgctttcggtcgacgccgccgtcctgtaccccgtccgccgtcgcttcccgcgccgccgattgccctcgccggcgaccgtgcgcgtcgccgccggttgccatggccggccggccggttttgaagctgagccgagccgtgcctagccgccgccgtgccgtccgatcggcctcccggccgatccggaccgtcggtcccgtggaccggcggtggaccacccgtgtggtcccggtccacggtagaccggccaccttgagccactgcccgtggggcccacatgccggcgcccccttcctcacccctttgagccgctgacccgtgggccccgcctgtcggcgccgccccccccttggatgacgtcagccctgggtattattgcgcaataattaattaagtactttttctttattagtaaaaacacagtttatcttctaaaattcataagtaattcatccaagctccgtttaagtccattcaagtctcagtaaatcaagaaaaatgcaaagaatccattaaaaatggttttgtttcctgtttcagtagtcttatagcatgttttgcttgtgtgctttgtttgtcgcgtaggtttcggccgtttcgtcgatccgcagtttcttgaagacattgctgaggtctcatcagttcgagagcaaggcaagtcatgcaatacgtttgatcatattttacccaatttaccaatatcccgcatttctattaaatgttgcattcttttacaatgtaatgtgggatgggtcctattccttagccacatattggttaccttatgccattgataacttgggtatcaaaatgactagatgttggcttaggaaatgcttagccatgcttagttcaactaggacacaaatggggatcacattattacatagactctgactattggcatagctttagattggtgccaccgcaagggtgtcagttaattaaaatattctgaatggcgggctgtgagtgcatggttttgctggtcgcacccatggcagttaaggaccggttcacgggaaaccctgggagacttaccgtgcttactacaaacgggagtgggtaactgcttgatctgaagtatagctcgaccctttcctaggcaccggtggcgagggtgggcgtgatggagttgggtcggccgaggtgttcggttgtccagctgccggattcaccgcggcgcaagaggggaccgcccactgccttttgaggggtgggggtgaaaccttagcgtggtgtggatggttaggggagggttatgtggagggtcttgtcacgatttccccctttgcagtatcatggtgatacttcggggcatggcgacatgtgtggaatcgtgtcttgtgggtacagttgtacacctctggccagagtaaaactattcgaatagtcgtgcccgcggttatgggcgatcaaccagattcaccgtgattagtctcacccctagtttaacttaatgaacttgtgtagttcaggtggttggttgggcctgttgcaacgtggtgtagtgttggacagtgattggttaatattgattaattactacagctgttttactgctttcaactactgctttgaaatacctgctttatgcaaaagaacccctagcttcctttggttatatcctgcatcatacctcctcttccggtatgacttgctgagtacagtgggtagtactcagtcttgctctcttttcccccacaccagagttgaagttcttctcagttggagccgtctcagagaggttggtttcgtcgctgccgtcaaggtttgcctgtggagtggagtcgcccgctgctgaagtcaagcttcccggtttagctcgcttttatctttcccgctgcatttgtaatcttttatatttttgtaagacgtgggtctgtatgtcaacaattgtcgtttgtgtaccctggctggtcctggacagggatttaatgcacattcagcttagaaattctggttcgagaatttctgggtgtgacaaagagcctaccagcacattgctcacaagtaacaatacaagcctcaaatctcacattgcaaggcataaaataacaaatttgagcaaaaagtgattcctagggctatcttccaaactccaatttcaaccgattaaaatggaaaaaaataaggggaatttaggagtataccttgctcttcaatttccgcaagaaataccgcggaaaacaacactaaatcgaccggatttgaggaagagaggtgacagggagagagaggggagcaaaacgaagccgtcttcagttatgtatggtgtgcacaatgcgtaagattgtgtatgtcttatccttgagcctatgtagattagcgtgaatgcacgcctcgtgccatcaacagcatcaagaagcaccgcattacccagaggggatacctgctttatctagatgtgaccgagttcaaggaggattcgacatggcagtttatctattaattagaaagagtttgttagtttccttttaactctaggaaagtgtgtttagtatccaataaggacttcatgtttttcttttatatttagggaagtttctttcttgtccaataagaactagtatctatccatgggtataaatatgtacaatcggggtcattgtaaactatctccacgattaatacaaattcggcgcatcgccacccttttttacctttctatttttttcgacaagtttatgctaagacttgtcatggttgtttacatcggcggggatagtgctttgacactctaatcttgtcaatgtaagcacttacctattatatatcttaattaatctagtttggtagttcaatttacttgtatcggctgatattcgttttagggtttatgccggtatcgactaaattgctttaccagattatattagctaaggtatctaccatcctgaaaatcagtcaagggcttgattgtctagatattatgtttcttttcatacttagtgttgtatcagttaagtttgatctactaagtcgtgtttagaaccataatctctagcctgctttttgattgccaataacggtttcatcggagtttcagccgatgaggtatctagacgttgcatcggcttataaggattatatacaagatagattcagtcgattgcgacaaagatttcattgtttatctaattgtttggatttcatgacatcggtcctccagccgatgtatgctttaaccttcggatcattgcttattctatcatattattattagccgattggtttctactagattatattgctatttatcatcatcacctgattgtctttatattattatatatattggacatatagctgatagctcaaaatcctatcgatattggctggcatcggcatcggcattggctgaactactccattggcttgtcaatcgatcggctctttgatctgttatctatatatcttgttagttgcaggatcaaactgactggcacgtccacatctcaacaacctttggacctgcactggagctaaggagatctctcactctctcaggacgttgctgttgtcgacttagttcgcgccaacacagatatggtattatcggccaagcgtagatttttcatcaacagtgtataaatgaacttttctctttatctttgtaaaatgatgaactcttttcagcaaatgaattaatcaagaacacactaaaagtatccaatattcagtctatgatcatgtgcaggttgcagcgtttttgagagaacttttaacagaacatattctgaaatcaagaacaattaacattaagttcggaaataaacaatagaaacggacatttagtctaagatgatgaaaaacaaaagtgagaataatgaattttaaacctatctccaacttattttcagacttggtggtggaccaatatccctatggtttgggggataatgagccctgatttccaccttcccgggccaaaccgaatgcgatttttgtcagcacaaggattttttccccacgtggtgggcttccccgaaggggcagggcaaaaggccggtatcccgcccggccttttgccctctatccgatcgaacgaggcctaatcaattggtagagagatggttgagggaggctaattaattggtggaggtgctacactagctagttttcactagaaagagaggaggcagtggctagaggatgaagatggcctgatgagtaggtctaccggtgatcaaagaggatgccgacagaaaactctattgattcaaattctagaaaattttagtgtcacacatcttagctttcacaaatagcaatattattattttatcagaccggtaattttttaatggtatgaattcaattagctctctttaaaaatgtttaaaaatagaaaattgtaatatcaatgcctgtagtaatgctcgaccaggagtaatccattgtcgatcttcttaaattaaacgctctacgcaggtagtcattgcttgatgtgatggtcactattaattattttggaatgaccctgcaagacttattcagcaggttgttaccagaaaattttaattaattttgtttccttgaactattagcgcaatatgcaaccaagtcgtctaagaagatgctgatgcacttaacaattgagaattgtactgattaagtacataattgataattatatatatgcaatataatatgcttacgtgtagtaatgcatcaacttgttcgccgagcaatcataaggacaacaaaccacacaaaattcgataattagttaaatgtcacagaaaaaaaaaaacaaaatctacgtacatgaaggtggtgtttgaatcttctgaagatgaagatgaagataaagattaagtgtttcacgaaaaaagaggtggtaataacgtgtgattaattgagttttaattattacaaacttgaaaaatggattaatatgatattttagagcaactttcatatagaaagttttcacacgaaacgcaccgtttagcaatttaaaaagcgtgccataagtatccaaaatttcatccttgttggagaaacgaacgcagctttcggtgcgttaacgaaatctagtgatataggagtattccaatcaagccatatacaattcacaacctgcatgcacccccaatatagaaatagttgtcgtgcttattggacaggattaatgaaatgctcgaaaaattccacaaagaaagatataagttaaacgtacgtagacaaaaggatcttgccgaaaagaaggttccgcgatgcagagagaacagtcgatgtggacagcaggagccgcctcccgacttttctccgtggcagttgacacgccctggcaataatcaatattttagacgcatggtctcaaacaaatgcttcactagccaaaactgacctggatcaatattatctcggagattttgagggtttttctttaaagtcatgtacgtgatatatagggtaggctgcgccttactagttactactggtcatgttcaagtcaaaacatgactggattaaaaaaagttcagtgaatgagaacgacgtcgcaatcaccggtaccatttctcggtggacaaggccgtgtcgcaacaaaagaatgcaagatttgtgatgctacatgtttaaccggtcatggacttttggacttctttttggctcattatatatccataagatttggtttataatgagtcgacttttggactcattataatgacttctttttggctcattaaccggtcatgtctaagatttgtgatgccacatttttaaccggtcatataatggtcgacgcttgcagttttaggtgtggttaggggtagatatgtattgagtcgactcagctagataaaactccactcgttagacttttttttttgttagaattaatagatgggctaaggcccattcgaagattaattctttggaaaatcataaaaacccaccttatgggatgacatgcatatgaagtttagtaccaccttgcttattctaggagagggggacctccttaaaagggaggatgccctcctagccatttaaagcatgtgtggtggagagaagaggggaaacacacacgcgctcgctcgcctggccaggcacagggtcgaatggtccgcaaaattggctcctcacctttgcgcaggcggcgcgcgtgcagacgtcgaatggtccgcaaaattaaaattggctcctcacccttgcgcagatgtagcctccttttgcagttttgttttgctgcgggattggattcggatttgttttattttggaaacatttcgaaaaatctggtgcgtgaaaacggcatggagtccggataggttacgcgcgacttatctggttcggtttacgcgggcgccctgatcagacgatctatctctatataaaccgagccgccgccttcatgcaatacacgcgaaatcaatttagggtttgcctcctactctgtactgcgccgtcgctcgtagactactccatcccgctcgtcggcgtgcaccggcgatcgggagatcaggtctccggaacctctgccttcgacgtcctgcaccgggagaaggcggcaataagatttttgggaagcgcttcgcgcgactgctccctgtttgtctacgacggctcgccttcctctccgctcgcgtgcttcgcgactttgtcgacgctcgcaaccgcgagtagttcctgccgagcaaccggtctttccgccacctcggtacgtgttcgacatgttgcgcatatttgatctgttcatgttttactgcttagtttatatgtgtagatctaatgatgcgttcaatctagtttacatatgcaatgtcatgatttatttatggaataaattaaattattatgtgcttataatttcaacatgaacatgattgcaaatacacttaactgcgtcggcaccaatcatcgctgcaagagcagatcaagatggggaagtgcagaggacgcggagttttctgaaagtatatagctccatacctacctacaacctatattttgctatcataaaattgaatgcaaaccattttaatccagccatttatgtaatacattttagaagaaatataacatgtcatattccatatttctgatcccacaattatctcaaatgtaaatgatattgaagtacctatgtgtacgatgtttctcatccaaatttccaattaaacaaataaactcagcaaaatattgaagtataacaacatgaatttccagcaatccaaaataaaacgtgcgctggcagcgaacagcgaacagaaaacggcaaaaagagaaacagagcgtgcgccccagaaaaaaaaacgtttttttcggttttttttcccttccacgcgatggaaaagatctacgtttcatttttatagttttttctgttaggatgtttgttcggattggattataatttttttggaaaaggtttcagtgatgatcagtatttttttatttgtagtaaaatttatacactaaactttcaaattatagatataattctatgtaaatttacatatataaagtttctctctatatagaaagtttcctagtaaattgttcctttaaaaaaatccatcagcattttattatttctagtaaaatttacgcacttaactttctaactacagatgcattttctacatgaagtttacatatacaaagtttatatatatataatttacatatataaattctctatataaaaagttgaaagtttccacaagaactgtgttcaaaatgctataaaaaactataacgaaaaaaacgaaatatgaaaaaacggaagtgaaaaaaaaaacagaaagaatacttgcaacggattacgaaacaatcacgtaaaagaaggaaaaggaaaattgaaaacggaagaaaatagcgtgacccgatttgatttccctcttctaaactgattcgcgtgatccactgatggcgaacattcgcctacaaccctgttcgaacacaaccttgctttcatgctgcagcctagctactacaaaataataatttagatctcaacaaaggggccaaaatttgcacatccatactctttctatgtactgtcattaggatcaattagtagcggtaagactgtaatgacctgaaagttcagactggccgtgtatgtacaccaacatcaaaaattacatcatttaataaataatggagatgagcatattaagttttttcccctgaagtggagctgaagaattaatgagatgtggttgagaaggattattccgtcattgatagcaatggacccaacctattgtgcaacaaatggtggcatgagcaataagtttcataagtaacaactgaaaaaggtaccacaaagaaagttatttaataaaatgaatgcatttttacataagtaagacaatgtggcattcgagaggacaatttcagattcaccaaccatctgcacccgaaaccaacaaacctggccatgttcggtgtactggctcatccatgatatcatcaagcagaagaaagaaagcttgaaggtacccagactttctctgtacatcaagaagctcattgctgaaaaaaaaagagagaagaaatcgatgaagaagtcagatcctcctatagtagccaaactgcaaacaaatatgaatggaaaaagaacacagtgagtaaggtaggagaacatctattttttgaagtaaagacatgagtgatgtgaattatactgagaagaagttgattacagaaacaattggaggatattacatagaacagaaagcaaactgaattttcatgtcaagaaaaactcctaccagcttgtcgaaacaagattttggtaatactaaaagggggtggctatcaagctggaaaagtggatgggtttggagacaaggaattttatacaggttcaggccttcttaatcaagaagtaataccctactcctgttcgggatgattccgccgagtgtattattgatcatatgatctgagaaaaaatcgtgtcctgagaaggacccggaccactccttatatagaggaaggggtccgtattacaaaatacagtccatatccctaacggaatatgatattacagataaaatacaatcgtaaccgactaagaccccgggtacttccttgacatacaagttaagaaactaacccgagttcccataaagatattctatctatattcggtaccctgtatccaacctaactataactgccatgtagatatggggtatccataatctccacacagcttaactccgccacttttctgtcatctgagcaaacgccctagaagatccttctattccgctgaagctagatattccaccaggttgtgatctctttctctctttctttcaatctttggcctgatgatacgagcgaaagcaaagaaatcagtcagacagatattatactcgaattgcataggggacaaaaccaaacttctgttggaattaatagatgggccttagctgattcgaagattaattctttggaaaatcaaaaaagcccacctcataagatggcatacatggggagtttaataccaccttacttattctaggagagggggacctccgtaaaagggaggatgccctcctagccacttgaagcatgtgtggtggagagaagagggggaacgcacgcacgcgctcgcctagcctggcagggcaggcggcgcgccgcaaaattggctcatcacccttgcgcagatgcagcctccttttgcaattttgttttgctgcaggaaattcggatttgttttgttttggaaacattccgaaaaatccggtgcgtgaaaacagcgtggagtccggataagttacgcgtgacttatccattcagttacgcggagtggagatcgtgcgggcgctctgatcaagcgacctatctctatataagccgagccgccgtcttcacgcaacacacgcgaaatcaatctagggtttgcctcctactctgtgctgcgccgtcgctcgtagactactccatcccattcgccggcgtgcacaggcgatcgggagagcaggtctctagaacctctgccttcgacttcctgcaccgggagaaggcagcaataaggtttttgggaagcgcttcgcgcgactgctccctgttcatccgcgacggctcgccttcctctccgctcgcatgctgctgttaacaaccaaatttggtaatatcggcatcgggaaagaagattagatcgaagcaaagttagaggcggagatcgagttcgaaaacagagcaggaatcggctagagtccaaatcggctgcgataagatcggctgagtctgagtcggaataggtaagccgatgtagccgatctcaacaatacaacttgatgtatggtgtcaggttggattgaggtgcttcaaggtgattgccgcacatggatagaatcctaaggaggcaattgtatctattaattaggatgttttatgtaatttccttagagatacgtttgggaaaaagtctgtcgcaaaaacttatggtatcttagagtttgttagagatagcagttgtgtccgttatggacatatcttgtaattctcgggtataaatagacccgagccctatgtaatttttaacacacacgtccaatataatttcggcgcatcgccactctttttcctttagttttgtttcgacaagttcttgctttcgggttgagccgcattggtttcgatcttcaacaagaggtaaaacttgttatgacgacttgtgttctcgggattagggcttccatctttatgacactctgatctcgtttatgtaattcattgagttatcttatatcttacataatccctggcaatatcgttatctaatctacaatcgactaacatctgtcggtagagggcagccgattaggttagatatcgatgttgatttagattatataagatatctacaactctatgaaacttccagcggcttgattgtctagatattgttcttcttttcatacttaatgctgcatcagttgagtttgatctattaagttgtacttagaatatcaatctctagcctgttttctggttgccgattagggtagcatcggagtttcagccgatcttatttgacttaactacatttgctttatatgcttcattgacttgttaaatctgcccttttacgtcaaaatattgttgtatttaagtatattagacctttgtttgatatattatacttgttttaatatcatgatatagagtagtatcggagtattagccgatacatgttagatctatctgatcggctatgctataaacatatatagtcctgttattaatatatattttgatctaagtgatttatattgtctcggcacagcgaccgatctatcccaatcacttgatttaagtatatatcgatgtaagaattatatattggagatatctacagccgatcgaatagatttagtttttttattgtttatttacaactgccgatcgattcacacatgacatctgctcaaagataaatgatacgtcatcggcacctagccgatcggctatcatttatagatttaaccgcggtttctttgcttctatttcttgttgattacaggatcaaatcaactagcatgctagcatacccgaaggcgagctttggacctgcactggagttaagcagatctcccaggcctcgtgttttctgtcaacagctgcgcgccttcgtcgacgcccgcaaccgcgagtagttcctgccgagcaaccggtctttccacaatctcggtacgtgttcaatatgttgcgcatatttgatctgttcatgttatactgtgtagtttacatatatagatctaatgatgcgttcatgctagtttacatctgcaatgtcatgatttgtttatggaataaattaaatcattatgtgcttataatttcaacaatccaaaaaccttattataggccctgtggttttactatggctggttttgccgatgcactgaggccagataaattcaccggtgtgcactttaagagatggcagatcagggtcactctatggctgacagctatgaaatgcttctgggtgagtactggcaaacctgtgggagttcttactgctgaccaggagaaagaattcgatgaggccactactctctttgtgggatgcattcttagcgttcttggcgatcgtctggtcaaggtgtatatgcatatgaccgacgctaaggagttgtgggatgcactgaatactaaattcggtgctactaatgctagcaatgatctgtacatcatggagcagtttcatgactacaggatagctgacaatcgttctgtagttgagcaggctcatgagatacaaaccatggctaaggaactcgaactccttaagtgtgtcttacccaacaaatttgtggccggctgcattattccgaaactacctccatcttggagaggtttcggtactgcactcaaacacaagagacaggaatactccgttgaggggttgatagctctcttgatgtagaggaaaaagctcaggaaaaggacgccgcgtctaagggcgatggtgggcagtccagtgccaatgttgtgctcaaggcctagaacaagagcaaggggaaatacaaagctccacagaccaccaacttcaagaaacagaagaataacaacaaccatcttaacctggatgagaggacttgctttgtgtgtggcttgactggtcatctggccaagaagtgtccacaacgcaaggggatgaaggcacctacctgcagggcagactttcaagtctgaaaatgtgactattggcaacactggagatggaagcgggtatgctaatttacctactattttttcagttaatcagtctactaactagtgggttgatactagagccaatgtacatgtttgtgctgacatctcattgttttcttcttatcaggtcgcacggggttccaccatcctaatggggaatggggtttcaccgttcatggtgttggcacggtagatctgaagtttacttcgggaaagatcgtgcagcatgtccctactatcaataggaatcttgttagtggctcccgtctgactagggacggatttaagttggtttttgagtctaataaagtagtcgtgtctaaacatgaatattttattggtaaaggttatgagtgcggaggcctattccgcttttccctttctgatttctgcaataagtctgtgaaccatatttgtggcagtgtggatgatgaggctaatgtttggcactcacgtttatgtcatattaattttggcttgatgtctcggctatccagcatgtgtttaattcctaagttttccattgtcaaaggttctaagtgccatagttgtgtgcaatcgaagcaacctcgcaagcctcacaagactgccgaggagagaaacttggtacctctagaacccctacattcagatctttgtgaaatgaatggggtgttgacgaagggtgaaaagcaatatttcatgacgttgattgatgatgctactagattttgctatgtgtacttaggtaaaaagataaaaagacttaggtctgatcgtgttggagagtttttctcaaacgagtttgacttattctgtaaggaacatggtatcatacatgagaggatgcctccctattctcccaagtctaatgggattgctgaaaggatgaaccgcacactgactgacttagtgaatgccatgttggacaccgcagggctacctaaggcatggtgggggaggcattgtttacctcgaatcatgcgttaaacagagttcctaacagaaataaggacaaaacaccatacgagatatggattgggaaaaaaccatgactttcttacttgcgcacatgggagtgcttggcgaaagtcaatgtaccaataacgaagaagcgcaaacttggacctaagactgtggcatgtgtctttctgggatatgctcatcatagcattgctcatagattttctatagttaaatctgaggtacctgacatgcatgttggtacaattatggagtctcatgatgctaccttctttgagagctgtttcccaataaaggatacacatagtagttttagccaaccctctgaaataattcccagtttaatcacaccgccagaacaaaactgaacatacacatgaacatgtcactgaggaggatgacagtgaagctcctcgaaggagtaagagacaaaggacggctaagtcttttggtgatgatttcactgtgtacctcgtggatgacactcctaagtcaatttcggaagcatatgcatctcctgatgcaaactactggaaggaggttgtccgtggtgaaatggattccattatcgctaatgggacttaggaggtgacagagcgaccctatgggtgtaaacctgtggggtgcaagtgggtgttcaagaagaagcttaggcctgacggtactattgaaaagtacaaggctaggcttgttgctaagggctacactcagaaagaaggcaaagatttctttgacacttactcacatgttgctagattgaccacaattcgtgtgctactttccctagcagcctcacatggtcttctcgttcatcaaatggacgttaagacaacttttcttaatggagagctggatgaggagatctatatggatcaacctgatgggtttgtagttgaaggtcaagaaggcaaagtgtaaaaattgttgaagtctttgtatggtctaaaacaagctcctaagcaatggcatgagaaatttgacaaaacattgacatctgcaggctttacagtcaatgaggcagataaatgtgtgtactatcgccatggtgggggtgagggagttattctgtgattgtatgttaacgacataatgatatttgggacaaaccttgaggtgagaaatgaggttaaatcattcttgtctcaaaattttgatatgaaggatttgggagtagctgatgttatcttaaacattaatctgattagaggtgagaatgggattacactcttgcagtcccattatgtggagaagattttgaatcgctttggctacattgatagtaagccttctccaacaccttatgatcctagcttgttgcttcgcaagaacaaaagaattgttaggaatcaactggaatactccgaaatcattggctcgctgatgtacctggctagtgcaactaggcctgatatctcctttgctgtgagcaagttgagccggtttacctctaatccgggagatgatcactggcgtgcgcttgagcgagtaatgcgctatctgaaaggtactatggaattggggcttcactatactgggtatcctgcggtactggagggttatagtgattttaactggatctctgatatggatgagatcaaagccactagtggatatgttttcgcactgggtggtggtgctgtttcgtggaggtcttgcaaacagaccattttgacaaggtcaaccatggaagcagaactgacggcacttgatactgctactgttgaggcagaatggctgcatgatctattaatggatctgcctattgttgaaaaaccggtgccggctatccttatgaactgtgacaatcaaacggtaattgtcaaagtgaatagttctaaggataatatgaaatcgtctagacatgtgaaaagacgattgaagtctattaggaaattgagaaacttcgaagttataacgttggattacatccaaacagctagaaacctggcagatcccttcacgaagagactatcacgaaatgtgatagataatgcatcgaaggagatgggtttgagacccatgtgagttatactatggtggtaacctagtctatgtgatcggagatcccgtgaattagaacctgggaagaacaaaccattagtaaactagaggagagtaccaatctataccatctccaagtgaagatacatgtactctcatgagctgcaaggcaggttggctatgccttaataagttctgttggctttaattagcgaagatgctgtcctgcagagcattcttgaaagaactcacctttgtaagcttgactgttggtcgcagtctatggagattttgggtgaatcttgtaggaagcttactaaagacctaggagtatgacttatacgctccacccgaggggtagtctacagacggtctagtatcagataagactctaagtgaaacttgcttgcacaagacttgcaattcaaggcgtagtccattgttcaagttgtgagtaagtgtagcttggagttctagatggatgttcaaccttaatcggtctccatgttcaaccttgcgtccagagaaggttgctgatttcggaagacaacattgtatgccggttgttctaaagagaccagaagaaaaggaggtagaaaattgcatggtgctttgaggggagtcgtgggtgaggctgcagcatggaaatattttgaacattggatagacccagatcaattccaaccctttccaagaagctcctagcgaacgaacatgttacactaccacagaaaacctcattggtgccgtttggaaaaccccctaggtccctggaaggcggcattgatgtagaggggaaataggtgcctgtttagaactgacacctttgaggtttcacaaataaaaaaaaagtcagctcgagcagctccccttcacccctccatcccgaccaatccaagaacacatgaagaatattcaagatcaccagaacccaagaacacaaggaacacaaaaacactaagaatggccagccgacgtcggggagggcgccgcccgctgttgccgcctcccttcctgcagccgcccaccactgccgccacccttcctgccgttgccatcacctcccctcccaccggatttggtggaggggtgggcgccgcctgccgctgtcgccaccgcctactgccaccgcacgtcgccgccgccgcttccctcccacctgttgatgagaaacacggtggactaggagatttgcttcactctagtgaaggtcctaggcttgcctcgagtgtcaagagcgtgccagctagtttgatcttgcaaccagcaagaaagacaacaatcgtaattagatgaacgatagtcaatcgggtgacagagccgatgacgtatcgtcaggacccgtcacatgtaataaaatcattttctatatgccttagaacacaattttcttttttcaattttatcaaaattatccaactgaatgttgtggtttgtcagatgcaaattatattactagtgacaattttctgaattacctgaactttgcatattaacatagtatactgattgtccccccatgcttaatcacagtaaaacaaaaccaactctatgatactacctttggtttttaatatatgatgccgttgacttttcgacaaaagtttgactatttatcttattcaaattttagtgcaaataccacctcatgggatgggatgaatggggagtttagtaccaccttacttattctaggagatggggacctccttaaaagggaggatgccctcctagccacttgaagcatgtgtgatggagagaagagggggaacacgcgcgcgctcgctcgcctcgcctcgtagggcagggcagggcaggtgcgcgtgcacgacgtacgcgtcgaatggttcggttacgtggagtggagatcgtgcgggcgcgctgatcaagcgactattgacggtccttaaatcataatatctgacagtgttggtgaaatatgtgtatgcaggtaatttgaggagaaaacacatccgtcatgcgacaaaatgcacctccacgcattcaggacacgtttacatggattggaggccccataactcaagtaaacacctccaaatggtcccatctaccatgccaatgggctgagggcctcaaaattagtgtccacgacgaaaaacgggctgaatggagtcctcccgggttcggccgaaccatttcagaggtcgttgatcccgagattcgacgtagatggccctgattacatcctgatggtggttgcggggtagttgggtcatttcccatagcaacaaccatcatttggagcctatataaggaggagttcactctaatttccaacacacaactttgagctgaattacaagaggctctattgtatcttttgtacattagaataaggttgacagtgagggaaagctctggaggagtgcccggaagtttggtgctcatccaacttctacctcgacgagtgtagcttcctaggaggaattcgggagaagtaccggagctgtcggtacaccctgctctgggttcggagaacttcttctataaagtaagcattcgtgttcctttgttttgttatttaattactttttgtctaagtaagatagatttccatctttgcgggttcattgtttagttgtcgtactaagtgccctagtactgggactccgggtagaaaaggaagttcctacgcaagtattagagtagtaattaataacttagacgtggtgtctaggttagagattacctttgtttgttgtgtatcccatagatttgtcataggtagacgacaggtggtgacagccctgaatcctgtcctagcaatcctccacattcggatacatcatagagctatagccggaaccacgcttgcagattagcaggggtcggtgcccgaagcaacagataggaatttacctttaacttagcttagataattaaaatgcatagaaagtcctctctaacctgcctagcctacttatagttgttttccttggatcgtcttagccttagatagattacacacgttccctgagttcaatatccttttagggtcacccgaaggtgactgtgctacagtggtattccgtgcgcttgcggatttatctgtggtcgtaagaaataccaacaagcatttctggcgccgttgccggggaacggttgctaatttatctgagtctaggtcatcctcgtatctttatttttatttcttcttcttttattcctttctttgatggagcaacccacaattcaaaatctctctgctcctcgggctgatctatgtgagccatcgtgttattcaaaactaatcctttcggatggctaaaaaatcggtcctggctttatagccatgattcgagagcaaaccttctctggtggtattagtgaaaacccatacctccatcttcgggactttgagctagtgtgttcatgcctatccatcgtaggcatgacacatgaaactctaaagtggaagttgtttcctttttctcttagagatgaagcgaagcaatggtacactatgtctgtcaagaaattccacggtgaatgggaggagcttaagagcaatttctaccttactttctttccattaacccatgtaatcaatcttcgattagacattctttctttccgacagaacgagaaggaatctctcggtgtagcttgggccaggttctcacagttaacttagtctggtctagacttgtctttacccgaccatgtgttgttacaacattttcggtatggattagacaaggggtctgccgcaaatctcgatatttctgccggaggatcattcgcacacaagacaactgccgaaggaagagaactcttagatttgatcttagagaatgattatcccggatgtcgagattatccatgaggaacctttgcatgtggagtcgaaacccgactcaactgtcgaatcctcattccagtcgttggagccggaggaagaagaaattcatcctccggaaattccattccaattcagggatgatctttatgaagattatgagaacaccttgaattattccagcaaaatcaaggctcatcccaagcatgagccattcgaggaggtgatgtttgtatcttcgttcatttcttctgaacctattgaccatcttcatgaaactgaacgaccctcatcaccctcgatcaagtctaagccttgtccctctggccctcataacgttgttcttgtttatcatcatgaaacaacccgattcttgcatgatgtatctcttgagaaggaaagccttcaggccacaga

SEQ ID NO: 5847 - DNA, 2936 bp, Oryza sativa
ctcgtgatcgggctcagtatcggcgctcatcaagcatcgcgactggatcgacctttgtgccttgtgctctggcagcggatgcaggtggaactgcaattatccattcaggctgccggtatgctgtcacggagcattcccatcaagaaaggagggaaaaacttcctaacatcgtggaaatcggaaggaatcgattcatgtttaaataaaacgagaagaaggattggaaaggatacttttcccgacgatcaattcacacatcgtttccttctgaacaaaggtagatccccggcggcggcggggaagctgcccgtagtggcgcttttgatagccgtcccgtcgctccgacgactgggccccggacgagaatctatctgttgggccttgctgttcatgatggaggcccaaccagtccgagttgggacacggaccgaacgtttgggcctaaaacttactcctatctgggccaaatctgccgttctaccgttagtttacggcctggtatatggtactagagcagaacaaggtcgcctcattgatcgagagatacgtacatctgcatgtagcgtagaccgtagagtctcgaggtactactagcttgtcctggccggtcggacacgaggcagttggaagcgaggatgcagccagccggccggccggcaaggaggaggagctaggcacatgctcttgccatgcatggcgcccgcctatgccaactctgctagtcccaagtctcatcggccaatgcacaaactacaaggctaacctagcagcaggtggtgtacccaggtgtactgtactggcgaggagtagaaccccaactactggaggagtacacgggtaacacggcgcacagaatgcaagcgaccaaaagacaagcgtaccgtactgcaagctacagctagccgaggacgcctgtgtggctgtgttcatttctgaatcttttttttttagatggtcaggacactctctttctgtcacggtgtcagccgtcgctgaatttgatggagaggagggtactcctactgcagaaagaaaattggatgtgcgtggtggtacagggctctgctccatgccatgtagaacggtagggcagcatatgcatggtttatgatctgatgagtctgcctggccattggccatgctttgctgcggccgctctgaaccacgtaggcgccctgcgtacgtgtcgtgtactcgtgtcgcgtgactcgcgtcccggcatgcgttacagtaaccagtatgtacgtccgtacggccgcactacttctgattggaatttggtttcacttaaaattgtggcgccttggccacagtacaaccaagtgagtgcagccttccaggcagtcccagctcgatctgaatgtatgtgtgtgtactcagacaaacaacagctagctagctgtatgggtatggcgctcatcgtgccgtcgtgatgactcacgcgagccaaagagtgagctgtaagtagcctgtaatcgagcatatgtatgggcacagtacctgcacttcgttcagctttgtgccttcatgttttttgaacagccatcagtactcggagcacaaaacgtcgatccatatccactaactgcatgattagcaagtgagcttaatattagcacaaaactgttgccgttacagtaagcaggaatcaaacaggcgatgcctcgctggaaggcctcataggcagatagatggagtaggcagtgcacaagcagacgaaacaggagtccatcaaatcagcgtgacaatagatgaagccaaggcacgcatatgcatgcccaatcccatgccaaggccaagctagatgcggacgggggacgggatcagactcggagcgcagcgcctgacgcagcacacggattcctcccgtgccgcgtctccccgtgcaagcggacaaccactacaactgcaaggggctctcccatcttttcggcggcagcagcagaaaagttcctgtacttgcatcgcctgcacccgagggtgccgggctccgattcgacggaagaacctggccgcgctgcacatgagcaccctcccggcctcccctccctgcgactgcgtgccagcacagcagattaacacagctgtaaagctcatctctctactgtccgcattgtctcgttgcaattcttaatagtgcgcgtgtagcgtcaactgggtgtactagtactctactagtagtacgactgtacgagccaagaccttgttaagagtattcttctgcgtggcgcctagtacacgagagacagagaagagagccaaaacccaagctatctggggacaggagccaagatcccggcattaccagacatgaacaaaacagagctgtgcaaagtcgatgtcctcttgttctttgagatcaccctaaccaaagcattaagcgggcaaaaaacagcgagcgagcgagctcgtcgtcctcccgctccgcacgtcgtgctcggccgcagcgggcagcgagacagcgattcagggatttcgggggagctgcccggctgatgagtgctttagggggtgtttagatggggctaaaactttttagtccgtgtcacatcgaatgtttgacgctaatttggagtattaaacatagactaataaaaaaactaatttcataaatgaaagctaatctgcgagacgaattttttaagcctaattaatccataattatgaaaagtttactgtagcatcacattgtcaaatcatggtgtaattaggcttaaaagattcgtctcgtgaattagtccaaggttatagaataggttttataattagtgtatatttaatactctaaattagtgtataaacatccgatgtgacataagtccctgttttccaaacatgcccttaggttgctctgctccccgcccggccagccgatgaccgaatcgcgagtgtacggaacaatttatcgcggaagctggaagcacgggtgcgagtgt

SEQ ID NO: 5848 - DNA, 3756 bp, Oryza sativa
gaagccctgctccatgaaccattcagaagtgcagatatctttcactgactcacctgacacaaacactgaagagagggacatcatggtagacacattcagcagcatggacaaaggcaaggaaaacaactacgtgatggctggcaagaacagattgttatcagaagaagcactatcgcgttcttcggatgctcggtctgcaggaagcagcaagggatacaactctgaagttgacatctacgtggacgctctcaccacaatggattctgaggttgagacagacacagagcacagagatcatggacaccgtgccttggtaccggtggagtccagcaaaccgtgctctgatgttcacggtgccgcggtttcagggtctattagcttcaggaacaatggctcaatggtgcctaactcttcagatgttgtcccagcagaggaagaaaataatgatcaccatcaagggtatgtctgtgtcccttcaccacaggccaaacctgttgctggtgaacatgagaggagcagctcgttggaggaattgtttgcacaagaaaaaccggtgtcatgcgagcatgagaggaccagttctttggaggaattgctccttggagatgtccatccttctgggcataacatgagatcatcagctactgaatcaaatacaaatggtgttgtcagtactgttgaatcaaatggtacagttggcactacaaagaaagaaaaggataaccccatcattgcaggcatttccttcaagaagacagcgagcaagaaatcaaagtatgtgggcagcatggagcttattgtttcaaaagtgggcattttgccgagaaaactctccaaaaagcatgatccgttctctgattccctcagaaacatggccaagcagttgcttgagctgaagattgatggcaccaaagacactgagttatatgaatttgaagcaaatggtgagggatgtgatatgaagtgtctggaaatgtctcaccctcctattgaaattatggggagtgccacgcaaagcgttcctcctgattcacctcaagacaacgttgattcaagagcatgtcgaccagaagaagtgaaccaagagtatgaccatgatgttccaccaagtgatagtccccaagattcagttgatggaaatgtatttcgggacattgcattgttacgttctcaagaggaacaccaatgtgcaggtcctgtaactgttgacaatttgttggatcatgcacccgaaaatactcaagatcagattggggaacatttttatagggaagtgactgaagatattcatactgaagttgtccctgaaaatggccctgatataggcgaagaattagaagaaggcagtattactgaagagaaggtgaacgaggaagatgtcgaggaaagcaatgagtccgatgcatacacattggatgaaaacaccgagtacatagaagagcaagtggtttcagatgatttgatctcctcaccgatctcatccaagcaatctgatgatccttgtcagatggcaccactcactcttacagatgcagatgatgccttggcaggtaaaaatgtagacaatgacatctctgaaatgcatatcacattgtcaggaacaataacagaatccaatgtatctacagtggttgttgaatcagcaacaaccaatgatgtggccgtccaatataatgaacaatgctgtttacatccagaaaccagttttgcacaagatttaactcatgtcagcagctgtgaagttgaaggacaaaatgagccattaccactgtgcagctcatccatggtgggtacaactccagatctgtctgtagacactgaagaaatacatgaaaaccccattttgtgcattgacagcagttctgatttgttcagagatgcactagctccagactctagagatgtgccattaccaaacatctcaagttttgattggatgcttaatggtgcaatgcagaagtcgttgaatgtacttcctgctaaaccacctaatggaattttacaggaaaataattcttccaaagatactgaagatgcaccaccgccactaccacctctcccgccaatgcaatggagaacaacaaaacttcagccagggcctgcagttttatctgcaaaatttgggagaccaccaagaccaaaacctccagttaagtaccaggaaaatgagagttactcctcacaggatgaaagaaatagagagcctgaaattcttcaggaagcaagtctgcagaatggctcgacttcggtcactccagagaaggaaatggtagtggcaaaagtttctaatgagatccagacaaatataatgtttggtagggattctcaagaaagccacctcaaaggactcaatgagtatgatgtgcaagcttctgattcattctccacatcagaattcaagagcgtgggaggtgttgcttcagtagaaggcgacaatcttgaaacttcacagttatctgagcttatagtaattccagaggaggcatggtctgagcttgtagatataaaatcaatatctggacaggagaaaggaggaaaacgccagcttagcactggagttttcaattgcaatggcatgcatactactggtctgtcagcagaaaagagggatgactacaaaatatatgatcaaaatgaaaagaatttattagctggaaagggaaatgcaatagcagattcagaagaaaaggaaccaaatggagttacttgtcaggatgatacgaagaattctgacttgttggtgcaacaggaagatggacaacatgatagttctgctggcacggcaagggaatcgtcttcttcatttgaagaggaagtagcaaagttttcaccaccgagagtgccaacaccacctaaatatcctctattccaagttactgctcatgatagaagcatggtatggttatttttgcattattcgtttcaccactttatgactaagatttcacctgaccaaatgtctatctttctcatgctttattagctaaaaagggctccaactttggttcagccttctatcaagctttcagacgagaacaacacaatactggaacagataaagaataaggtaaagtactcactgttggacctaaaaacattggcattgagtttagttttgctaatgtaattttttcttgtttacttcacagtctttcaacttgaagccagttcttgcaaagagaccgaacatgatgggtgctccaagaacgaacttgcaagtggtggccatcctggagagggctaatgctattcgccaggtttataaaccatctcttgcaacattattaatctcccttacagtttcagctgatcatagctttgtcatctatggtcatatgattattttctctcctgtaaatcaaacaggctgttgctgatgacgatgatgaggatagctggagtgactagctgattcctcagagcatgcaatttggcgcctgatgtttcttcacattcacatttcacaaggtctgtggtgatcatgccatcatggacttgcgtttcctgttcttgcataagtagagctagcaaactgtgaaatgaactacagggtatcatctgataaagaagcttaatgtctcatatgaagttcatgccatgaagatgcaacatgtaaacggtatatcaattttttcccgcttttccggcacgtgatgtgtttacgccccgtttggaacaggaatttcatagggatttcacgtcgaacaattcaaattccgttgaaatccagagaaattccctcttccaaacatggcc

SEQ ID NO: 5849 - DNA, 15986 bp, Oryza sativa
actataaatctgtatcccactgctattctcttttcttttttatcttattcaaatgtagcctctgctattatactgctctgatacatactttctgcttggggttcagcgaatcgtaggcgagccggcgaaacgagcggcgactcgaccgacccgctgccttggcttgagttttcgctgtcccttttaccattttccctcggtggcaggctgcctgagaccatgccgtgcctgctgctccgacgactgggacgcgagagttggcacggatcaatgcattgacgtccagaaatgattccagtctagacgcagtacataggtgtggcgtgtagaacgagccgttggcgagtagtattagctgcagagaggtattagcgagtagtatgtacgattcgcttccaaatgaaacgaatcttacgaaaatacacggggtgtgtcctcagcgtttggtattggaataagttcattttagctctctggtttgcattgtcctggtttcagaagttgggagattagttgtatcttgtttttttttttacaagggtaggtgtgagtccttgtcggctttctggctggataattattgtaattttatctcacatctcgccggtgttgacactatggctgagtaatatacctccctttccccggaaaaaaaagaatgaaaatcagactaagtgaccaatgaagccacctaaagttgaaccgattttgctaaacatcacacgggtgattttttcgttgatatttgacagatttttgcccctacaattatgcgccgagatcagtacacgattctgcgtcgatgttgtcgtgaggtggagatgagacctcgtaggtcccacgtttgccgctgatcacgattcacaagaaatttacatcctagctacgtgtaaatatcctatatagctaaaataaaatataaaattacagtcctatttaactaaaattgtatatgtaaattcagttgatattaattacaatcctatttaactaaattcacatttgtaaattcagttgatttaacatgtaagtgcactgtaattttgataaaaatattgtgtaagtaaatatgtacttattattttctttaaaatataaaattacagtcctatataactaaaattacatttgtaaatttagttgatttgacatgtaagtgcactgtattttttataaaaataatgtgtaagtaaatatgtacttattattttctttaaaatataaaattacattcttatataactaaaattacatatgtaaatttagttgatatgacatgtaagtacactgtgattttgataaaaatgtcgtgtaagtaaatttgtattagatattttattttctagtatgttggacgtaaatccaagggaagaaaaaatctgggtgaacccgagtgatgcataggcggtccctgaacaaagtgaacttaattcttttgctatttcgcagggacaggctcatcttaattgggcctgcacattgttgagccggatgctaatggacggcccagcttataaacccaagaaacgggccaccaattttgctcgtgtgctgagctgaaaggcacacatgaattctcacatgaggcagcacagatgatcgcggtattgctgattgctaatccctccttgctttccggggagctgtctcggccatctccaatccaccggaattgagggggggaaaccaccaagggtcgccgcaaccgccacggcgcgtggcgagaggaacacgacgccgtccatcgtttagccccgcgggcacgcgcgtcctcgcgctcgactgcatgtatgaagccaaaacaactctcgccacttgtgccaaaaagccctgcgtcctacaggcacttagcccttgttttcctcctgcttctaggcacaaaagcacgaaatctgccgtcacctgagttcatccgtgcatactgcccctgatgcaactccccctgaccccctctataaattggctaagctactgctagtcgatagtacattgagcttgcgatcgacgtatatatatgttggtgtacttgtgcagggtggagaagcagggcacgtgagcggccatccagtgtagcttcgctgcgcgtccatggcggcgaacgcgcgtgatctggagtttggatggtcgttcatgtgtccgtcttctccaccgagcactggcatatccaagaccgagacagcgagactccgagagacattggtcgagcgagcgcgcgcggcaccgtatcctgcactgtctatgagttgacaacacagacagctgtgctttgactgtctatattcataacactgatctactacaagaaagtgtcatatcttatagtactatgttagtttattttaagatactgttacattttattttaaattggtatatctcatattaggttgatttattttgagagacgattacatcctattctggttggtttattttaggatagtactgtaataatatatcaatatctcatattaaattaatttattttaagactgttacataaaatttttgattgatttatttaagtacagagcgggtaagtaaacgtacacgttgccatgtcgttcacgtttgcaaccaaggcaacaactcgctacatggatcagctcatcagcccacggaaaagcggtgctgccgcgtgggctgctcgtgtagtaggcccagcccatgagtccaggaatcacccagccgtctctctccaaagcctctcaactccatcagcgaggcatccaccagcgagccctttcctaatccgacccgcgccgccgccacctcttcctccgctgcccaagagcgatggccgcctcccccgccgccggggccgcggccgccaccgtctcgtcgttcgtctcgccgtcgtccttctcctccgtcaagtaatccagtcatctccgcgcgcgcgcgcgctcgcgcttcgttgattgattcgttgtgctgtggttctcactctgtttgggcgtgattgtttacagggcatcgaagcccgaccgcctccgtccggcgaggagggcggcggccgtcaacgtccgatgcgtcagcagccctccggccaccgaaacttgtaccgtcctctccctttccctctccctctccctcctagcaactcatttatggttgctcccaaactgctcactgccgcttagtaggtttttgctatagtagttatcgttggaggtgtgcaatcgaatgcaatgagctcgatattgcctccgctgatgctatcacacgcagtttaggaacaaccagaaagttactgatactatcactagcactgtggtagtaagtttactgaaagattcagctttcgttttgaagctttcaagacgaaagtaccacgaaatgccaatatggccaagctgcaagctggctatctgtttcctgaggtttgttttgttccaaccatttcctctctcttctttccctccctgtcttcgttgatgctgttttattgaaattgcatgttgatattggttctttgccaactgtggagcagattgccaggagaagggcagctcacctgctgaagtttcctgatgcgaagattataagccttgggatcggtgacactacagagcccattccagacgtcataactaatgccatggcaaaggtacatcgttgctcttaatataataaacaccggttgtgtagcttcagatgatttatgttgcagtttgtcaagatcgtagttaaatttcttattgaaaaaagaagttcggcattgcatggcacacagttcttatggttcaatgtaaatgattttgtcagacaggctgtgcatcttcctaggagtaaactaagaaatcatcatcttcttttcttttttcttttttttttgcattttttgtattatagttattttttttcaaataaacattgatctttgatgggtctatttgtaaatgcagagagcacatgctttatccacagttgatggttatagtggttatggagctgaacagggtgaaaaggtatgcttatcactttactagcattttctgccaatacatcagcattcagttgacaagattgtacataactattttgcttcatatatgattttaaagtttgtgtagaatattctagaataattggagcaggatagatctttgtgctaatccatgaggttcagtaacaccttatggcatctgctggtgtggttcatcgaattagttttttgaactattaacttcttgcactaatagctgtcacaaagatcaaacatctgccacattttcttgatgagtggattcttacttttcttttactgccccattcaaatatattagtcttgacattgcatacatttcatatagcttcactatcataagccgtttatgttcatcattctgaaattatacattaattttctgcacagaaactaagggcagctattgctgcaacctactatgcggatcttggtattgaagaaacagatatattcgtctctgatggtgcaaaatgtgacatttctcgtctgcaggttctgaaataatcctatcctccctttcagtttatcattcatgctataatgtcccttacatttcttccaattttcaggtcctttttggatctaatgtgaagattgcagttcaagatccatcatatcctgtatgaaaattcttcacttgatgttaacccttcctagtgcatgattccattcttaaactgatgtttatggtcatgtgctccttttttttcatttctatcatactgcttcttattactaactattactttcacacttgtctgatgtgtattccaacatgtgttccatttttataggcctatgttgattcaagtgttatcatggggcaaactggtttatatcaggaggatgttcagaagtatggaaatattgagtacatgaaatgcagtcctgaaaatgggtttttccctgatctgtcaagtgttccacgaacagatataatcttcttttgttcacccaacaatcctactggtgctgctgcatctcgggaccaattaaccaaattagtcaaatttgcaaaggacaatggatccattatagtttatgattctgcttatgccatgtacatatcagatgacagcccaaaatctatctttgaaattcctggagcaaaggaggtaggctttgggatttaagcccttcctaccacatatggaaatttatggattttctgcaaatacttaaatccacacctgtcatgtgttttcttgtgtgtaggttgccattgaaacagcatctttctccaaatatgctggattcactggtgtgcgtttgggttggactgtggttcctaaggagctccttttctcagatgggcatcctgttgctaaagatttcaaccgcatagtctgcacttgcttcaatggtgcatcaaacatttctcaagccggtggtttaggttgtctatctccagagggtctaaaggtagcgtttcagagtttctgaaaatcttcatgtggctcttttggcaatgcttcatttcatctctttgttcctatgcaggccatgagtgacgttgtcggcttctacaaggaaaatactaaaattattgttgacacatttacatcacttggattcaacgtctacggtgccaagaatgctccatatgtgtgggtgcacttccctggccgtaattcttgggatgtcttcgccgaaattcttgagaaggcacatgtggttactactcctggtagcggatttgggcccggtggtgaaggcttcgtaagggtcagtgcatttgggcacagagagaacattattgaagctgcgagaagactgaagcagctgtacaaatgagcagtgatccggcctttatattctcaacctcttggggagccatatcaaataaaaccaagcagagttcgaagacaaaatttactctgtcgggctatcagtagatgttagaattgaaacctaatactttataggcagttgttctgttccgctcggtatttatccattcagagccattttacattctgaacttctcttgttgtttagccctgatgcacctgagtgaatcgcaagcttatttatctccttttgctaagttcgtttctactactctgcttaatttgctgctgccgtataaggctcagtgatatctccctggatgcattgaaacgttaggcacacttgagtcactggttgcaacaaaattaagagtagagaacattgctcagaccaattcagttttctactctcgtacaggaagaaggtacagtaatactctattttaccagactaccagagtaccagtgtagaaagtactatcaaatatgaattgtactcagctacctagatgcgagagaactcattggagaatgaactctattaaccgaaatctatgagcatggagagaagcaaatcgttgacttcttcaggtcaagaacttacacgatcttaatttactgaccatgtgatatgattcccccgaaatatcacatttcccagatctacagctgcaatagtgttcatacggcacgcgccaaaatctaccgagtttcacagtatcagtatcaggatgcagaaattcacagtatcactatcagcatgcagaaattctgccgaagaaatcccacagtgcacttaagtacttaacaaagctccacaacgacatatcatttactcttcgtatgtactttgatagagaaatactcttcgtatctatcaaactgtaaaactcactagaaaatagctaaatcttcagggggacgcttctgtgcaaactgcaaagacaagtacttatatgacatcagaaaaggttgcttacaacaagaattagaggcaggttaacatgacacaattgtgaatattgtcaacaacagtcatttttcgtaatggtgggatgctgacttgaataacagttacaagaatacatcacaaacaagtttacatcaatccacgaataaagatgacagctgacgaattgatgtattgcatcaggccctcttcaatgatttaaacaaacaatggataacgatgaacgctaggacgaaacaggaatatagaaactgaaaagtaggttacagccaagcacactttggagagctccgagcctctcatatgtgacaaactggatatcttgctacctaactaccactaatagcgagcagagaggccgacaaccatatccttctgaaggtaccaataagcacatgaaaaattcttttgagtaagacataaccaaaacacttgtgacaaaagaaaaatctaaaccattcattgaatatcaccggaagaatactattcatcgaataagaaatatgaaattctatagaaatatatagtggtgatcaattaacagagttcccttcactaactcaatttctagaagtgtaagacataaattatgccagcaataaacataccattgttctcctaaaatttcacattacaacatagatatccatcctttgatgtttgatcccaacccaaactcccttgtcaacccaagtctacaaaaagaacacctttttaagattttagacccaaaaggatctacaatgaacgaaataacgcgtggcattgtactctaattatcacttatcacgtagaagtagtcttcatggccttgaatgctgggtggagcaaccctagttcatccttgacatcaagtgggttgctagtctcattcctgatcctcttcaccttcctgctgccaagcgacttgtgtgtaaacccatacatttgcaagatctgattatccccaaaattgaaagcacgctccatctgcttgaggcacctctccacagggtaatccccaaacttcccacacggcttgcatccgacaaagtgagtgaccagtggccaccggtgatcaccaagtcctggatggtaattctcaagcatttcctcatacctatcaaccaagataccccaatatccatggaggtaatacccattctcaaggtacaccttgtcaccccatttctcacgctctgtagcaaggatgtataccatggccgactgatcatcagcctcaaacaccggccgatccttcaagtacttggtcaaaaccttcccggcctcaatacggacagggccctttggtcccattggtgcccatgtatcaaggaaatcaagcgaccattggcagttgcgcagcaagaagctgcctgtgttgaggccaatccagttcttgtcgtcgtagaccatctcatcccagccgtgcatgatgaggttgtaggggccgtaccgctcccatggcagctcgaatgccatgtcggagaacatggcgtcggagtccatccaccagaggaactcgatctccgggtgcgcgaggagcagcgcgcggaggagcgggagcttggcccagaatccggccatctcggcgtcgagcagcgccatgttgtagaagatctcgaggccgtggacgcggcagtagtccatcttgttcttgatggacttgaggaggtagtggtcgccgacggggttctcgcacggcttgggcgaggagcccgtgacgagcagcacccgcggcttgacgtcgttgacgaagggcggcgtctccgggtggcggcggtgccacgcggcccgctgctcgtcccagtcggagatcttggggcccagcgtgtagggcgggtcccggagcgtcctcggcggcgggtccggctcgtcgtcccgctgggccgcgcgcccggaggaggacgacgagccgccgcccctcgacagcgcgtcgtggtgctccgccagcgcgcggtgcgggtgcgagatgaagcggtggcggagctcgatgaggtcctgctgcggcgtgccgaacttgcccgccccgacggtgccgcggagcacgacgacggtgagcagcaggcacactacggtgagcttcgcgttcctcgcgaaccgctggatctcccgcatccgccgctcccccaccacccgctccgccacccacattttgccccctccctctcctgccccttcctccgatccccccacaccgatcaaacaaacaaataaacaaacaaaccctcctcccccaacccaaaagcagcaaatcaaaaatgcaggcaaggaatcaccggtataccgcgtctacggcgacggcggcggcgtcggcggcgcggagtggtggtggtggtggtggtggtggaggaagaagccgaggaggttttgaaccgcggagttggaggcgaattaataagagaaagggcgaggcggagtggtgccgcgacccgcgagcgagcgaagcgcgcacgttggcctcggagagcggattgcggtggctgtctgagcgatcgggaggcggaatggaaggggaaatctggggagacgcgaaatcggaatcgaaatcgaatcaaccccctgacccggccgctgcaaggaggaggaaggaggaggagaaggagaaggccgaaggggaaggtggtggtggtaaaaggggaggggaatagccagccaacgcgttgcgagatgcgatgcttctactcctttccccgctgtcgcccggtaatttgacttgatcctctcgcgtgggcgtatgaccggtggggccacccgcgtggggccctacgggttttgtatggtaattttctctggcttttttttttgctcggttataaacggggggttaattaaccagtggcggccagttgtaaccagcccaggggcaagcgacgtcgcgaggcgattgcacatgacgcggtgacttttctccaacgtttaaacacgcgtccccatcaacggccgtgccaccacctcgctcaaacgaagcgggctgttcctccgcgtcgctgacgggtgggccattgcgtcgacactgacccacctgtcagtggcgtggtactagtttcggcgatgtagctgccggaggtggagttgtcggttgaggagctaatcactggtgtgtgatggcgatggccataacgatgttttttttaaagattaaagtggacatcagggtatgtaagccaaattactcctctagaagcccagttattatgccttttccttttgtttagtttgggttggtaagtagcgccaaacagtagtagttttatttttcaaccatgtaacatcacattggaccaggtttctctcaaatataatgtactacgcatgtttacggttccgagatggccttccgtttcgggctatgacggaataacgtttttcgtgaaatccgatgaaaaaccggtagatttcgaccaaatttcgtaaacaaatatttgaatacaaatacctagagtttaccgataaacttatgaaaatcggtcggctttggtgaaattccgagtgaaatcatcgaaatttcaattggtaattagaaaaagaggtaactgaaattgttttccttttttaattcgttattctttttttcctactataaattccagtaaatacacggaacacattaattttttcaaaaaattatatcccaataggttctacgaatatcatactatttataagatttttttccttttctatcattcaaataggtctcagatggtttttaccttcgagcctcgtcgaaatctcaaaattttgtgaaatgcaaccggttttcgtcaaaattgttaacctgggtactacgtgtactactgtactagtagtacagagatatggaacgcctcgaaaacagacttcaacaacagagacgctagaacgaggggcaagtaaccagtaatcactgccacttgaacgaattccgcacagggagatgcagatccgatctgacccagagaactcggtgttggagcgagagacagacagctgagagtgcgtgaattagcatgttcacgcactgatggatctctgagctgattccaaatttcagcactggtcttcttcatggacccttgatcagcggcgattattgtaaagcggccagtaccggtcgccgtcaacacgggaagctggggccagtgccgcccaagaacttgcacgtatctgaagccaaaccaattaataaattaagcaatcaaccaaactaaacccatttatttgccggccacttgctagaccacggcgtcgcctgcatccgcagcggtaaaactacacaaaaaagtgccggtggatccggcgctctccacttcactaccacctcggacctttccagccgatcgatacgatacctcccgtgctcctcctgctcgccaaatgctttcgcctgcgtgcgccgtatcattcatcgcgagcaccaaattaagcgcggcagaggcagcgccaacgcgtgtgccttttttttccgcggacgagccggccgtggaatcggcaagcaaacatgggcgcgtcgcgttgatacttgacctccttttgccgtttccttttggctcgagcttcctcaggacgacggggaaaaggctgcacattagcatgttcttgatggttgtgagtactatagggaacatgggcagaaacaggggtcgtgcaggcaacgcacggcagcagaaggcagcggtcgaacgagagtgagacgtgcagccacgaccggaccaggcaccacccaatcaacgagcggcggcgacgagttcgcacatggacaagtagctcgccgggtgggtacatagggcggaaactctccatacacaagtcggacaggacgactagtactgtatcatggctataatactgcatcatggctaaagcgtatatataaaactacggaacatgttaaccatttttcaacggataaaaaattggagtatatatagtctactgtggatgtatgtgtatcagtgtatacaggacccataccgcactgaaaaagccacgaggaataatgaaaaaaagaaagtatgttgttcgccatcggaccatacaagcaaaacggcaaatcggactagtgactacagatctttgctgaaaacaaataaagattcttaacgaacactaaagatatactaaaccaagcacggtggtgaccacaaggaacacatatatttgttatcaaatgcgctaaatgggccctagtggtctagcagatcaaagccaatgtagcgagcacaaagcatttgggaccacggccctacgctgctcaacattgcacgaccaactgacctggaatcatcgaaaccacaccccactaaaaaatccccagtagaggaaaacaaatctatctcgtcttgatcagttgagctcccgacttcacgtcaaaaatgagtgcagatgatctcagccagctccctatcaacacaagagaatatgctgttaaatcactaggagttatcattagcatagtgcagactagcacagccacaaggtacacgccagctaaaacgaacctatccagcataataccaggcagagggaccaaccaactgggctatcagcttaaggaaaatgtcacatgagaaaatattcatggatttatttttggacgaattgttattgaaagcaacaaggccattcaatgcagatgtatatgacagagaagccgtgaattcagtgatcaccgcaaaatacacaagtctgaacccatactgctaatcagcaatagcgtccacacatgacaaatggaccaaaatgtaacaaaaatatacatttttactgcaagaattgctacttcagtagttttaggaaaatgtaaaagattgggcttcgtgcagtcagttctcactttctggaacatcctatcaccaaagtctatcatcatggtgcattagatgaaactaatcgcatttctgatacaatattttacagttcacagcgaacaaacagtaaacagaggaaacgcacaaacatgcaaatttgtccttgttcatgaattgctaagcctacattaagacttgaggaaaatacacagagtgattattagcgttcaacggagaaaacaaatggagatgttccgcacctgtaggccattacaaagcttactctgtgggggcaaataaaccataaacattatcatgaccttgtggttgttgtagggtataactgaacccatgcaaattcctccttgtagctgacattttgatcgcatgatcctttacatgtgtacacaacaattgttgcccaatcaagagagtctggctcatttttcacaccaaagtaataaagcagctgtggcattatctgcagtacaaattagtgtgatatgtaagcatgtctgtgtgaaaaagggggtgggtgcctgtttgccccttactgtcgtacaccttagggatggtaggtcttcactgactaagtagaagaaataatttgaactgatgggatttgaaagaaaataccaaactcaacataaaggctgcagaagtatttgataatctcatttacagtactattttgagcagggtatgaattcccactaagccatggtttattggataccagcacaagccagtaataacaaagagccaccgtcgggtatatcttggctcagtctggcctggtatcacaactggttaacaggcagttgagctagcagccattaacttttgggtcttgactctaaaattgatgcattggtgtctgacaatatgcacagtatgtacccagcgaataattcatacagcaaagatataagggcaagatatttggcatgagggagtagggtttgcaaatttattacttgtgttgcaatgtgcaactggatataagtgtatacccactatatttcagtgacggaatttgccccagaaaaaaaaaagaccaacctgaaattcatagcatagtggacctctacagtagctacatgatgggatatcggcatttgatggacaaccagccgataacgcccatagaggtttggcattctcttctcgacagtatctgcataatgtaagcaagtttattcaaattcctgtaacataatattttgagaaaaaaatatgcaagggcactaaaaaaggctaattagaacattaactacacaatgctactattctgaccaggcaaaggctgatcagtataccaccaaatataaaaaagaatccaagcaactgatgcaatctcacctcaatacttgctttggtgctcttgagacccgctcttgaaaagacgcccagcatttgttgtcagcatcagcctacaaaaataatagtggttaacaaaaacaaagatgaacagataagaaaaaaaaaagaaaagagagagagagaggatgtagggttaaaacctcaaattgatccatccatgactgcatcatatcatctggtttaccaggtctttgcatcaccaaggactttgagttactctcatcacaactgtcagaattgaaagcaccctcatagtcgattgcaatctcatattctggccaagatttgctagcaggaactgcaaagagatgaaactataaaaaagagatatgattcaatgtttacaagcttatcaagcactcaaatacaatcaccttttcctacagcaggaaaaatagagcttgaagcttcagaagaactgattaactgtaggcaatcactcttatggccagagcgccagtgcagtgtctgacaaatagaaaaaaaatagttcaacaaagcatgctttagggcatatatagattaacgattagcgggaaaatgacttataaatacctgatgcttctcagagcagtagcgtgctttcttgcagctactacagagtttatcacctttccatgtaccgcaccaatggcagacaggagctgacagcatagttgaataattgaaagaaatctatattatttgactatcaattaaaacaaagagttcaaccatgaaaaatggccacctattaataaaagttaaaacagtttaacaaggctgaaaaagaaaaatgttgcctatgaaagcatgtcacacaagaaaattcagcaactagcataacacataaatcttacacagggtctctgcaaatgaacagaatgattatctagaccaaaaaaaagctgggaaaaacagaagaaatgcttattaactttagaacataatgtaggcagtacctgacatgctgagaaaagtttttgcaacagtagaaaaaataatgaggatgaagctttaagaatttatcacatggaagattcgatcaagtcacaagtcattatcaatcagatatttatacaacagctagataagtgaggaccgatgatccatacacataatgcaggaaacacatcattttgatacttagaatcattaagaaaaagaccaaacatggaaaggaatgccaagctgccatccaaagaagaaaagaaaactacctcctggacatagtggcttgtcagaatcattgtgctttggtggttcacttgagtagaaggcattactacggggaagctggcaccggaaaaccttcacgctgtaacccacagcagtcaaaatcagcacaacaataggctattagcaaaacagctgtagaacttcaattcaccttctacacggattgccttgtctatgtttccactggtcgtgctggtctcggagtaagcatgccattgacgggcacatgaacatgaacaaagtgcggtgaaatgatgccgcattgtcctcaatcggtgcatatatctgcacaaaattgaatcctatttgtgattgatttcacacccaaacaacaagtagtcagctacaactgcactatccacaaagcaaacacctggaggacgaactgcaggggctcgccgcaaaagccgcagcaacgcgagttccccgatggcaagttcacaggatccaaccacgcctgcaatacagcaattcacacaaaccacaacatcaacacctggtcgacgaattgtaccaatttagcgagtgaagttcatcaaaaacgcgtgcaatccgtacgcaccgggatgcctccggccttgctagggaacaggtggcggaggaggaggcccgggtgcttcggcttctccagaaaaccaagcgtcacctccggctcttcctcctcctcctcatcgtcgtcctcgtagcccgcgccgccgcctccgcctccgccgctgcgggtggggatcggtggggcagttcgggctcgtcgtcttcctcatccagcgaggtgatggtgagaccacgaagcttcacggcgttggactccatcctcggcggcggcgtgggggcaaaaatgcgtgcgtgttcggcgactcgcactt

SEQ ID NO: 5850 - DNA, 8857 bp, Oryza sativa
ctctctctctctcctgagcgccaatcgatctcgtgatctagagctcgcttcctcgacttcgtgtcaaacaccgggaggagcggaggccgatcggagcctaagcggggctgcgccaggagctggctaaccacaggcagggaacggcggcggcggcgcgcgaggcgtcggcgtcggtgtctgagctggcagagctggacggcgcaagggatcagccggaggagcaggacgccaagttcctggtgctgcggctgtacgaggcgctcaactccggggagcgcgcagggcgcaggagctgctcgcgccggacctcgagtggtggttccatgggccgccggcgcaccagcacatgatgcgctcctcaccggcgccgacccggcgagtcaaggttcctcttctcccctcgctccgtcgacgccttcggctccaccgtcatcgccgagggcaccgacgacacccgccagctctactgggtgcacgcctggaccgtcggccccgatggggtaatcacccagctcagggagtacttcaacaccgacctcaccgtcacccgcctctccgcatcgccagccaagaccaccgccgccatttcttcctccaactccaaccacgcctcctcttcggggccgccgccgccgccgtccaagcccaagtgcctgtggcagagccgccgcgccgaccgcgcgcacaagtcgctgccgggcctcgtcctcgccatctaagaacgaactcaaaagacatcaagaactcaaggcgcaaaaagcttccctaaattaatcacatataaaaaaaatcaagcgatacttatcaatagtgattagctaaataaataaaaacggaagcgcacgcactgagtgaagtcactagctatagtttattgcttatgggctaaagccgctcagctcaactgagctgcttcaggtttgcgtgattaatcccactaccactactgcaactagccagccagttaagtagtgttgcttttgcttgcttgtctgaaagctgaatcagcagtgtgaccagtagcatcagtagctttggtccaagtcattatggattatgtaagtgtgtactccttccacggtaaagctaaaccgtggctgaatatgaatgatggtctgttgttgttgcataaaagtactcgtagcttgttttgttggacacttaaaatcaacatatgtgatgtacaggtacttcttttctcttctttccccccattttcattccttcttgggttccaaatgaaccgagcaatgaactctgcttattttaatctggccatgaactgaataattaactcctacgaagtttgagcaaggaacacatctgcttgcgtgaagaaaggggatggactaattcgccccacacttatggaagtcacgagctgaacggcacctccctgatcaatgaatgcatggttgatggtttggatttcggaaaaccacaacgaaatcaaagttttgtttggataagctgtgaggataagttgtccagctgctctggagaacccctaatccgaggagaaaaatctacaaaatccaagggggacaggttcaggatgttgctttccaacaaggctatgatagcctcctctttgatgtgaagttcctacggattcccggtagatccggaagaaaaattaaacagcgagttcggaatttctttgctctcaagcgatgtcatttccttttcttctttttttttttagagaagtaagcgatgtcatttctttgctctctagcctttgttctgttctctcttttcctcacgatctgtcgctgtcccaattatatttgtggcgtaaataaaaaggaattccactgatatgtcaaccgaaatccagccggccacatgtttgcattctcattttataagcttaaatctgacttagctgtaaaatggtattcctccgttagaaaaaaataaatttcacaaaactaagtattttgcacaatctattacttttagcatgaagtgatggaatactaagatcactggtaaaatttactaaaaaaaaacgttacacatctagcgtttggaatttgtctaacaagggtcccttagaacactaagatcaatttataagggtgctaatctacccacttcatggctagaagtacacaggttttggacgaatggagtacgtgtagccgtgtaggactctaaacttgtccggtttgcccttaataaccattatactccgtatttctggcaggcttaggcttcaccggtcaccacaagagccataaaaatcgtgaactccgtcagaaagtgcatgcggcttctagaatttcttagaaaaggcttaactgctttaagcatttcacaaggaaaaaaaaacggtgatgacatcctcttcagtagcttctctgattgctgcacccttttgcgtgcgtgccacgtgacatggagtatctgggacggagcagatcagcagaaactgacacgatggttaatttcctcgccacgagatagacgtgtttacagtgtactattcactactctcgattctcggcatgaaacatgtgcggtgaatttacggtttacggagccctccagctttgaacgttacaggtgccaataaaactttatcggctcgactaacagcatcagtctgtaatcgtgcacgtacgtattagactagagcaatgctccggtgctttctacttgtagtattatactacaagtaaaattaatcccgaccgttcattttaaagggtagattagtaatctcctaatatatattaggagtaattttggccggatcaattttctctgtctcggtcggtcttggcttgatcgcgtcaggtccgacgcaagcacaacatctcgcccgacgcacgttgcttatcactactcctcccagcacgcggcggcgcggcgcggcgcggcgcggcgaaaccctcaggcgtcccctcctcccacctctcacctgtctatccgttccccctcctctcctgtattccacgccggcatcctggttcgccgtcgtggccttctgtccgctgcgagtggccttccgcgcgcgtccgattccaccggagcccctgtgcaagacctgagattcttggcagtgcccactttggaggattcaatccattccgccggcgggtagtgatctccattccgtgttgccccgattgtgtgggctgcggccacttgggaggcaactgcgatacattccggctccccggttcccctccgtgcgtgcccgagtcttgtggcttgcatggcgagcacctcctcgaccgcgagcaaggcatgagattcagaatatgcaacagtgtcgctcgctgcgtgctgccgtggaaggcgtcgccggcgaacctgatagaccgcaatgctcagaggtttcagcacatccgtgctctcagcggcgtcaggacactggatcgggcgctgaacgatgcatgcggcatacccgatctgctagctcaggatggtggccggcgatgatgtccgcacgctctcctgcgggcatgacttccacgaggattgcaacactgcaaagtggttcagtgacaacaagaaggcctgcccagttcattctgcttgtaatattcagttgtatggtgttatgtgtcgaatacttcattgactaattgacgaggtttgagatattgatgtttattggatcttgtgactgtcccaatatattcattgttcagtaatggttcaagtaaaaaagaaaaggtgaatagtgagggactactagtaatgtcaatgtgttgaccatgtcagtgtgttgtgcatttttttgtgtgcaactgtgatggggtgagaagagtccaggcaatttgaactgaaatatgccatcctgctcctggatcagtaaacaagttgttttgctcctgaaaaagtgagactgaaaaaaatctgataaactgcttaaatgagatttttcactatcagagttttgcccatatgtaaattgcatttcagtcagagctgtaattcaggatttgttttatatttcataccattgaaacatctaattgcattctgtcatattctggtgctctgaatcatcgctacatgattcctttcttttgctcatatgggggtagctaagcgctcaattgccactagattgaatttttttttcaagtcataggacaatgtctactaatgggggcttagaacatattgattcactctttgctgcaaactccctggtctactgtcgtgtttatgcaaaagcatttgcattagctccgcggcagctagtgaagtcatgcacagtccctattcatgtagcatccaaacgcctcattcccaagtcccttagccgctcgtacggtcgccggcggcgaccaaatgccaccgcctcactcgagctccgccaccgcacatcgccggctgccgtagctcatttcttagacaatccgagccgtccaccacatccccatactacactcgttcattcacagttgcccattcctcctacctcgcagccgttcgccggaacccgtcgaacgtcgtccgctgtccaattgcccggctatctcctctgtcttggtcaaagctacatggcaggactagtcgtccgccgtgggcaaggaccttcagcggctcggcgaagaggagaagggccacccttggtcgctagagagggaggagatgtcgatcgcgctggagatgatggaggcggagagggagatgcacaggcgacgaagtcgacgatggatggggtcaggcgcttgagaagggcgaaggtgtagagttactgaataataatttacaataatacccttacgtgaattattatctatgaacaaatatacccctccatgtttctactaccactaagcgtggtggtagtagaactagatctcaacctgacgattatatacgatcaacggctcggattattttctactacaagtagaaagcaccggagtgaggctcattagactattagcaggcagaaaaatgttgttgcatatgcaagcattgagtacttactactccttttacctccgttttataatgtaagtcattctaacatttctcatatttaaattgacgttaacgaatctaaacatatatatctatatagattcattaatatcaatatcaatatggtaattgttagaatgacttatattataaaatggaggaagtattaaaaaacagtctctgaacagtggaaggcaaaatagtcattcaacactcatttaagagttactgagacgtactcaaatgttacttgtgctaagatacagtaccttctggtacgtactttgacactacaaggagtgcataagagaagggcctggggtctttacggctagcaacacaaactacgagctagctggtacgggttcaagcctcactcccttagtttaaaaatcaatatagtcctttctagattaatcccatttttcaaaaggagtgcataaacctatcgatttttattaaaaaaacactgtaaggaaatctatcacgaaaattgaaaagtattcatgtgcggcgaacgggaccctatcccccgaaaatgcaagcttagtgcatttggagtttcctctttttaaaggaaaagggcaggatttccctaagaaattctacaagttgcaacctcttacgatgagtgcaagattttggtggtttccccctagatctccctcaagcaaggatcgtttcccacatgagcggagctagataggaggagggttgcctaggaacccgatcaaaaaaatttttaactatagtttagctattttcacatatatacaccactcgatctaaattcagacactcatattagtctaaatttaatctaaaataaagtaaagcaagcgagtgacccccctctctagtatgttctagctgcaccctgatttcccaagtaacgatttaggcttcgttcgttcctgggcgatccaggggattgagagagaaaagtatctcattttccgcgcgcacgcttcctaaactaataaacggtgcgttttttttaaaaaaaaattctataggaaagttgctttaaaaaatcatattaatccatttttaaagtttaaaatagttaatactcaattgatcatgtgctaatggctcatctcgtttgcgtatcttcccaatctccacaatcctcttcttctcaaacacacccttagctgatgattgctaccatcattcgtcgtgagcgccaaaagcatgcaacctgttaggcgcatctggcaatctggcatggagcaaactgttgtggcagctggatttcctaatccacgagtttggcgggtgctctccaagattaacacgcctgaaacacgtgcagcttagtacgagcgtactgccgtactccagttaagagccgctttgaacactgcctgccatcgccaacagaagcccattgtgactgactgaactttcagcgtcccaatcaagcacctagcttttggtacactactgtactgctaccgctgttaatatacttgagaaggtacgtgtaggtattaaaaatttacactaaaaattttaatatctcgagatatatgatatctgaagatattaattattatatcagaaagtatggtatcttccgatgttttttttaaagaagataaaattacacaataaattttgtttttgcgggcatgaaaaaggcgactttctccaagccgacgacgatatgcatgaaccgatgaactctaccaaggcgcttcgtacctgggggtgtggctggaaagctcgctctcctatctgatcctgtggctgctagcgcttgattgaaccagtcccaccaccatggccaccgcctttattatcattgggttggtttgttttgtagtataaataggccttaccaaattttgtcaatgtcaaattctgataagttttggcatgactaattttggtaagggaaaccaaaatagcctaagttcactattgaaatggcctattttcttaggcataccaaaatctggcttcaaaccaatatacactaaacactactaaaattaccaaatattgataagcctaatttagttctcaaaccaaaccagcccatcgtgccgttgaaagctgacctttcatgtaggagtagtaaactgactgcagatatgagagcaacgagacaccgcgatgcagtcatgcatgatgctcgccataccaagccaaagctttggaacggcagttcagttcacttcgctggacacactgaggccacgcactctgcatgcagactgcacaaagtcagacgttcaggttccattcggcaggtgtgtattcagtattccaggggcgccgaatccgtttgagtcgtgagcagcagatgtgttcttgcttcttgttcagatgacatgttggtttcctcaattatttagccttgaaaataatccgtaccaacactttcaaaatgttaatggtttcctttaatcctgaagtatatccttatctattaacagtttcagcgtgaaaatgattttacctttgtgtggcacatcaacaggataagtcataagtgataccattccaaaacattcgcttatcagggagccatggttctctgatcaagttgactgttcagtgcagctcattttataggggagagaccgaatagcataaaaagatgcctcgattagggaccaagaatatgccatggtcagctcgtaatgcttgcatctgtgataaagaacaattcagatgaagtcttgcctgatcagttgctgatcaactggtgaagattctcgtgaaagcggcgacaggaaagggagaaaacgaactgtcctgtccaggagtggcgacagggtatcaaagatcgatccagcgagcatccgaaactattccctctccctgctgggtttggaagtgatggttgtagctgaaacattccaagtgtaactattaaccacaaaaggtaaatagcagcagcagcagcttaacccagtgatatatagaacctgatactgttagcttggacattcttctatacaatctgcagcctacactggacgatcacaatttgcaacatcagaaaagttggcatgtagcacattatcagaatgttcctcagaaacatacgatcagaatatatgcccgaggaccgtaatattcatatcaataataagttaccagtaatgctaggaggatataagcagaaaaaggttgatttgcaagtaatgtatgattaatccaaattggcatgcgattctctctatcaattatgattcagataaagtactttagtactaggctgaaatttttgagaattctgaacatgtactatttagtggccggcgtgctcgtttctgaacttcaagcttcgcatacggagccaccgatgctgtagccgtacacggtacaaacaattcgatttgctcgtaccggttattaaagagatggaaaaaattggggcagacgaaatcaagaaagggggctgctatataacggaatcccgtttttaaacgggatgatactggttaggtatcaggtccggtatcgggtgatacatatcaggtatcaggcgattctaccacgttttcaggtgatactcgcgacgtatcaagtgatacctatcaggtatcatgtgattcttgccacatataaggtgatacttgtgaggtatcgggtgatacctatcaggtatcacgcgatacctattagatgatacttgtgatgcatcaggtgatacctatcaggaatcatgcgataccagccaagtatcacgcgatacctaccaggtatcacgcgatacacacccgacattgacgccgccgaccactgccgccctagcgccccttcctccctagctccggccaccgctaccgctccctcctccggctccggcgacgcaccaccgccaccccctcccatcccctggatccggcttcggccaccgtcaccaccccctccctgccgg

SEQ ID NO: 5851 - DNA, 10214 bp, Oryza sativa
  unsure (1)..(10214): unsure at all n locations
catctctagtcatgctcgcatcaaattgggagataatgattctgatagttgtagcatgagcctcctatttgcagtgccctggtttggaaatgcggagttcgactgtaactgccaagacatgggaaatccagtcccctggaggaatggctgccggcggggaggcccatgccggcgcggtggagcagtaggaggttgactggaggtcggacgaggagttcaagaggttcatggggaacccgtccatcgaggccgccatggctccatcgagctggagaagaagcgcgccgaccggaagctccgcgagctcgatcgcgagcccgacgccaacccgctcgccggcctcctccgcggcctcgccagggactagcttgccgagaacaccgcggtcagcctccctgccattcccacctcacgcttgctctcggatctgcgcgtgcgggggtgacgtcgtctggtgtgcggttgtgctcgtcggcggcaggtgtggggggtgacgtcgtctggtgtgcagacgcaggagtgtaggtgggccttcacattgtggcgagggaactgaggatgacatgtgggtcccatcattttttattattatgtgtgcgaaactgacatgtgggtccaatgggttttattatttttctgaattaaattgccacgtaagcgccacgtcagatgaagaccgagtcaaattagctatgtaggcgccacgtcatccaaaaccgccatctaaaccgccgagggacctcatctgcaccggttttaataattaagggacccgttgtatctggtttttcggttgaaggacgaaaatcggattcgttgacaagttaaaggaccttagatgaacttattcctctacgttgtatacttgtacggaataagttcacctgccatccctcaattttacaccgactttgtatgatatcccttatcattaatatcagaaatcttcacccctaaactatataaaacaattcaatttaggtcccattacagtatagatacatgtttttgctgacgtggcatccatgtcatcaaaataaaaaagtatgtgggtcccacatgtaggtgaagcgagaaaaagatgtggggcccacctgttgggaccatcttcttagagagaggaaggccggctagagagagtgggggcgccagcggtagaaggggtagagggagggtgttgacaggagatggggagagaggcggacgacgcgacggcactggcggttggcacgacggcgctagcaggatagggagagagagaggcggatggcacgccagcggcttggagcgcctcatccagaagctccgctatcctccatcgacaagaccgccgccgtatgcgtcttcgtcgacttcatctaggtctcccccctccccgcctctgtcaaagctgccgaggaccaagccgcataactcgtcgccatgcgatagggtttcgccaaggcggtcgcccgtcgcctccactcctgagatgtgaagagttgcctccacctccacctccacccgccttagtcgcctcccgccgccgcgctttgcccaccgtcgcagtgaaggaaggtaggcctcctaacggcggtgaagggtgcgtttgcctatgagtccaactggaggacgtttgtggacgcaagccgccacttgggaagaggggggcgggcaccactggcacgcggatctagcagcccgctgctgcgcccgctttgcctgccgctgcacctgctcaagagaggagaagaaaaaaacaagaagaaaaatttctcacttacatgtgggacccacatattattttatttttattttgctgactaggctgccacgtcaataaatctatgcatctatattaccatgggacttaaattggacggtttgatatagtttaggggtgaagatttctggtattgagcataaggaatgtcaaacaaactcagtgtaaaagttgagggattgaaggtgaacttattcctacttgtacagaggcaaacgtgtacatgggctgtggacccaacgcgccaatacggcccatcgatattttcgcacgcgccgactacgaggcccgagggccgaagagagaagcgaagggggcagaggaagcaggagagccaaatccctcaccgcggccacaatatcgcggccctctctcctgctcgtctcgtctcccttcctcctcgtcttcggcggcggcgcggcggagatgttgtccggcgacatacccccgaaccagacggtctacctcaggaacctcaacgagaaggtcaagaaagaaggtacgcatcttctcccgggcggcgacccagcgcgcggccgcccgctggccaaaatccctcgtaaaaccctagccctcccgatctgggccgctgctcgctgtcgcctactcgcctcgttgtagggtttggtcatgtagcgtccggaggtttaggatgttggaggtgttttgattttttttttgttcccatagcagttgatgaaggggggcagtcggcgggcagatgttggagttgctccatgttttctcgctagaggctgatgggaatgcccatcttgattccgtttaccaggttaagctgtcgtttggggggaaatctctcttacattgtgtgtcatagaaattcgagtgtgtagtgcaaaaaatagtctcctgttctgtgtaccataagctaaccagataaccctagtttgtgtaaaccatcgctctgttgttcaactatggtataacagtacacctctttgctcgattcatgcagtaacttatgttgatctttcctgcagaattaaagagatcactctatgcgttgtgctcccaatatgggaggatactggatgtggtggccttaaaaacacctaaactgagggggcaggcatgggtggtcttcagcgaaattaccgccgccacaaatgctttccgtggactgcaggaattcgatttttatggcaaaagaatggtaatcatttgcactttagttgataactgatgttttaatttccaatttgatttttttatatggtgtgtatgttttgccttagagtaacattgcattgctattttttcacatgggatattaagtatttgcagagttcagtctggtgccatatgttgggctgtaaattttttacaacaaggttctaaattcaatgttaaattttcagtaatgaagctactcagatggttatcaatttaaattttcagtgatgcaagtaatgtacagttacacatggatccatttattaatagtatgataataccttgatctggctagcaagcatcatatcatttgcgttctacaatgttttgcgggatgcttaggttaatgaagtagcatagataaacatgcattcttcatagtgttggtcttacatacattataatttgattatgtagtaagcattcacctttttgttatttgtagaataacatgtcaggataatctctatctagatgctgaaaaacatatgccttaactactgtagagtcaattgctcctaatacaatctcttgtttgtatactgggcaagtgaaaataaacaatttatatggacggtctattacatcacaatcagaagaaaatagatcaggcttaatagtaccactctatttattaccaagggctagttacaacttaattcttttccttgccctgtgcagcgagtacaatatgcgaaaacaagatctgactgtcttgcaaccgaagatggttctactgctccaaaagagaaaagaaagaagcaagaggagaaaggtatttctaattgcattttcatttatggatgtttgatcgttctatgcacaaaactttctgatttgcaatcctagcagataccttcaggtagtacaggaatggggaaatactaagaattctacagtgcaagttaaaattgcattcttcaatatcttcaaaactagggcatcagcctttcaaacatctatgtagtgtatactccctacatcacataaacatgccatttcggacatacatcaacttgaactttcaaaatcttcggcattgatgtcttttaagtatttcaattatatatatcaatatcttaggtctgttataaaacacgtacttccaaagtattctcatcttcttggtgcctatgtccaaaacaaaaatgttctcatgaatggaagttgtgtagtggctagcaaaatggaaagattcctttctctatctctgctttttgtatcaattgtactcctgttcattcttgaaatttaaggaggtactcataagctccttttccaatagaagaatacattaattatctcaagaagtctatgtctattcgacacgcatgacacattggttgatccaccaattgtgagcaagctacggagacatttaatttctttgttcttgaagataggtaattacaccatagtttctcacacttccatgatgctccacctatgtctatgaacttgagagcccaacgtttttttttatactttgtgattttcttaaggtcctttcaccacatttgacttcatcctagacatcctcaaatgccttatgttacgttaggtacacaacactttctttggtgatgaagatgtatgttgttgtggggacttccgtctgaagttttttcaacaataaaataaaattttggaagtgcctaaagtgtccgctaagcttatcatgagcatcattacctctattttatttcagatgcgcaagctacttttctaggagtagtaagttttgtgttggtagttcagtcatcagtcataacttatgaaacttgatttatctgcttgttgagttccctttggtttggttctactctttagttattagggaattactgcttaggactacattttattttcatttttcactgttcgattattgaagaacatgtatttatatgttttgcatttggtttttgctctcttttagcagcggagaaaaaacgacgagctgaagaggcgcaacaatctggtcctaatgctgctgcccaaagcaatgggactgtaagttctttactggtttatataccatgatttcgttttttataccattattctatgccacctcttatcaccttgccactattatttcttgaagcctagtttttttaatgcattctgtcatatatatagtgtggattttgctgcttaggttcatctattctgataccagatatctaccacagtgtttctttgtgccagcattgtcttattttacacaaatgttgaaatggtatatacacttgactggattatgtcttttactagtttcaaggtgaatgtccatcttttggttgaaagatttgaggcatcatagggaattaatgaattatatgtgtgtgcgcttacattagggggctacttggtcatcttgacttgtatggaaaaattactgctgttcaattctttaaattgaactatttttagattattctggcagtaggaagatagtcttacggtagtacagtttttttgttagctcaccaatttatgtcctcggaaactctgctataactgttttttcttgtctatcccagaaggaaccaacttaggcttcctggtaataactaccttagtgttgtccatcttccatgacatgggttaagtgggtagtagttagtaagatataatatctctctattgttccattaatctatgctgaatgtatcgctatcgtcaattagattatgtggacaaaacaagcaccggtatacttactactttcatattatcatttgtaatgcaggaaatttcatatgctcaactactatgcaactttgagtttcttcaagtattttgagtttctttgttgacttctgtgcagggttatcaagcctcacgcctgggcaagacttcgcaagagccacctgcacctccaaacaatatccttttcatccagaacttaccagctgagactacaagcatgatgctccagatcctgttccagcagtaccctggtttcagggaagtccggatgatcgaagccaagccaggcattgcttttgtggaatacgaggacgacagccagtctatggttgcaatgcaagctctgcagggtttcaagatcaccccatacaacccaatggctatatcctacgcaaagaagtgaatgatccatgggatcccacaatctggcaagaaaacctctgtacttgtaagactttccgcccttagctttcaaactgctgtatcagttttctaacactgtatttttggaaagcaattgcttagtttagaagtctttgttgcttaaatcatatttggtcttcattctttttgttaaccctgcttttgatgctggcatgtctggtattgtggcctttgtaggctacattatcttttctcctacactggtggtagaagttagaagatgtatccctcccttaaaagccaagagaaaatcatgcccctatattcccctcgtccattttccttggtcagagatgaatgaggtgtatatgccatattatattgccaaaaatcataagtgtcacctcagtagttgcaggcatgatgattgttgaacacgtattttagtggtgggatggtaggtttcgtggccttgtgattttatacaataaagtgtgcggccttctactactatttggctattatgggattcttgttgcattcgtggccctcatattaggtgtatgcctatccattctcccatctatgagtaactttgaagtccatgaacgtatattgtgcatgctacccatgcattggcatgtttctagtggaaaagcgatcgcgcgaagatagccacagccactcagccagccaggctacagtgtagttgtgctcactcgtgcaacctatgtgctggtaggagtatctcttatcaggtcggtacaggtagccggtagcctggaatttgtaggggcgttgtcttgtcgctggacaccgttcgttccggcaaaaatcacacgagataaatcttgtagcgtactgaccttgtgaacagtatttttgtcgtgtaagagggggccgggaggaaaccatgtgacatgttaaaaggcgtttgcttgtttttgctgtgggttaattcgcctttttcacctgtgggccgggagtatgctggatgtagatggatttttttctggggttgcttagaatggtactaactatgatttgttttcaacaattcatacagaagtataggttttactgttgtctctggctgcagcccgtgatattccttgtgctaggaaacaaagcagcaaagacaatttcatggtcgttctcttatccctgacgaaagaaaggggagattatacgatcaagtgatgacggaatcggcgcattacaacaatgctgcggatatgatgaagtgacgacgacagcatttgaatgttctgttctgtccacacaaaaacgcaaatgtgcagatcatttcaacagaagaattttacctttcgattccaaatttctcagctatttcacgcatgccctagcagtaagtagagagtactacgtataatgggagttcacaagaatcgtcgcatacacgagcagcaacaaagccaacaaaattaacaagttcagatgcactccgccggcggtacggtggggcccacatgggtagtagagtcacctcccggtgggtcccgcttgacctgacctcacccctcccccgggagaacggacggagaattaattagcctcccacaactccttaattccatctcctctcccctgctgatgtgttgtgtcatcgtgtgcttacgagaaagaaatacaccttggagaagaaacaaaaggcccggcccgacccgacgaggcgacgaagaagacgaagcgccaaaaaaagcgtaaaaggcagcgcagagagctcttctcttagccatctgaattggaaagctgcactagcgcagtaggcaccagcggcgcgcatccggcagcttgcaaccgagaaaaaagctgccattgttagcttgcaaggaggagaggtggagggcaatgcccctgtcgaggcacgaggtcggcaacgagtactcgctcggcggccgcgagctctaccgccgggccaaccagcacgacccggaggccgtcctcgatggcgtcgccatggccggcctcgtcggcgtcctccgccagctcggcgacctcgcagagtacgacgaccctccctccccgtcctcacatgtcttactttgatttatttcgagagagagagagaaaaaaaacgccttcttcgattgctctcccggttgaattcctcatggatggtgagcttttctgattatatttcttgagagcatttttttctgagttattatttggcgaatttcctgggattgttgcgtcgcaatttgctgggggtcaatggtgatgggatgttgatcgcagtagatcacctaatgacctaatgcatttgttatgaacaaacaccggaggccttggtgatcctttttttcttcgaataggtaggtgattgatgtgttagccatttgacttccaggtagttaactctggtaatgtcctagtcctagctcagcaactccaacaaaaaatatcttttttttttctcccccgtcttctgattgtgatcgagcacgtactggtcatcatgtactagcactttatggcccaacttttttttaagaaaaaagtctcaggttcgcgttcatctattgaaggatgctctgattgatttcttagagcctggaggttgaagcaacggaaaacaaagaattgcataaaagcaaccatagtttgacctggattcatccctttagctgttgctgtgattgcgatgataatgatccttggcatttctgttgtttatcaacgttggaatcagttggcagaagtccaaaatgcgcatcaaaattcatcagacgttcttgaattccatttaagccttacaccagatggctgttaggacataggacacatgtgtcgagtactcttcttttcactttatgaacaataatgatttggctatttttggatacaccaactaattaaaagcctcaactgatatattttgctataatcagtaaagattccatgtcaccacacggcaacataactagaacttctggcaatcttagtatcatcatgtcataatgcaaatcatgatgccatcaaattgtcccattgcatgtgtgcagatttgctgcacaggtgttccatggtctgtacgatgaggtgatgacagcatctgcacgagggcatgggctcatgctccgggtgcagcagctggaggcagagttgccactcgtggagaaagactcttgtcatacagactacctgtatgttgcttctaacaggggtatgtgcaacagcacacaacacaagcttctctgcattctgaaagaaacaacttctgtcacctctacctgtttctgctaaggaaagcgtcttctactggtctcgttcataaaaaatcgattggttttttttgcaggaatcgagtggcattcgaatccgaggttggaaagtggggttgtgacaaaaggcgacacgcctcgcttcatcatggactccatcaagaagtgtcatgggcctcccaaattgttcatgcttgacaagtatgatggcctaacctttttctgttcatgtgtgtgttgagcttgcacctactgatgactgaagataatgctgatctttatggatatgatcatgcatttttgcaggtatgacattggtggtgagggagcttgcttgaagagatacacagacccgtccttcttcaagacagattctgcatgttctagcatgctagagcaaggaattcaaagagaaagaagacctcttagagctatggtaatgaaactgaaaacagtagatttcttcggtagaatgatcctatttgactgaacctaatagattgagtgcttgtcatttcttttccatttcttccaggagatcaggccgaccttgcaaaattctgagattttcagaccacctaatgcagccaacaatgactccaagtagcacccactataatcatctcataccacccagaattttctcttctgttttaatctcagacaaacggcaatttcttttttgtagattggagacagatttgtctggtgaagctttggatgaagtcccaacaaggcgccggcaactgaagtaccgacaactaaatggatctgtgttccgaagcttcaggccacagatgcagatctnnnnnnnnnnnnnnnnnnnnnnnngaagccctgctccatgaaccattcagaagtgcagatatctttcactgactcacctgacacaaacactgaagagagggaca

SEQ ID NO: 5852 - DNA, 7382 bp, Oryza sativa
tgtggtataataatcgttgtcatatcgtttttttcgttctccttttaataattataggttgtgtgcatcttagttatatgagaggttttaaggtgtttgcatttaaaaaaggtaaagattcaacgctccacaataaaaagcctgtttggcacagcttcaggtggagctggagctcagccaaacaatttcaactacaccaaaattgggagtggagctgggtgaagctctcttacaaaatgagctagagttgtggcccaactcctgaagctaaatttaggagttggtgctgtaccaaacaggccgaaaaggtaccactaaaaaggtatttaaatattggcataagtacttaggtagtaagggtaaaaagataattttctaggagatagagaagagtataattgtcttaattattagttatagataccacatcgttactggtagttatcatctacatgacgttatttgcgtgttctttttgagatttacattttttttcttaagaatagattcacacagtaatcgttattatgttatttacatgttttttagaattcactaattaaaaaaatatgtcttagggaattaaataacttaaattaatcatatcatcttggtgtattggttggaattcaatagagtttcttttattattattattttaaaaaaaaaacttctccacaagaatggcggttatctaggttatatgcatatgtgctagtggaggatatgttcttggttggactaaccactatacaatgatttctaaaaggttccatcagacgtattaaacgtattaaatttgggctttgcttcaatgaaaaacacgagggaggcaacaggcaagcgtatatatactgtgctggaaaagcatacgaacaacttcgaagaaatacccgcgctttcacgtacaaaagccaggtttctcagcatcggaaagcataaagacttacgctaaaactaacaaaaggtcatcaattagaaatggaatactaccatttggcccggtcccaatagaacatttcttcgcgataatgcagtgctctgttgcgtcgaccctgccgcgctgcatcgtcggcgtcgtcttttctcggcatcatgtcgttgtttatcggcatgcgcggacagccgcttggtagctttcttaagctcgctgaagctttcgtcagtcgccaatgggagtatatattccccaatcccccactatatgtaagtttatttcgatctcaattgtcgcacacccgttttgatttgcatgtacatttacacatggttttattcggtttcctcagcggaaccgaattcctcccccctttctgttactacaatgtttaatattgcattctattttcccctgacaaaagaatactgtacattctttatttttttctcgaaggaccagcttaggcggctggcattccatttatcttagaaggaacaaatacgattttgccaaaacggcggtatgaaaaagaaaaaaaatacatcaactgcagcaaacaggcttaccgttattgtacaagtcactctaagacgatattctcgttaaatccttggcgcctcccatgctccaaacccttatctcatccaaaatgaggttgcatacttgttgtatagatgattcactttacattgtttcattccattccatctcccctcctgatgaagaaatgaatactcatgtccattgagttagtttgcgtatatagcatcacctgatgaacatgactgaatgaaatggcatttctttctagctgcacgttgccaccttgtttataccgatactagcctaatgctagcactggtactactcgtggactgcacccattcgacgtctccaaacactcgcttgtattttactccacatcagggctcaggagtggtggcaaggggggttgagcagatagatcgataacgatgaagcacatgacacccctcggcccaaatggaggctttgagccaagtaataagaagtcaccgccgcaagttggagcgattcctcaacgctcgtgtgaaacgcgacgccctgactggtcgcctctcccgctctatctgcgacgacgactctgcatgcgcccaactggcaaaaatctctccctccagatcagccccccccaattcagcaagtctttcttcagatcagtatctgatcattgaattttacttctcttgcctaattcagtactgtactctcttgggttgttgggcattgcgtgttgagtatgtccctggctagctgtaaacctgtaacgacgggtgtggcttcaaattttaagccaaaaaaaatcacaccttttgtccaaagtttctattctgtcgactggcttttcagttttgaactcggtgatgtggaatctgttgtgcaaaatgttttttccctgatattgctatcaacgagacaacgagtggtggaccacaagtaactctcggctactgttcatagagtatgattttgtacttgatcaatcgtactttccagggttttatttaaccttcactttggaccatggcgattattcaagcaagtagcaaagcatccatggacagtgacacgaaacaaccaatgagatgaccaggcaagatgttaatgcaacacgaaagggggccaatgctcagttgcacaagtccaattaacacattgaatcaagagattaacaaaatgggatgaagctgagtacacttgcgttgcgtcacattaacaaatcctttttagttgtgttctaaactatcgcattcatctagagggagaagaagagtcaaaggccaattaggtttctggaggtggtgacgccgccgtcgacgacgaggttgtggccggaaatgtatctggagtcgtcgctggcgaggaagagcgccgcctcggcgatgtccctgggtctcagcgtcgcgcccttgagcgtggcgaggcccctgaccacctcctccatcttctccacctcctggtcgctgggcacggcgatgtcgaggtcgatgtcggcgtcggcgtcgtcggcggtggaggcgtcgtggccctggcgccaggcgttgatgagcatcggggtggcgacgccgaagggggagatgcagttgacgcggatgccgtgggcgccgagctcgcaggcggcgttcttggtgagccccacgatggcgtgcttggaggcggtgtaggcgtgcgggccgaggccgccgagcacgccggcgacgctggcgacggagatgatgctgccggcgcggcgctgggtcatggcgagcgccgcgtgcttcatgccgagcgcggcgcccagcgcgttgacgcggagcacgcggtcgaactccccggcgtcgaacgacaggatgctcttggcggcgcgcgtctggcggcccagcaccccggcgttgttgcacagcacgtccaaccgcccgtagcgggccaaggggcgctcgacggcgcgctccacgtcctcctccacggacacgtagcaccgcacgagccggacgtgcggccccagcgccgccgccagcgcgtcgcccgccgcgtcgtagatgtccgcgatcaccacctgggccccgtgcttcacgaacagcctcacgatcgcctccccgatccccctcgccccgccggtgacaatggccaccttcccttccagcctgcacgccaaaattccaaccaccattaacaaacagctccaagaaaacgacgagacgaacaacacaacagcgccatgagtaatttgtagtagtagtagcctacctcttgggcatgggagtgggggcgccattgggggagtcccaggcgtggagcgacggcgccatggacggctggtgcgccttgtcagggaggaggtcgagtgcggcggcaggcatggcgagatcctgggcgtaggaggcgagggtagtgtgcatgtacgaccctgtcctagcaagtgatagtgtgtgcgcctctgcaggggagaccggacaccgccttatatagcccgttggggcgcgcagccgcgcacggcttccctcccccgtcgaaagcgacactgcgttttctgaccacaattccgtcgacgtgtttggctcagctgccgcgcgggtgcgcgcgcgtgagcattcgtggaacgcgactgtgcgaggcagcagcgaggcagggagttgtctcggcttcgtgacgggtagaccgagtggcgcggcacatggttggagccggtcgagttgaccgccacgggtgcgcggttttttgtttcggtcaggatccgggaccttgacgctgaaaaagagttcactctctagtaagcctataaaattcatgaaaaaatcattttaaaaaagtccagtcaatttaatttcgaaacaattgaaaaaacaacatgcactacaaatgggtcgttttttttttctgttgttccttggcatgcacatttcgaaatgttttttgcgtggatatgggtcggtcggaacgggcatgccttagactgaactttaggattgaaccggtgtggtcgtgtggaagattgaggcagagcggatcaagatcttttttggaatttttgtttgggacgtgcagctgcaggagaggtaggcttggtcaacctcactgtaagactcgagaggcgttgttggcgtttcaacttggctcccacgatttccagcggtagtggttgccgatcggaggcgagttccaactctttcaacctaaatataggcaggtagatttgttcccaagtgagggattaattagttggagtattaatagaatccggagtgtgattgctgtaacaccatcctaattgcttcacggaacaaatcagcttcatgccttttaccaagttgtcaccaaacaagtactacgtgcctaggtcgatctgaccgtgcttttttccttgcccaattggatttcgtgcttaaggtagagtttgaatcagctacttattttttatggacacgcttgcagaattaataaatagagcttcagagacttactcttccattctaaaataagttaatttctagattttaaagtttatcacaaaacaagtttatttctatgttcttttgggttcataaatcaataaattttatcccttcaatattccttaactactcacacaccaatatatttttctattaatgagagatattttggacttttatcattgctgctaggaaccttaacgtttgacttgtaaagaatccccacaaaatttaaattttaaaacataattttctactctctttattttaaaaagaatcaaattatagggaagaatctggatacacattgattctttttggacagagtgagtagttaattctaggtatttcaacatagttttcttttccgcttttaagtagttaatcatagatatataaaagttttactaataaattatttcttagtcactaaaataaaccattttggtatataattagctattggccaaccaataggactgtgattatttttagagaaaaaaatctaagaaatatcattcacaagtgcccaattccaagaaatactatcgataagtgtgagttccatgaaatgtcattaccgtttccgtctatccgcgccgttaaatacattgtttatcctatagcacttaacggatggttgctaacagaactctaatggtgacggtatttttgggataaagtcgcttgcacgatggcatttcatggaactcacacttgtcaataatattttttgaaattgggcgcctgttaatagtatttcttggattttcttttatttttaagatacgaggaattgatttattttaggatagagttaaatactccctagaagcttttagagtgaatcttttttaatctttctgtcaggcagtcttgtctattaaagtgtaaaagttttattctagatttatttgtcgttgctgtcatatctagttggggggtataggagtaagtcgcaggaaaaaaatgcattcccctgaatataaccgtggacgaccacgtttaatatatatgattaattttggatggctaccagacttcgttagtgtggctgcttttcacgctgtcttttgtcctgatttttgccaaagctttgttatagtataaactactccactaattaaggatatggtattgtagcctttcatttttgttatgctgcatcaccctgcatctctcaaatatataaacaaccaaccaattaatcacatcaccttttctgtcccaaattgagtacaaataattgatcatacaggtacctcaattagcattggacgctgtgcttttaagacctaacagtgccatcatactgtatctctcaagggaaaaaaaatagtgccatcacatcgggcataagcatatgaccgtcagaccgtgggattagacacggaggcgattcagctgcaaatgtgtgaagatgatagagtgcttatgaaggttgcatgtggtaggcttaagacaacggtcatcaactctttgcaaactatggatggagattcacaaatagacttgaataaatgtgctcttcttattttagtttgatcttttattttgttgggtgtgtttagttcatttgaactacactcagtgtttggatgttatttttgtaataattagttgtagctttgatgagcaaagcccggaatgttttattccgttatctaaaaaaagacacagaggcgatattgaaatgtaccattgatctgtttacttttctttggtgctggtgcatgatatttcagtactttcgatccgttctataatatttacgttttattaatgttataattaaacaattagaattttaaatatagatacctttaaaatattgtttctgaagacactataatatgatatacagatcaatcttaaaactactttataaaattaaatatttacatatttttctatataataaaatatatagtaaaaatatgttctgaaaaccgtgtcattatctgaaatatcaatatctactattataaaaattgaagatgtttttaccggtatttggtacgtcattcgtatttgagtcgggttttaagttcgtttgttttttaaaatatagatccgtgtttgagttatattttaagcttgttaccttttggaagtataaaaggagttttatgagaaatatattttaaaaactcgcatgctaacttcagatgaaagatggactcctaattgcagctcatgattttctgaaaaataaatatccaagtcaattcccacaataaattttaccctagctaaactgtataacaataataaaattaaaatagcatttacccgttgcaacgcacgggtattttttctagtaattataaaaccaaagaaagtagtttaaactttgtaagtggagtccactagtatatgtttacttttcaaagataatatccatatatgcatattttaacgttgtgtgaacgcatgcatggtgatagagtctagggatggtagtgggtcgg

SEQ ID NO: 5853 - DNA, 38751 bp, Oryza sativa
tgcaagtagctcatcaccatcagtcaacaagttttactactaacggtagtaacagccttaataacaggctaacagcggatcgaagtgcaacgcagcgtgtattgcacagactggccagccggtcacggtgtacgtccactctgatcagtgaacgcacttagtaagtgtaacggtgaaagcggtagattaaggctcacccgacgactttcaccacggttgaacggagacattttctgatggttgtactgctcactagtcgcttctaccccgtgtacttgtacattaccgtagtacggtgcagctccgactgttaaaactcaaaagaaggccactcctcagtcctcactgtcctcggcaactcagatcagcaggggttggatggtcaactttccccacctcctctcctcccaactttcccctttgctacagtagctccttcttcttctccagcccctcttccccccaaattccggtggttcgccgccgatgatggttggaggaggggtccggccacctcccctattagtatagtgtagctaggttgtagtttctttgtcaggtttttcctgtttctgtggctatgtcccgtttggttacgttcaagcgaagagctctgattgctggtggtgatgattaccggagttggagctgcgacttgaaggacagaatcttcttcttatgctggtgccgaactcattggtctgcgccgtgtgcagacggcggttgccttggatctccaggtggcgctgcttcgtacagcggcggcggcggccctggatctctgggtgccggtgctctgtgtggtggcaacggccttgaaatttctggcgatgttgctccgagcgacaaccttggcagcccaagtgttgttgctctgtgtggtagtcttcaaactccaggtgttgttgcttcttgtgatagccttggagctcttcgtactactgctccgtgcgccggtgatatcttgagctgctgcttttctacaacggtgaaaacattgtgtgggtatggcatcttatttctccaatctgaaggttacttcttcgttgggagcttgctccttttcatttgttgtggtccgcttcagttctacaatcctgcagcaatcctcggccttctacaaagacagaagttttatcaaccatatgatttctcgtcatgtggactacctgttctaccgaatcttgcttccttttgcttcaaaacaacagtatccatacagggtctatcattcgggttgagcaatctctgctcctcagatctaatgaaagactccatggaaccaacctgctgagtccggtgatacctacaccaaaatctacggctcagaaacaaacctccgatctgtgccgtttccgtggtgacagctgtaggagccttccagtctgtcaagcggtgtgcatgtcaatggaggccaaaggattcaatcgtcgtggctttgctgcaaaactctgttgatctgatttcctactgttgttttgtttcatcagaaagtttgcttttttagagtggttactctctaccttgttaaaaatggtttcttggcttaagttgtatctttatgtgatgtattggggtatatcccctaaattctgtctttttgaataaagttgttcatgttatcttcaaaaaaactcagatcagtaggaagaaggaaagcccaaggtgaccaggtcaggtccacatcacgggaagtggccttcggggaaggtggcactcggccccgtgccctccggtcgttgcgttacagcgggcacacgagtgtgagaagccgctagcgggggagggagcggtcgctacccagagattcggccgcacgcaccgcagcagcagcgggtgcggggccaacgccaacgcatccgcggcaccatgacgcgctgcgtcaccaccaggattcaggcccatcgatcggccgtgtcacgcgcgcccccacacacacggggggcagtttcgtggctcgatctcatctgattctgatgaatcgctcgcgtcgcgtggggtggcgctaccgcgtctgttggtggcgtggcgaccgggggaggcttcacctcacctgcctcccggctcacgctgcaacaactgcatccccatccatggaccggtcgggagcacgtagtacactgcagtgcgctgtcagcgagggaaccaatgcgagacacacacgcgctcgcactggttgttggttggttacgtggacgtgcgcatgttgcagataaatatatgcgcggctccaagaacgaaataatatcgggtggggtaaagaaatactactggcatgggcgcaagcttaggcatctttttcaaacaacgtggaacttgctggctaaaaatttcttctccggacgcaccagcttgtttaggttgtggttgtgcctcaccggtttgacaggaccatgttcacgcatgccgcagtgtgattttccttttccaattacacagaatgaagcatacgcttgcacactgtatctgcgtatatgtatcccacatacagctgaaaatatgttttctaaccaacgtgcaaagagacagaattcatagcaaatccctgaccttagtaacagagggaaaaaaataaggatggatacttactgtgaatgtactatatgagctcgttttactgtgtcattcggaaagcaacgaaaattgttaacaagagaattgatctctgactaaaatttgtcacccgcgactgcttttgcctgttttacagagccattttggcttaacgtcaattcttgctttaccaattattttgtatcattgaatagcactttgtagccattaagattgaaaccagccttagtaaaatctattgcattgaggtataatctactttatcaatattttagtggtatcaaaaatttgtctatgatttagcattactaacattttagtagagcttcaaatcaaaatggtctgcaatgtccagcacttctcaaatttataatggtgtaaattgttttctatcgtctatgccatattagtggaagcagccaaagtagggatcagctaacagagaaaaacaaggtcgcaacggttctttgaatcaaatgctatatttttcacaattattactctgcttctatccaaacaagtcgatttcgaaaacgaaagaaatcaaccatgttgttccactttaccatcagaatatcacttgttgcttttggacttttgctagcttcccttttggccttttatcccgtgagctctcttacctttacggtttgttcataccgcggatagcgagcatccgacctggattcaattagccacgtcaagccagtaatatccgttcgtttcacgggcgcaaatctttgcaggatatttgatgcgatgcctatcacgacagtaatagcggcgtctgcttgcggctcggccaaaatggattagatttcgatttctctgccctgtaaaagtgtagaatagtagtgcgacttccaccatagcctctcaaagttcagtcaacaccaaacaccttgcaaagccgccgcaagtgatgtcgatttttcagatttgatactacttagatactacaaatctaatgaagaaaaacacacagttcacttcgaacagatgcagatcctgttactagcgcagcaagtttagcacaagcactaccgaagagcagactttccattcaacgtcaagaaggaactaatcatcaatttcatgaaaaaagaaaacatgcagaaaaaaattcgagcagaggcagttcctgtaaaacctcttgtcatttacttgcgcaactacatcacatcgctgatcataagtggtcagctatctcaaccaatcgagaacattatcactgatgagtgagtgattcagtgtcagctacaaatagaaaaacataaagaaagccgagacaagacacgttgacactgtctttctttagaacgacgcagcagaagataatcccatatatgccgttagtgcgcgtcctttcccactaatcaactcacaaatctgcattttagatcgcttgctcgatgcaggctaggaacggcacgcacgcacgcacgcacggcctcgtcacatcagctcccctgttccccctcgtcaaaaagctcgcctactcacttgcctcattgcctgccaagtaataaacgaggagtctagcttaatcgagaaaaagtaattaggtacgcgatcgaggctgctggtaacatgcaagccagatttctacacacgcatcgctttcgcttgttaggtaaagctccgagatgagtatccaaagtgccccataagcatcccattagccaattaaggtcaagaactgttactagtaactctcgttgggggtgggggctactcgccatcgctgatgaatttgtgtggtgatgctaaccttggatcgtgcgggtggtgggtggccacttccgtttttccaaatttccagtggcgtcaccacgttcgcgatatcgaggaagaaaaatatatgcattatgttcgtcgtctctgcgtcgctcgcaccaacctccactttctctgaagatcgttgcgccggaggtctggatcgagcagcactgcgacagagcaagacatggacacatggttgatgattggtgtcgcggcgtttgtcaccacagaagaaatccttctttttttccattagctcggtgaaaatgttgggccagtttggtttggtgtcctaccaaaatcttggtagtatcaaagtttaggcaacttttggcactatcaaatttgggtggataaattttgtactatctaagaactggtgttggtaaaatttggcaccaatccaaacatatagaagcactattcaaaattaccaatgaattggtagggcataatttggcaccaaaccaaacaagcccgttgtcgtgcgtgcatttgcgcgcgcgtgtggttgagagagaggtcggttgctagatgggcacagtctgtttcgtgttgctgaatgctgtaattaggtcggttttgtctgcatcggttttagcctgtagcagttaaattggccgtcagttcaggctttcagttcagcattttgttgacaatatggcggttgataggtcagatggtcggttgacgtcggtgtaagcagcgaacagagtaccagacacgtgaaatctctgcacgcccggtggatgtgtgtttagccttttccttcgtagcactagtagtactagctagaggccggaagtatgtggacttacatggtggctgtattatttttggcacgttgcatagcattgccattgttaaaccatataacaatattgtgaatggataaaatctgttcacaccatatacttcctccacttataaattatttggtgcttagaacaaggattgaagaaactttttaaaactataacaattcactatatataagattaactttataaattttaataaacttatgatactatgatagtattttacaagcgaatcttacctatattgttccttttgtttttaaattaagtaactgagaaaatattgatggttaactttttaaaaagcttaaacaagtatagtcttaaacataaaatatttatggccggaaggagtagcctatttaagaggaagaaatttaacacgaaattagtttaacccaccaattatgctgttaatggattttgtcttgtcttttttaaagaaaacaaaaaaaaactgtcaggtttctctttccactctccataaattttggattgattcatttttttttctgtacgctacacatgtacactcacgaacgagtgtgctctcccattaacataagctcagaaagatgaaaaacaatgcacaatctttgatatcactaacattcttttaatatcacacttcatattttctccattttgtttttcttaagaaaattataatttttttttcataaatggatgctctaattttcagattgccatcatatttgcctagttgctttcatattattggattcaagtgagaataaaaaaaaacactaggctcttagggcacctctaattttgctgcgagacatgcgatgagttcgattcatgcaagcaaaacacaatttcggctcaatctctgcatcatagtgatcgatttgtgagattcacgcacgtaaagaaaataacggtccccctacgtctgcctcccgctgcagcacaaccggatggagaatatttatattggcttgtgttcaacttcatttttgaagttgatttttcactggcagtctggcacacatcattcgactcttacggtgtgctctgtttgatcttcttttcttttttgcaaatgcttgattggcctcacattggatctgctcttagaattaaggaatcagtcccgttaaaggctgaaaaattatccaaaatgccgtttatgtgctttcggtataattcatcaatgataaaatcagcgaactcagactatgggtgggcttcggtttcttcggttttctaaaaattcggttctcaacaaaaccaagcggaattgtttgtaacaaaaacataaactgagccaaattaacataacttactcggttcggtttgtcagtttattgagtaagctgaaaaaatgtactccctccatcctaaaatataacaacctaataccggatgggacgtatcctagtactacgagtagatagggggcatgttcaaaatttatagtattagaatacatttcatccggtattaggttgttattttgtattacggagggagtgcgtacttgttctaccatgccgtaggctgaagtcctgcaagtagcgtagcaacatattgggccacgttggtagtcagatgggctgcataggctatgggctgtaggggttagtgagagatggatggtattaatggattttttttccattggtcaaaggcctggacattgtgtttttcacgtaggggaatgggatcatagaaattgatcggtttgtacgaattttttggttgttagagaagagaaaccgatggaaaagccaaagaccgatatataggaaaaataaaaggttttcggtgattttatgtccaccccttcctcagacacccccccaaccccaccgaaggaggaaccgactaccgatatttcggttcgattcggcctttggtttttcctcgttaggctaggggcgaagctagaacgaaatgagggagggtgcctcttacttaatttactttactttaaatcaagtttaagttgatgcgggtgtctaagtttacaataagagaggtgtacacatgataaaaatatgtgaagtatagcttaaaaaaatttctggaacccctccatactctacctccgcccctgcgtcaggccgaaataggtccaatctgagcctcaactcctattcggcccttgtgtccacacagatccagacatgtcacagtgattaaaaggcccatggtgatggcccagtagccgttatcacaacaatccttcccggcttcccgtaccgtcacggatgtcattgctaacctcgatcaccccgtgtctaattcaatttcaagcgaaattacccgtcctcttttactatcaaacaaacgaatccgtatgtataaaaaccagctaatagtctaatacaacctgcagtacgtgtagacgacgaccttatacgtatcatagaattaatactaccgtacgtatcatagaattaatactaccgtatacatggccacggtgtagctagggcgcgcgtgctgctgccgctgccactattcctggtccatttgcatcagcgggggcacaggcggacgcatggcggcggggtggtgctcgccgctgtacgtggccgacctctccatgttgatggctgccatctgcacgcccagcgggctcgcgccgctcagcgccgccacggcgtcgatcttgggcgggcacgacatgctccgcgagtgcgccgtggcggtggaggcctcccgcggaagcggcaccagcacggcgcgcccgtcctcgttgcgggcgccgtggaacacgaaccggtcgtcctccacgtcgtagaagttggccgtccgcacctcctgcgccagcgcgcagctccagcagaagagccacttggcgcagtcgctcaccgccgcgcggcacgcgtgcccctgtccgccggcgccgcactcgcacccgcacccgcagccggaggccgggagcttgtaccgcttccgcatctgcgtccgccagaagccgccgtagaggaagccgcagaggcccaggagcacgcccacggagacgacggtgtcgcggatgtcgtcgtcgtggacgttgagcgccgtcacgctgaagatgaggaacggcgcgacgcagagcaggatgaaggtgaaggcgtgcacgtacatgtttccgaacccgagccgctccatgttccacccgaacacgcagaacgtgcacgtcgccgacagcgcgcacaccgtcccgtcgtcgcagcagtcgaacagcccgccgctccactccgggctgctcaccaccacgcgccggttgtatatcttgatctccacctcacggtcgttctccgccggccggtttccgccgccggcctgcgccgccgctgactcctcgtcggaatcctcgtgctgcttccgtcccagcgggccgtacgccgcgtagaggccggcgatgacggggcagccggtgccaaggccgtagccgatgttgagagcccagtccggccgttccttgcgcgcgtagctccagaagagagcgcagcagaagtactgcgccaagcaggtggcgtgaagcagcaccaccacgacgagcatgtgcgcgcggtcgtgcggccgcggcgcgccgtccttgcagtacaccttgcggatctcctcgcggtcggcgccggcgccggggcgccaccggaggagcagcacgaggtggtggaagatcttggggtgctggtacaggcacatgatggtgaagagcgcgttgaggatctggttgatcacctccgtccacttcttccgctgctcgtcgtcggggatggcggagtcgagcatgccggtcatgagcatgaacagcatcagcagcccggcggcgacgaacgccagccagatgatcatggcgaagttctcgggcttcctgcaccagctcaccgcgtagctccacagcttcccccacttgatcttcctcacgaacggcacgcggaaccgcctccgcggccgccggcgaccgccgccggagtccacctcctcgtcatcccccgacgccgcctggccctggccccggtggcggaggcggccgacgaaggttgaccggaggaaccagtccctggacgggtgggcgcggaggaagtccaagaaccgccgcttgcgcacgctccggctcagcgcgcccgtctccaccgtcgggatgtagatgggtatgaagtccatcagccgcattgtcgacgacggcgcgccgggctcgccggcgacctcgacgatctcatgcccctcgccgccgtccgggaccatatctgctcccggctcttgttccagacagcagcgcgcgcttggagacttcagaacagcatgtggtttgcgcgcgctaagaactagcgcctgcaactgcaaagagtttggatacgtggcagtttcttcgggtcagtagagaagtcagaagagtgcaaaaaatgtcaacacagtgcagcacaaccagaatgaccaaatctgtgctcgtctattctgactgaccattgctttgacggacttttgaaacaggattaattaatactcccttcgtctctaaaattttacgtcgttaacttttttttaaaatatatttaactgttcgtcttatttaaaaaatttaagtaatttttatttttttctatcatttgattcattgttaaagtatttatatatacatatagttttacatatttcacaaaagtttttaataagacgaacaacaaacatattttaaaaaattaatagtgttaaatatttagaggtggagggagtactactcgtacttacgtctgccacaaggtcaaacatggttgacctacttgtttaatggctaggtgtaataaatttgattatctaaaaggagtagtaattctatgaccagaaaggcacaaattctctcttttttacttagggcttctttgattgattggaaaaatggaggggaaaaaagtaagaacaggaatcctataggaactagtacagttcaaccattaaaaactcataggaaagacatagaaatatttcttgtgaccatgatttaaatagaattctaagaaaattaacatccaccttaaacttattttttttactatgcgtacgatagaaacgaagcacgattggaagatatgttttactttttcttgaccctagattgtatggattaaaaccatctggtggtcctttggaacgaagggttttcacatgatttttgtgggattaatgatcctttggatctgccactgttcacgtagaaggaattgctcaaacgaattatggagggatattatagcattaccatgaaaacgcatgaattcaccgcaacctctagctagcataggatagaagctaaatcatatgttcaagacaaccctctgttccaaacaaccagccctataaaattcctttgtttccatgttgatcctatcatagtcctacatttcctctattgatgtgtgtgtttttatcctgtatttcgaattagccctcaaaattttatttactgttgatttaatacttaacattcccatgttttttctatacaccatcaaataatcattcatatagtttcctgcgtttctttaataatatgttttgcatacgcgtgtctattcatatatctttattttaacatgttttctattcaggcatttctccagtaaggtgtttcaaatattagtttatagtgtctaggtatttcatccagagctattgataactcttatgttattctttccgagtattatgcacaaatatatttgttaaatgtaacatctaggcttgtattggtcttgcaaaatattttgctctaaaatatggggttcattaaaataaattataatagagtgaattgtaaaatttggagttctgtatcttggatgctaaacaaaccgagttttgttttttaagttcactctaagacaaatatcgagaggaaccaaaagttgatcgcacaaaactatgtggtgagatagttaagccataggtgcatgacttcacttaatagggtttaaattctggtgtttctgaatattaccacacgttggtgtattttcaaataaaatttatcgttggtccatgttttttttaacgtaatgggcgcatacgcggttttgtgcgtgtaatccatgtaattggaagagaagaagttgaccccactgattgctccaatgtattgaagagggttgtgcggtttgtctgtgatcgtgagataaccagatgtttcatctgcaacacctttgtggaatgtggatgcaaggaccatgactagaaatcattgtgggtcaatctagaaacggatatgatgcaaaacgattctcgattgctgagatggtagtggtactgtgttgggtgcacctcagtaaattggattttatttctgcataggaccacggcgaaacatactacgtggaaaccgggcagatcacagtgcgtagtggcagtaatgttctgaacaatacgctactgctacaggaaacataggagcctctagtttactcgactcatcaagaattcaagattcaagaggcatccaaggcatgttcttttggttatgattccaaaaaagagaaaaaaaaaactctgaagagtctgaaccatctagaagaaagcacaaagactactactaccaactagtaaaagctaaacacaacttggtttgggttgtcagccatgttacttgtagcaaatgtcaccatatgcaaggatttttccctcctgtggtgggcggctgaatttacaagtactggtactttgtttaacaaacattgggcgtcactatcaacatggtgctgagccaacgatgtgtaggactccaaacaaaatgtagcgagaaaagaacgtcaaaggaaaagaggaaagctgaacccaacagcggaagcactcagcacggctccacggaatgccaagaaaaatctaacactgctaagtgctaacggggtcgctgttccaaacaggtttcgtttggaaacagttacgatcagatttcagttaccaaatcaaaatgacggttttatctactaaaagatagtagcagtagtacagtggttgcaaaatcaaaccaccgccgtgcctaggcctcgcgtactactgaaagcgctgcttctgttcaggcgatgatcggtttgatgatcaatcgcaagaacaaatggggacgattaacattgccgttagaaaaaaaagagtagaaatggagaaaaggctagcatgcagaaaatcgtaacaagaacagagtaaccaatccatgagatacaaaggttgagagcgaattcgagaactaaaggagatatgaataagatagaacaaattgcagagcgcatagtatagcagtatagcacgtacctgagctccacgccgacccatctcctccaaagctgcatctccatgaccagcctgaagaattccactggtatgcaagttcttccttcttttccctccaagaatccaactgtccaaggcctccacacctctactgcctcttgatctttgcctagctacctcacaagagcaggcaagcggttgaagaggttgtggatgctggaagggaacagatgggtgtgggcacggttaaattccctggttttccgaggttatttcgatttattgaccaaaaggagtcttctttttttcgtgttcagaggggaagctgggactgggaggagaagaggacgctgctcgtcaggaagtcagagaaggcgggtggggtagattttagacaagagcaatcaggtttggggctttgaggctttgagcatcggtcgcggaacggccttgatttttccagggtcatcgatcgaacggtccgaggacgattggatcaggtcgtcaagcgcgagatggcgatacctgataagaatggactgtagtccctacctgatagacgccatgagatgatgagaaactccaaagtttgctgcgagagggtgaaaccgaggtgcgatatagtgatgcacgggcgacgggaaactattctattctaaaccccgagggtagggatgaaaacgatacggaaacgaaacggacagaaaccatctttattattttcgttttcatatttattttttcagaatcgaaaaccccggacacgaaaacagaatcaaatattatcgaaattaaaaacggagcgaaaatgaaccggtgcgaatacagtaacgaaaatttatcggaataaataaaaccccttaaactaagctttacactgtaaagtcaaatccttaagtgtcaacagtgaataatttatcataaaacacagttatatcatgcccagttattaaaacttaatagtacatcacaaaacaaaatctataaaataaatgatccgtgtttaagagataaatacttttgataaataaatacagccaaacaccatggaggcaaaaacggcgagaggtggtggggatggcacgagatggcagcccggcggagacacggcaacgtgagatctggatgcgccgctccgccacccaactcgcagagtcgtggtctctctcgtcctctaagtgtacatatatctctcttctctctaagtctctagggttagggtagtctggtaggtaccacgaattcggttgggctggagaagaaatatggactattgtattctattggcctttgtaattttggaaattccaacaaactattcggaaagtttctgatcgtttccgagctccaacggaaactgctattatcatattcaattccgttttcgagaaaatattttcgaattcgattccgttttcgagaaattccgactagctgattctgtttccgaaaacaggctcggaatccggaattgtttccgtaccctttttatccctactatgatagatatcacttattgtttgcatgtcactcaaatagttttgaatatttttttttaaaaaaaaacttgagaagtgcataatgtgatatactccaaaaacatgtaacttaaaattcaacttctacatgttacaagaatcataccttaactatcgttaagacatgtataaattgaattctaagttacatgtttgtggagtgatatatcacatgttaatatatctttttaatcttttaaaaaatttataactatttagatgtaataaaataacgagggaacagcaaagcaaatcagcgggtctcaccgcggctgccattatcaagcagagcggtgggccgccgaaagttgaaatgccgatcaggcaatttgatggccatatatatgcccactgccttgagctcgtagttgctgaggcagtggcttgcaccagcatggaagcacgtagtacagcgtgagctccgggggtatcgcgtggccagcgaaaacgacgcgcgggcgcgcgccggttgcagcacacggcacgcgggctcgcttcgttacaaccacgtcacaatccgatccgaccattttttttcatatatcgatcgtggctgtccggttcaccgttcacacctcctcgcttcatcagagttcagataaccggcccatttgtcgatgtcacacgatgtaaattaaaattaaccagctgttgttttgttgttgttgttgttgcgtgttctacatcaacggtacggacaggcagaaatgactccaaacattgacgcgtagatcatcttgtttttctcgttctaatgatatataggaaacatattatatgacatcacagaaccgaacaaggggagattgggagaatgatactgttgatacctttactgtatctcgtacactgaaagagtgcacgaaacatgccctggtcttcctttcgaccaaaggccaacccaacagagcctcaagtcatggcacggaaaaaggaccaaagaagttggaattttttaaatttttaatatttacataaatattatatcggtgaaaaaatttataaaaattgaccctggcgccccagtggaaccagatgtatcatgtttaaattctactactatttctttacatgacataattctccttgtttctgtgtatataatgtttctatgaccaagactacgatagaccaatatcaatttcgtacactaatacgacgaaaaagttacaacataaactcttacttaaaatatgaaattgcaaaacaaccaacttcaatacaatttttaaaatattattaacaagttttaccaataaataattttttaagtgttatcaacagagcttcaatacaattttgctagtattttttttatctcggccccttgccgcccacagatgaaaaaaaaactagccaaatactttttttggcactgaataattgcatttcactccttgcaacaccagtagtctaccacgttagcttgccgcccaagtgaagggcggaagggtctatttttgtaaatatttttgttgatataatatttctgtaaatattttttaaaaaattaaaaatgaaaaaaaaagaagaccacaaagcaatagcactactagtctactactggtgttgtgaaatcaaacagtagctttgccttctatgggggacggaccgggtctttttctcttccttctttcaactgttttttttttctttgtcgtcacactcagttgatcaatgatcgttcactatagtgatgaaaatagttgaaaaaggtctcaaccattttaataatcgtattttataaaaaaacaaaatcaaatatggtaaagtcagaagcgaaaacgatattagaaatatcggaaaactggaaacataccatacagacggaaacatatcggtattgatcggaagccaataataaatatcaaaaatattgaactgtaaaatcgtatatttaacttttcactatataatatgatgaaataaattcaaagttacgttaagttataatttgtctcttttaaccttacccaaagttagagatttagctgagaagttgatagatctctaaactatggatcaaataaagaaatagactataaatattaattaccataatataaaaaacaattattgccataagaatgtggtaaaagtcgagaacagtcggtatgaaaagaaaattccaatttcatattttttaccatttcccttctcgtttctatcggcaaccattttcacgttgctcggttggtaaaaatggaaacgaagcgtcggtcaatcgaaacttttcgtgacaatattcagttattcacccctactcactagcacgtgaatataacatggctgtgcaacaactcgaaagatggatgggcgggtggctattgctactccatcaatttcacaatgtaagtcattctaacatttctcatatttatattgatgttaatgaatccagatagatatatatgtctagattcatgaacatcaatatgaatgtgggaaatgctaaaatgacttacaatctgaaacgaaggaagtacttgctaagggtactgatcgccgctgctctcaaacccgtcgaactgagctgcccggcccgcggctagtgcacagtccacccatggtttggttccattatttggacgacacaatggggagtgacctttagtcctttacaccattatgcttcggaaaaagtccacttagactcccttaattatttaccggatctaattcgtgacccttaactagaaaaccgggtaagacgactccccgaattagtgaaaccagtgcaatttgacttctccggcggtattggagggtggttttgctgacgtggcgctgatgtggtggtgctaacccggtcttcatgccacgtggcgcttacgtggcattagagttaaaaaatatatatatgggactcatatgtcattcaacacaaaattattgtgggacccactgacacgtggggcccacatgtcatccttcatcatttcttcctcctccctctctctcccttctctttttttctccccattctctctttcccttccagatcagcggtggaggcggccaggggccagagtggcgacggcggcgcgcggacgagggctagagcggtgacggcggcgtgcaggcgacgaccgtgccaccgcctgccccgtctccaagccggcccgccgccgctcccactccaccccctctaatgcggcgcccggtccgacccgtgcagccgacgacgtgggcggggcgttcgggatgggcgcagttaggggctccctcttccactttctcaagggcacctacaactcccccaacagcgagtgcttcgttggcggcgcgcaggccgtgcggatgaacgcggcgggtgggtgacagctttgcggtgtggggcgacctcttctccgccttcaactgcaccatggttttcatgcactagaaggaggatctgtggaactctatcatcgccggcgccgccactagcggcttcctctccatgcaccatcgagggcgccgggcttatgcttaaccgcgtcctcgcctctccccgtcgatgaccccaacctcgccgccgccatggccccccggccgtgtcacgccctgaagttcccctccttgctttaaaatttgttaaataaatcgtccgaagaaattgtttaaattaacctagagatgaatccctaaattaataaatgcaactaataatcagaatcggcatgtggaatttttcttggattctacatgtcaaaatatgctaacaggatttagtggaatttttcagagctcaataaataattttaaccaattaaaaacattaaaccacaataaataatccctggaaaatccttttttttttcttttctcttctttttcttcctttttcctctctttttcctcttgttgggccgtcggcccacttcctcccgcgcccttcctccttcctgggccggcccaatccctccctcctctctccgggtcaccgacaggtggggcccacctgtcggccccttcttccacctccagccggcggtggcaaccgccgccgaaaccgccacgccaccgccgctttccccgctcctcccgcgcccactccgcgccccacgcccctccccacgtcgccacccacgtcccgccgtttcccgccctcgcgcgcacccgagaaggggcaggattcgattcgaatcctctccccactctctctccccacctccctcacgtcggcgagaaatccggccgcctcccggcctcgtccgcccctcccgagcccatataaaccatccccgcattctcctcctccttttttctttttccatcggccgctcccgagctctccaccgcgcccgcaccgtgcgcccactcgccaccgccgtctccaccgtttcggccgcctctagcagccgctagggccgccgccgcaccacgccgccgccgtcgtcgggctcgcgcggccgaggtccgccttgtccacccctcgtccgtcgcaatccgtcgccagagatcgctgtccacctcacgccggtgagcaccactaccgccaccttcggccatggtttccgcccgccgtgtaccacctctctccctctaatccctcccatcttgttccctaggaggtctcggagctcgtccgcccatcgtcgccgttccccggtcgctcgccgtcgccgttcgccgtcgtcttcccccacgccggccaactcgcggtgaggcactcctcccctcttttccccttcctctccctcctagcgccgagccgggccgagccgccgcttcggccgtgcaccgtcgccttcggccgccgccgccgcctcctgcgccgccggttgccatcgccggcgaccgcatgctgccgccactagccatggctagccggccggctttggagccgagccgcgcccggcggccgcttctcccgccaccgcccgatcggctcggggccgatctgggccgtcggtcccgtggaccggcggtggaccacccgcgtggtgccggtccacgatggaccggccccttgagccgctaccgagtggggcccgcatgtcgacgcacccctgatgacgtcagccctgggatgctttattgcgcaataaaatccattaaggccttttcttttatagtaaaaacacatttaatcttctaaaattcatatctaattcatccgagctccgattaagtccattcaagtctcagtaaattcataaaaatgcgtagaatccattaaaaatggttttgtttcctgtttcagtagacttatagtgtgttttgcttgtgttctttgtttgtcgcgtagatttcggccgtttcgtcgatccgcggttcctcgaagacgttgctatggtctcatcagtgcgagagcaaggcaagttatgcattacgattgatcatattgtacccaatttacaaatgtctcgcatttctattaaatattgcattgttttacaatatcatgtgggatgggtcctactactcagccatatcttgtttaccttatgccattgataacttgggtattaaaatgcttagatgttggtttagggaatgcttagccatgcttagttcaactagtacacaatgggggaatcacattaatgtatagactttgattattggcaatagctttggattagtgccaccgcaagggtgttagttaattaaaatacactacatggtgggctgtgggtgcatggttttactagtcgtgcccatggcgattaaggaccggtttgcgggatgccctgaaagaatttatcgtacttaccacaagccagcgtgggcaacggctgggcttgtagtgtagctttcttctagccgatgtacccaggcgagggtgggcgtgatggagttgggtcggccggggtgtccggttgatcggcttccggattcaccgtggcacgaaaggggggctgcccgttgcctgctggggacgggggcgaaccctaaggtgtggtgcgattggttaaaggggttatgcgaagggtcctgtcacggcctctttccggtatgtcgtggtggcatgtcagcgcacggtaacgtgtcgtggggctgtatcttgtgggtacagttgcacacctctgatcagagtaaaactattcgaatagccgtgcccacggttatggacggtcgaccagattcactgtgattagtctcaccctagttagctaatgaactggtgtagttcaggtggttggttgggcctgttgcaacgtgttgtagcgttggacagtgattggttaatattgattaattactaccctgttttactgctttcaactactgttgttaaatgctagctttatgcaaatgagcctttagcctcccttggatatatcctgcatcatacctcctcttccggtatgatttgctgagtacagtgggtagtactcagtcttgctctcttttccctcacaccagagttgaagttcttttcagttgaagatgtctcgaagaagtttgtttcgtcactgccatcaaggatgcctgtggagtgaaatcgccccgctgcaggaatcaagtcttcaggcttaactcgcttttatctttttctgctgcatttgtaatcttttatatttttgtaagacgtggatctgtatgtcaacaattgtcgtttgtgtatcctggctggtcctggacaagggtttaatgcacattcagcttagaaattttggttcgtgaatttctgggcatgacaggccgccgccgccgccgatttggaagggagagagagaatggggagaaaaaagagagaagggagagagagggaggagaaagaaaggatggagaaatgatgaaatgtgggccagtgggtcccacaataattttgggttgaatgacagatgagtcccatagatatttgttttaactctaatgccacgtaagcgccacgtggcatgaaaaccgggttagcaccgccacatcagcgccacgtcagcaaaaccactctccaataccgccggaggagtcaaatttgactggtttcactaattcgaggagtcgtcttacccggttttctagttaagggtcacgaattagattcggtgaacaattaagagagtctaagtggacttttgctcggtccgcgaagcccatatgagggaggaacacaccgcactacgagcgcaccatgcgtccacccgtcttgactaaacaaaacaagcaggcaccagcaccacctgcccggctagaaacgtctgccgattttgtccaagcggagaggagccgagctagacttgcaatctcacgcgtcgttccacacttccgcttttgttctgcccgcacagattgaccgcttaccacccccatcgatccatagctgtagctgtctccccggccatcccgggcaattaacgaatccgacgactaattagcacggcatgatgccatgctggctgagagcaagctcaagagtatagttaactgacagcttcaaattatctatagttagcttaatagtcaattaatacaatagttacctataaatatatattacacaattaatatgtggttctacctatcatacatacttagagtctgtattgcagctggctataaatctgtatcccactgctattctcttttcttttttatcttattcaaatgtagcctctgctattatactgctctgatacatactttctgcttgtggttcagcgaatcgtaggcgagccggcgaaacgagcggcgactcgaccgacccgctgccttggccttgagttttcgctgtcccttttaccattttccctcggtggcaggctgcctgagaccatgccgtgcctgctgctccgacgactgggacgcgagagttggcacggatcaatgcattgacgtccagaaatgattccagtctagacgcagtacataggtgtggcgtgtagaacgagccgttggcgagtagtattagctgcagagaggtattagcgagtagtatgtacgattcgcttccaaatgaaacgaatcttacgaaaatacacggggtgtgtcctcagcgtttggtattggaataagttcattttagctctctggtttgcattgtcctggtttcagaagttgggagattagttgtatcttgtttttttttttacaagggtaggtgtgagtccttgtcggctttctggctggataattattgtaattttatctcacatctcgccggtgttgacactatggctgagtaatatacctccctttccccggaaaaaaaagaatgaaaatcagactaagtgaccaatgaagccacctaaagttgaaccgattttgctaaacatcacacgggtgattttttcgttgatatttgacagatttttgcccctacaattatgcgccgagatcagtacacgattctgcgtcgatgttgtcgtgaggtggagatgagacctcgtaggtcccacgtttgccgctgatcacgattcacaagaaatttacatcctagctacgtgtaaatatcctatatagctaaaataaaatataaaattacagtcctatttaactaaaattgtatatgtaaattcagttgatattaattacaatcctatttaactaaattcacatttgtaaattcagttgatttaacatgtaagtgcactgtaattttgataaaaatattgtgtaagtaaatatgtacttattattttctttaaaatataaaattacagtcctatataactaaaattacatttgtaaatttagttgatttgacatgtaagtgcactttaattttgataaaaataatgtgtaagtaaatatgtacttattattttctttaaaatataaaattacattcttatataactaaaattacatatgtaaatttagttgatatgacatgtaagtgcactgtattttttattaaaatattgtgtaagtaaatttgcattagttattttatttcaaatataaaattacagtcctatataactaaaattacatatgtaaatttagttgatatgacatgtaagtacactgtaattttgataaaaatgtcgtgtaagtaaatttgtattagttattttattttctagtatgttggacgtaaatccaagggaagaaaaaatctgggtgaacccgagtgatgcataggcggtccctgaacaaagtgaacttaattcttttgctatttcgcagggacaggctcatcttaattgggcctgcacattgttgagccggatgctaatggacggcccagcttataaacccaagaaacgggccaccaattttgctcgtgtgctgagctgaaaggcacacatgaattctcacatgaggcagcacagatgatcgcggtattgctgattgctaatccctccttgctttccggggagctgtctcggccatctccaatccaccggaattgagggggggaaaccaccaagggtcgccgcaaccgccacggcgcgtggcgagaggaacacgacgccgtccatcgtttagccccgcgggcacgcgcgtcctcgcgctcgactgcatgtatgaagccaaaacaactctcgccacttgtgccaaaaagccctgcgtcctacaggcacttagcccttgttttcctcctgcttctaggcacaaaagcacgaaatctgccgtcacctgagttcatccgtgcatactgcccctgatgcaactccccctgaccccctctataaattggctaagctactgctagtcgatagtacattgagcttgcgatcgacgtatatatatgttggtgtacttgtgcagggtggagaagcagggcacgtgagcggccatccagtgtagcttcgctgcgcgtccatggcggcgaacgcgcgtgatctggagtttggatggtcgttcatgtgtccgtcttctccaccgagcactggcatatccaagaccgagacagcgagactccgagagacattggtcgagcgagcgcgcgcggcaccgtatcctgcactgtctatgagttgacaacacagacagctgtgctttgactgtctatattcataacactgatctactacaagaaagtgtcatatcttatagtactatgttagtttattttaagatactgttacattttattttaaattggtatatctcatattaggttgatttattttgagagacgattacatcctattctggttggtttattttaggatagtactgtaataatatatcaatatctcatattaaattaatttattttaagactgttacataaaatttttgattgatttatttaagtacagagcgggtaagtaaacgtacacgttgccatgtcgttcacgtttgcaaccaaggcaacaactcgctacatggatcagctcatcagcccacggaaaagcggtgctgccgcgtgggctgctcgtgtagtaggcccagcccatgagtccaggaatcacccagccgtctctctccaaagcctctcaactccatcagcgaggcatccaccagcgagccctttcctaatccgacccgcgccgccgccacctcttcctccgctgcccaagagcgatggccgcctcccccgccgccggggccgcggccgccaccgtctcgtcgttcgtctcgccgtcgtccttctcctccgtcaagtaatccagtcatctccgcgcgcgcgcgcgctcgcgcttcgttgattgattcgttgtgctgtggttctcactctgtttgggcgtgattgtttacagggcatcgaagcccgaccgcctccgtccggcgaggagggcggcggccgtcaacgtccgatgcgtcagcagccctccggccaccgaaacttgtaccgtcctctccctttccctctccctctccctcctagcaactcatttatggttgctcccaaactgctcactgccgcttagtaggtttttgctatagtagttatcgttggaggtgtgcaatcgaatgcaatgagctcgatattgcctccgctgatgctatcacacgcagtttaggaacaaccagaaagttactgatactatcactagcactgtggtagtaagtttactgaaagattcagctttcgttttgaagctttcaagacgaaagtaccacgaaatgccaatatggccaagctgcaagctggctatctgtttcctgaggtttgttttgttccaaccatttcctctctcttctttccctccctgtcttcgttgatgctgttttattgaaattgcatgttgatattggttctttgccaactgtggagcagattgccaggagaagggcagctcacctgctgaagtttcctgatgcgaagattataagccttgggatcggtgacactacagagcccattccagacgtcataactaatgccatggcaaaggtacatcgttgctcttaatataataaacaccggttgtgtagcttcagatgatttatgttgcagtttgtcaagatcgtagttaaatttcttattgaaaaaagaagttcggcattgcatggcacacagttcttatggttcaatgtaaatgattttgtcagacaggctgtgcatcttcctaggagtaaactaagaaatcatcatcttcttttcttttttcttttttttttgcattttttgtattatagttattttttttcaaataaacattgatctttgatgggtctatttgtaaatgcagagagcacatgctttatccacagttgatggttatagtggttatggagctgaacagggtgaaaaggtatgcttatcactttactagcattttctgccaatacatcagcattcagttgacaagattgtacataactattttgcttcatatatgattttaaagtttgtgtagaatattctagaataattggagcaggatagatctttgtgctaatccatgaggttcagtaacaccttatggcatctgctggtgtggttcatcgaattagttttttgaactattaacttcttgcactaatagctgtcacaaagatcaaacatctgccacattttcttgatgagtggattcttacttttcttttactgccccattcaaatatattagtcttgacattgcatacatttcatatagcttcactatcataagccgtttatgttcatcattctgaaattatacattaattttctgcacagaaactaagggcagctattgctgcaacctactatgcggatcttggtattgaagaaacagatatattcgtctctgatggtgcaaaatgtgacatttctcgtctgcaggttctgaaataatcctatcctccctttcagtttatcattcatgctataatgtcccttacatttcttccaattttcaggtcctttttggatctaatgtgaagattgcagttcaagatccatcatatcctgtatgaaaattcttcacttgatgttaacccttcctagtgcatgattccattcttaaactgatgtttatggtcatgtgctccttttttttcatttctatcatactgcttcttattactaactattactttcacacttgtctgatgtgtattccaacatgtgttccatttttataggcctatgttgattcaagtgttatcatggggcaaactggtttatatcaggaggatgttcagaagtatggaaatattgagtacatgaaatgcagtcctgaaaatgggtttttccctgatctgtcaagtgttccacgaacagatataatcttcttttgttcacccaacaatcctactggtgctgctgcatctcgggaccaattaaccaaattagtcaaatttgcaaaggacaatggatccattatagtttatgattctgcttatgccatgtacatatcagatgacagcccaaaatctatctttgaaattcctggagcaaaggaggtaggctttgggatttaagcccttcctaccacatatggaaatttatggattttctgcaaatacttaaatccacacctgtcatgtgttttcttgtgtgtaggttgccattgaaacagcatctttctccaaatatgctggattcactggtgtgcgtttgggttggactgtggttcctaaggagctccttttctcagatgggcatcctgttgctaaagatttcaaccgcatagtctgcacttgcttcaatggtgcatcaaacatttctcaagccggtggtttaggttgtctatctccagagggtctaaaggtagcgtttcagagtttctgaaaatcttcatgtggctcttttggcaatgcttcatttcatctctttgttcctatgcaggccatgagtgacgttgtcggcttctacaaggaaaatactaaaattattgttgacacatttacatcacttggattcaacgtctacggtgccaagaatgctccatatgtgtgggtgcacttccctggccgtaattcttgggatgtcttcgccgaaattcttgagaaggcacatgtggttactactcctggtagcggatttgggcccggtggtgaaggcttcgtaagggtcagtgcatttgggcacagagagaacattattgaagctgcgagaagactgaagcagctgtacaaatgagcagtgatccggcctttatattctcaacctcttggggagccatatcaaataaaaccaagcagagttcgaagacaaaatttactctgtcgggctatcagtagatgttagaattgaaacctaatactttataggcagttgttctgttccgctcggtatttatccattcagagccattttacattctgaacttctcttgttgtttagccctgatgcacctgagtgaatcgcaagcttatttatctccttttgctaagttcgtttctactactctgcttaatttgctgctgccgtataaggctcagtgatatctccctggatgcattgaaacgttaggcacacttgagtcactggttgcaacaaaattaagagtagagaacattgctcagaccaattcagttttctactctcgtacaggaagaaggtacagtaatactctattttaccagactaccagagtaccagtgtagaaagtactatcaaatatgaattgtactcagctacctagatgcgagagaactcattggagaatgaactctattaaccgaaatctatgagcatggagagaagcaaatcgttgacttcttcaggtcaagaacttacacgatcttaatttactgaccatgtgatatgattcccccgaaatatcacatttcccagatctacagctgcaatagtgttcatacggcacgcgccaaaatctaccgagtttcacagtatcagtatcaggatgcagaaattcacagtatcactatcagcatgcagaaattctgccgaagaaatcccacagtgcacttaagtacttaacaaagctccacaacgacatatcatttactcttcgtatgtactttgatagagaaatactcttcgtatctatcaaactgtaaaactcactagaaaatagctaaatcttcagggggacgcttctgtgcaaactgcaaagacaagtacttatatgacatcagaaaaggttgcttacaacaagaattagaggcaggttaacatgacacaattgtgaatattgtcaacaacagtcatttttcgtaatggtgggatgctgacttgaataacagttacaagaatacatcacaaacaagtttacatcaatccacgaataaagatgacagctgacgaattgatgtattgcatcaggccctcttcaatgatttaaacaaacaatggataacgatgaacgctaggacgaaacaggaatatagaaactgaaaagtaggttacagccaagcacactttggagagctccgagcctctcatatgtgacaaactggatatcttgctacctaactaccactaatagcgagcagagaggccgacaaccatatccttctgaaggtaccaataagcacatgaaaaattcttttgagtaagacataaccaaaacacttgtgacaaaagaaaaatctaaaccattcattgaatatcaccggaagaatactattcatcgaataagaaatatgaaattctatagaaatatatagtggtgatcaattaacagagttcccttcactaactcaatttctagaagtgtaagacataaattatgccagcaataaacataccattgttctcctaaaatttcacattacaacatagatatccatcctttgatgtttgatcccaacccaaactcccttgtcaacccaagtctacaaaaagaacacctttttaagattttagacccaaaaggatctacaatgaacgaaataacgcgtggcattgtactctaattatcacttatcacgtagaagtagtcttcatggccttgaatgctgggtggagcaaccctagttcatccttgacatcaagtgggttgctagtctcattcctgatcctcttcaccttcctgctgccaagcgacttgtgtgtaaacccatacatttgcaagatctgattatccccaaaattgaaagcacgctccatctgcttgaggcacctctccacagggtaatccccaaacttcccacacggcttgcatccgacaaagtgagtgaccagtggccaccggtgatcaccaagtcctggatggtaattctcaagcatttcctcatacctatcaaccaagataccccaatatccatggaggtaatacccattctcaaggtacaccttgtcaccccatttctcacgccctgtagcaaggatgtataccatggccgactgatcatcagcctcaaacaccggccgatccttcaagtacttggtcaaaaccttcccggcctcaatacggacagggccctttggtcccattggtgcccatgtatcaaggaaatcaagcgaccattggcagttgcgcagcaagaagctgcctgtgttgaggccaatccagttcttgtcgtcgtagaccatctcatcccagccgtgcatgatgaggttgtaggggccgtaccgctcccatggcagctcgaatgccatgtcggagaacatggcgtcggagtccatccaccagaggaactcgatctccgggtgcgcgaggagcagcgcgcggaggagcgggagcttggcccagaatccggccatctcggcgtcgagcagcgccatgttgtagaagatctcgaggccgtggacgcggcagtagtccatcttgttcttgatggacttgaggaggtagtggtcgccgacggggttctcgcacggcttgggcgaggagcccgtgacgagcagcacccgcggcttgacgtcgttgacgaagggcggcgtctccgggtggcggcggtgccacgcggcccgctgctcgtcccagtcggagatcttggggcccagcgtgtagggcgggtcccggagcgtcctcggcggcgggtccggctcgtcgtcccgctgggccgcgcgcccggaggaggacgacgagccgccgcccctcgacagcgcgtcgtggtgctccgccagcgcgcggtgcgggtgcgagatgaagcggtggcggagctcgatgaggtcctgctgcggcgtgccgaacttgcccgccccgacggtgccgcggagcacgacgacggtgagcagcaggcacactacggtgagcttcgcgttcctcgcgaaccgctggatctcccgcatccgccgctcccccaccacccgctccgccacccacattttgcccccctccctctcctgccccttcctccgatccccccacaccgatcaaacaaacaaataaacaaacaaaccctcctcccccaacccaaaagcagcaaatcaaaaatgcaggcaaggaatcaccggtataccgcgtctacggcgacggcggcggcgtcggcggcgcggagtggtggtggtggtggtggtggtggaggaagaagccgaggaggttttgaaccgcggagttggaggcgaattaataagagaaagggcgaggcggagtggtgccgcgacccgcgagcgagcgaagcgcgcacgttggcctcggagagcggattgcggtggctgtctgagcgatcgggaggcggaatggaaggggaaatctggggagacgcgaaatcggaatcgaaatcgaatcaaccccctgacccggccgctgcaaggaggaggaaggaggaggagaaggagaaggccgaaggggaaggtggtggtggtaaaaggggaggggaatagccagccaacgcgttgcgagatgcgatgcttctactcctttccccgctgtcgcccggtaatttgacttgatcctctcgcgtgggcgtatgaccggtggggccacccgcgtggggccctacgggttttgtatggtaattttctctggcttttttttttgctcggttataaacggggggttaattaaccagtggcggccagttgtaaccagcccaggggcaagcgacgtcgcgaggcgattgcacatgacgcggtgacttttctccaacgtttaaacacgcgtccccatcaacggccgtgccaccacctcgctcaaacgaagcgggctgttcctccgcgtcgctgacgggtgggccattgcgtcgacactgacccacctgtcagtggcgtggtactagtttcggcgatgtagctgccggaggtggagttgtcggttgaggagctaatcactggtgtgtgatggcgatggccataacgatgttttttttaaagattaaagtggacatcagggtatgtaagccaaattactcctctagaagcccagttattatgccttttccttttgtttagtttgggttggtaagtagcgccaaacagtagtagttttatttttcaaccatgtaacatcacattggaccaggtttctctcaaatataatgtactacgcatgtttacggttccgagatggccttccgtttcgggctatgacggaataacgtttttcgtgaaatccgatgaaaaaccggtagatttcgaccaaatttcgtaaacaaatatttgaatacaaatacctagagtttaccgataaacttatgaaaatcggtcggctttggtgaaattccgagtgaaatcatcgaaatttcaattggtaattagaaaaagaggtaactgaaattgttttccttttttaattcgttattctttttttcctactataaattccagtaaatacacggaacacattaattttttcaaaaaattatatcccaataggttctacgaatatcatactatttataagatttttttccttttctatcattcaaataggtctcagatggtttttaccttcgagcctcgtcgaaatctcaaaattttgtgaaatgcaaccggttttcgtcaaaattgttaacctgggtactacgtgtactactgtactagtagtacagagatatggaacgcctcgaaaacagacttcaacaacagagacgctagaacgaggggcaagtaaccagtaatcactgccacttgaacgaattccgcacagggagatgcagatccgatctgacccagagaactcggtgttggagcgagagacagacagctgagagtgcgtgaattagcatgttcacgcactgatggatctctgagctgattccaaatttcagcactggtcttcttcatggacccttgatcagcggcgattattgtaaagcggccagtaccggtcgccgtcaacacgggaagctggggccagtgccgcccaagaacttgcacgtatctgaagccaaaccaattaataaattaagcaatcaaccaaactaaacccatttatttgccggccacttgctagaccacggcgtcgcctgcatccgcagcggtaaaactacacaaaaaagtgccggtggatccggcgctctccacttcactaccacctcggacctttccagccgatcgatacgatacctcccgtgctcctcctgctcgccaaatgctttcgcctgcgtgcgccgtatcattcatcgcgagcaccaaattaagcgcggcagaggcagcgccaacgcgtgtgccttttttttccgcggacgagccggccgtggaatcggcaagcaaacatgggcgcgtcgcgttgatacttgacctccttttgccgtttccttttggctcgagcttcctcaggacgacgggaaaaaggctgcacattagcatgttcttgatggttgtgagtactatagggaacatgggcagaaacaggggtcgtgcaggcaacgcacggcagcagaaggcagcggtcgaacgagagtgagacgtgcagccacgaccggaccaggcaccacccaatcaacgagcggcggcgacgagttcgcacatggacaagtagctcgccgggtgggtacatagggcggaaactctccatacacaagtcggccaggacgactagtactgtatcatggctataatactgcatcatggctaaagcgtatatataaaactacggaacatgttaaccatttttcaacggataaaaaattggagtatatatagtctactgtggatgtatgtgtatcagtgtatacagtacccataccgaaatgaaaaagccatgaagaaaaatgaaaaaaagaaagtatgtttttccccatcggaccatacaagcaaaacgccaaattggactagtgactacagatctttgctgaaaacaaataaagattcttaacgaacactaaagatatactaaaccaagcacggtggtgaccacaaggaacacatatatttgttatcaaatgcgctaaatgggccctagtggtctagcagatcaaagccaatgtagcgagcacaaagcatttgggaccacggccctacgctgctcaacattgcacgaccaactgacctggaatcatcgaaaccacaccccactaaaaaatccccagtagaggaaaacaaatctatctcgtcttgatcagttgagctcccgacttcacgtcaaaaatgagtgcagatgatctcagccagctccctatcaacacaagagaatatgctgttaaatcactaggagttatcattagcatagtgcagactagcacagccacaaggtacacgccagctaaaacgaacctatccagcataataccaggcagagggaccaaccaactgggctatcagcttaaggaaaatgtcacatgagaaaatattcatggatttatttttggacgaattgttattgaaagcaacaaggccattcaatgcagatgtatatgacagagaagccgtgaattcagtgatcaccgcaaaatacacaagtctgaacccatactgctaatcagcaatagcgtccacacatgacaaatggaccaaaatgtaacaaaaatatacatttttactgcaagaattgctacttcagtagttttaggaaaatgtaaaagattgggcttcgtgcagtcagttctcactttctggaacatcctatcaccaaagtctatcatcatggtgcattagatgaaactaatcgcatttctgatacaatattttacagttcacagcgaacaaacagtaaacagaggaaacgcacaaacatgcaaatttgtccttgttcatgaattgctaagcctacattaagacttgaggaaaatacacagagtgattattagcgttcaacggagaaaacaaatggagatgttccgcacctgtaggccattacaaagcttactctgtgggggcaaataaaccataaacattatcatgaccttgtggttgttgtagggtataactgaacccatgcaaattcctccttgtagctgacattttgatcgcatgatcctttacatgtgtacacaacaattgttgcccaatcaagagagtctggctcatttttcacaccaaagtaataaagcagctgtggcattatctgcagtacaaattagtgtgatatgtaagcatgtctgtgtgaaaaagggggtgggtgcctgtttgccccttactgtcgtacaccttagggatggtaggtcttcactgactaagtagaagaaataatttgaactgatgggatttgaaagaaaataccaaactcaacataaaggctgcagaagtatttgataatctcatttacagtactattttgagcagggtatgaattcccactaagccatggtttattggataccagcacaagccagtaataacaaagagccaccgtcgggtatatcttggctcagtctggcctggtatcacaactggttaacaggcagttgagctagcagccattaacttttgggtcttgactctaaaattgatgcattggtgtctgacaatatgcacagtatgtacccagcgaataattcatacagcaaagatataagggcaagatatttggcatgagggagtagggtttgcaaatttattacttgtgttgcaatgtgcaactggatataagtgtatacccactatatttcagtgacggaatttgccccagaaaaaaaaaagaccaacctgaaattcatagcatagtggacctctacagtagctacatgatgggatatcggcatttgatggacaaccagccgataacgcccatagaggtttggcattctcttctcgacagtatctgcataatgtaagcaagtttattcaaattcctgtaacataatattttgagaaaaaaatatgcaagggcactaaaaaaggctaattagaacattaactacacaatgctactattctgaccaggcaaaggctgatcagtataccaccaaatataaaaaagaatccaagcaactgatgcaatctcacctcaatacttgctttggtgctcttgagacccgctcttgaaaagacgcccagcatttgttgtcagcatcagcctacaaaaataatagtggttaacaaaaacaaagatgaacagataagaaaaaaaaaagaaaagagagagagagaggatgtagggttaaaacctcaaattgatccatccatgactgcatcatatcatctggtttaccaggtctttgcatcaccaaggactttgagttactctcatcacaactgtcagaattgaaagcaccctcatagtcgattgcaatctcatattctggccaagatttgctagcaggaactgcaaagagatgaaactataaaaaagagatatgattcaatgtttacaagcttatcaagcactcaaatacaatcaccttttcctacagcaggaaaaatagagcttgaagcttcagaagaactgattaactgtaggcaatcactcttatggccagagcgccagtgcagtgtctgacaaatagaaaaaaaatagttcaacaaagcatgctttagggcatatatagattaacgattagcgggaaaatgacttataaatacctgatgcttctcagagcagtagcgtgctttcttgcagctactacagagtttatcacctttccatgtaccgcaccaatggcagacaggagctgacagcatagttgaataattgaaagaaatctatattatttgactatcaattaaaacaaagagttcaaccatgaaaaatggccacctattaataaaagttaaaacagtttaacaaggctgaaaaagaaaaatgttgcctatgaaagcatgtcacacaagaaaattcagcaactagcataacacataaatcttacacagggtctctgcaaatgaacagaatgattatctagaccaaaaaaaagctgggaaaaacagaagaaatgcttattaactttagaacataatgtaggcagtacctgacatgctgagaaaagtttttgcaacagtagaaaaaataatgaggatgaagctttaagaatttatcacatggaagattcgatcaagtcacaagtcattatcaatcagatatttatacaacagctagataagtgaggaccgatgatccatacacataatgcaggaaacacatcattttgatacttagaatcattaagaaaaagaccaaacatggaaaggaatgccaagctgccatccaaagaagaaaagaaaactacctcctggacatagtggcttgtcagaatcattgtgctttggtggttcacttgagtagaaggcattactacggggaagctggcaccggaaaaccttcacgctgtaacccacagcagtcaaaatcagcacaacaataggctattagcaaaacagctgtagaacttcaattcaccttctacacggattgccttgtctatgtttccactggtcgtgctggtctcggagtaagcatgccattgacgggcacatgaacatgaacaaagtgcggtgaaatgatgccgcattgtcctcaatcggtgcatatatctgcacaaaattgaatcctatttgtgattgatttcacacccaaacaacaagtagtcagctacaactgcactatccacaaagcaaacacctggaggacgaactgcaggggctcgccgcagaagccgcagcaacgcgagttccccgatggcaagttcacaggatccaaccacgcctgcaatacagcaattcacacaaaccacaacatcaacacctggtcgacgaattgtaccaatttagcgagtgaagttcatcaaaaacgcgtgcaatccgtacgcaccgggatgcctccggccttgctagggaacaggtggcggaggaggaggcccgggtgcttcggcttctccagaaaaccaagcgtcacctccgcctcttcctcctcctcctcatcgtcgtcctcgtagcccgcgccgccgcctccgccgccgccgctggcgggtggggatcggtggggcagttcgggctcgtcgtcttcctcatccagcgaggtgatggtgagaccacgaagcttctcggcgttggactccatcctcggcggcggcgtgggggcaaaaatgcgtgcgtgttcggcgactcgcacttgagagtcgagacggggaaatggtttgggcgaaaaaccctagctagcctcctctcgggaatctcagccgtccgatgcggggctacaaaacgaaaccgaccgacagacaccgaccgagcaaaacctttcgccgcgcagccacctaaacccctctcctcccccttcctctcccgccgccgccgcgcgcgcgagccggcggccatggcgcccgcggccgccaccatccgcgacctgctcacctccttcagccccgccgcggacttcctcgccctctcctctggcgacggccgcatcaaggcatggagctcgaagctttccgcccgcccatcctccaaaccgccgggagctgcacggttactgatgatgccatgggctaactcgatcctttccacctccattgcaggtatgggacgccgtgcgcggccaccttcagaccgagttcgctgatatcccgccggtggaggtgggcggcggcgcgcgcgcccccggggcgaagcgcggtcacctcgcactggactacacctgcatgaagtgggtacagctatcgagcaaggtgagcattgcccccgaattttcgagcttctacggttggtgttgtggtaccgtgtgcctatcgtgtgctcgtgtttttgccttgcagaagaagcggaaggcagggagttcgctgctggtgcttggcactggcagtggagatgtccttgcacttgatgtcgccgcagggcagtggaagtggagggtcactgattgccaccctgggtacgtttggtgcttccatgggaactcgtggcttcatttgttaaactatactccaagctcattgaacccttgattgtcgctttgaacatgtttggaatttctatgttaatctccgcaagctttagctagatgtgttctcttacattggagtgcttgtttttatgtgttcaggggtgtcacagctgtagcctactcgaagcatgggcgaagtttgtacaccggaggcactgatggcatggtctgtaggatcaatgcctcagatggctctgttgtagagaaatttaaatcttcatcaaaagcaatttctgcattagctgtgtcaccaggtatgcccatgaaattacgccgctggttttatgtctggtttcacccccactgaactccccatttgctaactatgcatacactactttacttcctatgttgtgtgcccgttggtcatct

SEQ ID NO: 5854 - DNA, 68032 bp, Oryza sativa
attcctgcagccctatctttctgctcgtattattttgtcctaaaatgctaaccttctgctattggctaccctaaaattaacatttttaggtagctgtgaggagcatggtttttagtggtgatagccaatatgttctgtcatctggagttggggaacgctatgttgccatttggaagttgggtagtggtaaaactcagagttcaagctgtatactctctatggagcatccagcgatctttgtggactgtaaatgttcagacattaatgatacagaaggagaaatacatgtgttggctatttctgagattggtgtctgctacttttggtctgggactaatatggatgacctgcgtaataagaagcccactaaaattgcattgtctgattcctctctttcaagatctaagcaaggttttgcaatatttgccgcaaaactgcaaggaatagatggccctaattctgcacatgttctgctggcttatggatctgtggtgaaaccgtcttttgacaaactgttggttcgttatggcatggatattagtttgggtgtatctgatgatggagttctcttacccatgattcaacccacaaagcctcagaaaggccaatctgctaaaaagcaaggtatactgctggtatctatagatatacacataatcctgcacttctgtttggtcccttgcctccattgcagaacgctcaactattgtcaatggttactcttgggctaaatctcaattgttttcttgtaggaattataacggctctagaccgtgctaatgcagaagatgcaatccttcctctcccacagctccatacgcaggaaaagaaaaggaaacataatgcaacagaatccagtggtgacatccagtctgcacctcatagtgaccttagttctacaaaattgattgagaaaagaggtaaatcatctgtttgtagcatcttcagtagtcataattcttttgttctcatggcagtgtagatacgaactggtacataactggcacagttagctagtggaagtgtggaaccacataagtttgtatagtacatatatgtgtgcttccgcatgtttgggcaaacttcaaataaatatactataacatcttataagttacaaatgaaaattattattataatccattctaataattatatacatgagtgcatgagatcaatctacctagcctacgaatacgcatgcaaaataacctggtcttttacaaaagatccttcaaacaacaaacatgttttcgggagtggggaaatgggtgtagagcacacccatttgcctccaactccatctcaaaggaagataagtgacgttatgtgtccatatgatctttctctagagacttttaactctgtgggagcaatttattgcaggggcctatacccttgtggttttcatggcaagaatgtaacaactgctatgagcaataattctagtctctcagttgttataggttttactatagttttaacattaaacacaaattttgttatatttaacatgtatttctgttaaattgatcttcactatttgctcaaaaacccttttgcttgtctagctcctatgcaaagaattgaagatgacagtgtatgcatcgaagacatgatgcggaagtgtggagttattgattctagagttgatcagggcatggaaggtcatcctagcatacccactagtattttatctgatctatttggcagcagcagtaaaatcgatgctaatttacccaacaagaaggtttgtgagaactgaatttcagtcaaatgttctgtacttccaccatataactgtttgcatgtttacacattacagtatatatacaactgatgaaacctgatgcattgatatggttcaacagattcgagcacatctaagatccttgaagcctggagatgcttgcgaacttttagaaaaattagtatcttcatggaaaacaaggtgtccatgactcttttcccatgtttgttcccccacaacgcattttcattcgtttttatccttgtatgcttaccaattgctgatttattctctacagatctggtagtgcagaggttgttttgcggtggatatactgcttattaattatccatggtcgttttatcccctttgagaaatctaaaaaaataattagcgaccttgagaaggtattatatgtgttaccagtactatctcttgtgtgctatgcagattatttgaaacatgttactgttgtggttgtcatcatgctgtgttgtagtggagttggggggttaagctattagcaactattgccttaaatgactgcagaatgtggataacatattctgattctaatttaaagaccaccaatgcaggcagggtatttcagaatatagtttcgtgacctatttttctgataaaagtacaagtaacaatgatggcaagaactcacctttgatgagaacttgccaagtcacaatctgagccatttgatccactctagtggatgctaatgtagttgttttcccatgagagttctcaagtcgtcattgaacaatggattcccattttagatatctcctgacaactcaaacaatgttgtattgacacttcataacatcaattaaaaagtcatgtgcagtattgagcaaagcacatagaaagttaaagaaataagcatgctgtgtatctagattgggaagatgtcatgctatgcagtgctagtaaattatagatatctttattttatgtaccatgactgatttgatcaagttgcccccaccaatgctggccaatttctgttatgtcaaatctggggttgtcaatttggctgcccaaacttataataaatttactaaagtatattgcatgcccagtatttacaaatgaaacacttcccaatttcaacaacatggtcagattttgatcaatattacttggaaaaaaactgagactataactgtgtgtttactacgtcaagaaaaagaactgaaaattcaaaggtcgaactgaaccaccgcaactatgagcttaccatgtcttaccatgtcgaacatacaaaacaaaaaattgaaatgaaccattacagctatgtgtttttcttcttttttcttcttcggggaattgcaactatgagtttaccatgcgaaacaaacaaaaccaaagttgaagagattgaaagaaaccatttttcgtttgcagatgtgtggggaaagatacaaagcagctgaagatttactgaagctttctggtcgtcttcgattgctcatggctcaggttttaaccattaataatactgcgtaatgagtcaatattcttagtgtataagttaatgatgatttaatgatcatgtgcgtacttcacttttgtagatcgtcaaggatccaaacgatgtttctgagcttccatcagaggagatgcaggattcagcggctgctcagtctgatgaagaggaggaagatgatgaaattgatgaaacggtgtatggtgaagacgctgattcgtctcaaacaagtgatgacgacgctgaatagaaacactgagactaagcgtagcattcttatgatgtgttgttttatattcaaacttgattaccccgtagtcaggtttgtatgactaagcaaccccgaagggttgcgcagaattttgacgaggcgaagcatcctctgaatttcacctcggtgtttctcccctgccttcaccttttaccacaacacggcattaagaccgagctaaagctcatatgccgtggttaactacttgatgggttctctcaagtgttaatgcctgcttttttatcacaccaacccaataactttagtccaagatttagattggtgatcactgcatcactttgatcacaccaacccaacaagtagtccatgatccaacagatggtgatcacaacatcacgttgactacaacgaccgtgtagccaacccggcgaaactttcttcgccttcaactaaacattgacaaaaacgacatgctaactggggcctcctgacgtgtccttccaacccccccggcctagtaaagagataaacgaaccgtcggcgccatccaatttgaaccgtcgccggccggtgctcaccagacaccagagtaccagacccattcaggccagggctcaccaaccccccacctttggcgtacctatttaaaccgctagctgccactctctccggcatccactcaagcagagcagagcagcggcaaagcaagtgatctctttagctcggatcatctctgcatttgcatttgcagctgctcgtcacggcaatggcatccaccaacagctggacccacgagatcgagtcgccggtggccgcgccgcgcctgttccgcgccgccgtcatggactggcacacccttgcccccaagatcgcctcccacatcgtcgccagcgcccaccccgtcgacggcgacggcagcgtcggcagcgtcaggcagttcaacttcacctcaggtatatatatatatatataccgccgtccactaagctcaatattccatcatccccgagatgcacttgatagtgcggtggcaaggggtgtgtggtttcaactatgacgtccgtcccgtgttcaatccccaacacgttcataattacattcacctgctgttctttctgcagccatgccattcagccacatgaaggagaggctggagttcctggacgtggacaagtgcgagtgcaagtcgacgctggtggagggcggcggcatcggcaaggcgatcgagacggcgacgtcgcacatcaaggtggagccggcggcgaacggcgggagcgtcgtgaaggtggagtccacgtacaagctcctccccggagtggaggtgaaggacgagatcaccaaggctaaggagtccctcaccggcatcttcaagaccgccgaggcctacctcatcgccaacccggacgcttacaactaaatcgtcatcatgcctatgcccccaaaatatgtttgataatatttgatctttgcgagtgtgtatgatcgaaataaagctgcttccaagcagtgattgagaagtgagcagcgagaagcttggtgtgtggtttggttgctgtcggagaatggttttgtttgacatgatgctgtcaacaccggctatgttatgtatctatctagcatctacctgttggttttgcgtgggaataaaaacatactataaaagataatgagctcggaagctactatctgtgaactgtgaagtactctgctttggaagatatcagctcactgtcttctgcttcctcatagaaagtttcactgaacatgattacatttcactccttttcaatgaggattagatagcatatcagtaatcagtctggtgaggccgtcgaaaattgatttttgtatcaataactattggttgccaccatttctacctatcatgtagtactacactagggaggtggatttttttcccccggagaaaggatgtccctctcattttaatgttttaataagatagataaatatgtgagatatcagtacataaatatgtaagtatagatcatttcccaaaccttaatgaaattggatgaccttccttcagctgtcccggaaaaaaaaatcaaagtagaaaaattaataaatttggctatgtagcgtaagttgaatttaaacttacccctttatatagtgatatatcatatatttttctttcttgttattttttttaaaaaatatgatttagatggcatgcaaatacagacgagaagaaataaaccttccttactagttactactctatcttttaaaattctaatagtatactgctgtactagttactagttagaaggaaaaatcgtttttcatactgatacaagatacaaatgatgtttccttgtcgtctaatccatttattgcattcaaattaactttcaaaattattttgcagcacattctaaattattttgcatgtctaaattaaccagagcaaattttataaaaattatgattgttttgtgtgtgttgttggatttagggtagtatgcttgtttgtttggcctgcggcctgagtccgggacatttaactatttgcaattcataatccctcatgtatctataatatgtgagtatagtaacaaatttttaattacccattcaaaagtgacaaatagttaattattcccatgagtccctgttgagagttgtgtgcggtgttaccgtgttcgaaagctggagtccccaacgctttgtatcgaaccaaaccttacgctttcagtaaaaagctgggctctctgggcctttctctaaaaaaaactatgattgtatttgttaattaccggttagcacaatttaaacaagtcatttaaaaatttataacaatagctgatgattttagaaaactacaacttaattcattttgtagaactaaatttaccatagttagttaacgtatattcacaatcaactttgttttttcattgtgatatgtaaaagttggattttatgttacatgtttgtagagaaatatatcacatgttaatatatcatctcaatgtttaaactattttaaatggcatgcaaacaacggtaacgttcccttcagagttaaaatccactccccttggcagctagtacaacttgcagtttgcaagttcatctcctgcattaaaactagcaaaagtttgagtacgtttcagaaacagaagaagtaaaactctgtcaaaccttatctattagtttcaccatttgtcgatcagtaaaaacaataatcgattcgtaacaacccgtacaacacgtaaatataattaagtagtactagtatatgcaatgtactacgcgtacgcaaattctatggagaaaagaatgcatttctatggattagagtacagcagagaacgctatagagatcacaggagttgacgacgacagcaacatgatgcaaacaattacccgctagcatatatataggccgacgagacgacgcacgatggatcagtgtatcctccctgactgctcctgcggcaacaggccggggatgaacggcacgccgaactttgggagccacgtctgtccctggatgaacctctcgacggtgtacttctgctgcgcctgctggtacgtgaccgtcttgacccctctccacttggcgcgcttgctcatgtcggcgccgtcgccgcggttctccacctcggcgtagtagcaggtgttgaggccgaagtcgccgagccacggcagccacccctgcgggtcgatgaacccgccgatgtcggactggatgtagagcgtccgcgagtactccttccacgggcggccgaggaacgtcttgaacttggcggcgtcggccttgaagtcctcgtgcggctcgatggtgcagttgtggatcaccgtgccgcccgcggagtgcttctccttgcgcccctgcgccgtcacgatgttctgctggttgtccatgcaccggcgcacctggatccggcagttctggagcaccacctgcgcgttgccgaagatgaagtcgatggtgccggtgatggtgcagtcgcggtagtactgcctgctggtgtgggtgtagagcgtgtcctggtgcccgtcgaactggcactcgtagaacgccgactggtcgctctgcacgcggagcgccaccgcctggtggttcttggacccggccgtgttctccacgccgatgccgcgcatgaagaacccgttgccgatcgcctccatggtggccgtgtccttggtggtgatgttgagcatgaagctcttgttccccgtgatgatggtcttggtggcgccgtcgccgatcatcaccaggttcgtcacgttgcgcgccaccgacacgtactccttgtacgtcccggccttcacgtacatcacgtacgtccccgtgctcttgaccggcaccttggccagcgcctcattgatggtcttgaagtcgccgctgccgtccgccgccaccgtcacgtccggcttgaactccttggagcccggggtcgcctccagcagccggcgcttcgcgttggacatccacacgggcacgccgtcgtcgccgagcagccggcggctgaatccggtgatgtccaggttcgccagcgtgtcggcgaactggtccacgatggcgaggatgttctccgtcagctcctgcgagctcttgagcgccttgcgcatcttctccgacgcctccgtcgacgtagagttctcgaacccgtcgaggcacgtctcctggtacgtcagcgccgagctgagccacgtcttgacgtcgtccacggcgcgcttgaagttgctcgtctggaacccgccgagcttgtcgaacgtcgtcttgaggtcgtcgatggcgtagtcgagcagctcctcgcagtccttgagcgcgtcggacgtgcgcgggtcgttcttgaggtcgttgagcacggcggactccctcaccgccttctcgatccgctccgacgtcgccttgaagatggccttggcgaggtccgtcgggttcgtcgcgttgcccgccgtctgctccagcgtggtctcgcacgtctcccggtagtccaccggctggcagaacgacttgatcgacttcaccgacgtcgacagctcgccgtcctccttggcattgctcgacccgttcttgaacgacaccacgcacaccgccgccaccaccgccaccaccagcacggtcgacgcgccgatgatcgcgcctttgctcattgcaacacaatgcaaccaccagtcgacgattcacgcgagatatgtatcaaatgatcgattttgcgcgcgcgcgcaaaggcgtcgggatcgatcgatgcgtcgtcccctaccagcggaaggggtccggtttattcggtctaaaaattggagcaacgaggaggaggaggaggaagaggaggaggaggcggcggcggcggcggcggcggtggcatctcttatacgagcccgcgctaactttggacatggcgaaaaacgacggtggttgcgcatgggcgtcggaggtcgccacaggccgaggtgaatggagagccacacgacggatgccgccagtttgtttttgctttgctcgtggggattttctagttgcatgcaggcaaccatctgaaattttgttgtgctatcggctctgaaattttgttgtgccgtactgccgtcggccactaccaagggtgaagctcctggagctgctattggtggagctgcatgtaggcgccatgttgaatgaaggccacgccaatgtgtccgataatgcttatgcacgggtgcccgatgagagagaaaaatatccggcgctcgcacgtctcattccacgtcacttggctccccacacctcgctcggctcgcctcctctcccccgttcggcgccgcctcctctcccacgagctctctcgcttgcgccgccgtctctccccagccgacctcacccgcacagtctcctctcccgtcaatctcgccagcgtcgttttctccgttggatctgccgccgctttttgtcttcctggacgttgacggcggcttcgtccccgtggtggcggccgacgcggaggacgacacacgtgcggtgaggtgatggcggcggcggtggtggtgtaggctcgccggctccctctctcccccaggagcactctctcctcatctccgccgccctcccccttctcctcctacagatccgatgatgggagtggtggagaagacctacgcgagcaagcctgtgttcatcggagagaaggaagatgcagtccatactaggttctgtgtgtttttttttctgtgtttcaagctagtatactcgtgatgttcttttgtgtttggatcaaatgtcagtggatatttcgatagtgttctatatttctattttcgacacacaggttttgttgatgtttcaatggttcaaaaacaatgtttcagttagtgtacttgtgatgtttctttgtgtgtgtgtatcaaatgtttgaagtggattttagatagtgtttaatattttcaaatacacggggtttgttttgatgtatacaaggtttaagtgtttcaatgacttaaatcgtttattgtatatattgaattaaattgtttcatctaactatctcactatgtttcacttttttttaagaactgtaacatttttttttctaagtgctgaaacatctattatataattaaaggaatagaaaaaggagcctccacgttcgctctcatggcctagaaattctcacattaatcggagaaaaagaaaaaacagagtccatatagaaatacaatttacaaatagctgaaattcggaattaaaaataaggaatattagaagaggggactagagtccatatagaaatacaatttacaaatagctgaaattcggaattaaaaaataaggaatattagaagaggagactagagtccatatagaaatacaattagaaaatacctgaaattcggaattaaaaataagaaatattagaagtagagtatagactccatatagaaatacaattaggaaataactgaaattcggaattaaaaataaggaatattagaagtagactatataatccatatagaaatacaattaggaaaaaatagaaattcagaattaaatatataatttaaggaatagaaaaaggagcctccacgttcgctctcatggcctagaaattctcacattaatcggagaaaaagaaaatacagagtccatatagaaatacaatttaaaaatagctgaaattcggaattaaaaataagaaatattagaagaggagactagagtccatatagaaatacaatttacaaagaaatttggaattaaatatataattaaaggaatagaaaaaggaacctccaagttcgctctcatggcctagaaattctcacattaatcggagaaaaagaaaagacagagtccatatagaaatacaatttaaaaatagctgaaattcggaattaaaaaataaggaatattagaagaggagactagagtccatatagaaatacaatttagaaatagttgaaattcagaattaaaaaaaggaatattagaagaggagactagaatctgtctatatagaaatacaattaggaaataactgaaattcggaatgaaaaaaaggaatattagaagaggagactagagtccatatagaaatacaattaggaaataactgaaattcagaattaaaaaaaaagaaatattagaagtagagtatagagttcatatagaaatacaattaggaaataactgaaattcggaattaaaaataaggaatattagaagtagagtatagagtacatatagaaatacaattaggaaataatataaattcggaattaaaaataaggaatattagaagtaaagtatagagtatatatagaaatacaatttagaaaaaaaaatagaaattcggaattaaaaaaataaggaatattagaagtagagtatagagtccatataggaatttaaaactaactaaaatttggaataaacataataaaattaaaagtagagtttagagtctgtataaaaatacaatttacaaataactaaaattcaaaattaagaaaaacattggaagaagaatttaaggtcaatataggaatacaaatattggaatataatttagaagcaactgaaattcgaaattaaaaattaaagaatattgaaagatgagtttagagtccacatagaaatacaattagaaataataaaaattcataaataaaaatgaattaaaaaaagaaatattaaaagacgagtctagagtccatataggaatatatataatttacaaataactaaaatttgatattaaaaataattaataactaacacgtatataaaatataatataaatattacacattagtagttttgtaaagttattgtaaaatttaaaattatgttgtcattttaatatatttgaataatataatgagaaaacatatatgctattatatgagagaaaatataatgatgctagccgcgcaatctgcgcgggccactatgcttgttatttttataaagggtgaaacaatgtccaattttaaatcgggcgtccgaatttgtagacggctaggcgcctcccagtacgttgcgtaggatgaaaccatcgttcaggccggttaggaggcaaaacgaatcggtttggtagttgagggatacatatcagactcgtcttattccatatttttactagtatggggtgggagtggaagaactcgaaaggcccataactcagggactagctagtagaacaaggaggaaaggaggccacctttttactcagccttactgttgaagtgtcgatgaaaaactgaaaacatagataagtccagcaagcaagtggttagcctcttaaaacgtgtcgacgatgatgtatcacgtcacgtacgttctcgtgcagatcaaaaggggaggctagcatacacggcctcggcctgtacaagttgtactctacggagacagcgacctcagccctccgagacgcaaaatgggacgggtcaattcacccaaaagttggaatacttggggaaatgtcaagggctgtgctctcttaaaaaaaaaccatcaataagcttaaagccaacggatcgattatacgtcaagcatcacgtaagtttgatggtacttcctccgtttcacaatatcattctaacattatatatatatatatatatattgatgttaataaattttagatataacatcaatataaatgtgaaaaatattagaattacttatattgtgatacggacagagtagtaacaaaggtgaacgtctgattacggcttccctgccgcattaccaaaatggaagagagtggcgccaaaacacgacaccagcttgcttaattatactactaactcccaaaagattaaagaaatagagggaaaaaaatcgaccggtagattgccggattgttatctgacaaatctcccaacgggagatattttactcccgtgtacggatacttcgagtagcaccaccgctgtgtgcacctctcaataaacaatacccatgacatgcagggagggagccgaaagaatgtcccagtactcgtacaagaaacatctcgactcactctgtcctttttttccccttttccaaaacgaaatcgagagggggaaacacatccacccgcaagatttttttcgatggaccaccagatggcctcttttccaaactgctacagtactaaactacgtctacaaacaatctgccatgcacgagatgccccggctcgcatgatcgcccccccgaccggccattccggattcccatctctccggagccagcaaaaatcgccgaaaaaatcctctggtccaggcgacccggcaggcccagcagcaaccgcaactttgctcgccggaaaaggcgcccggcccaccagccacgagcggggcaatcccacgacaccaccacacaagcgcgatcgtgcgatcgtccaatccaacggcgtcttgttagcgagcgttgaaggcggcagcggcgtatcgttttcggtcgtacggctgcaaaagagcactccagaacacctccagtgcacatccatcgcccacacgatcttgacgcgcgcgcgcgcgcacaaaacacacaaaaataaacgtcaatttgcaatcgtcaagagtagagagagtcgctagaaacatcaactgatggcaacatccacacggcgtcgaggaaaagaaaccatttctaattgctgcaagatgccaaaagatgccagcccgagaggcagagatcactagagacacatcaatagtagcaccagtagtgtaacaaattgggaatacactgtgggagtaggacagggacaatgacacaggaaggcagaagaggacgcatgatgaacacatcaacaagagagtgaaattcaggacgaaatgtcgacaagatattggaatctttggccacgcacgcaccaattcttgggtgacgcggccggaatcgaacggcacacccgacccaacccaacccagcgaactaaacggagtcaatcatctgatgacctaaaaaaaagggaaacaaattctgccaaattttattggtttttctttcccgtttgcttcctctcttcttctgcttgtctctcttttcatcacttagaggcgtgtgcacgtctcgtacaccggcgcgccggtcacctgcgcgactgcgccgggtagggcgcgacgcgcgtcctccgtgtgccgtccgacggcacgcggccaccgacgccgccgccgcggcttccgccgtcgccgctgacgatgtcttgcagcatcttctgcaggtcctcgagtgtgtccggcttctgcacgcggcgagatcaccggtcatcgcttaagtatgataactaagcctttttttaaaggtgataattgtggcgattacgatacgaattggtagagaaagtggttgcgtgctcaattgcgcctacctcgtttttcacgttatccatcatcaccagcatctcctgcatgaaatcggagaaatcctggccgtcgaaaaacagggcagaattttaataaagaatattatatactaatatattttattgcactattagccccaaatttttttttaaaaaagaatgataatattggttgctacgcaagaaaaaaaataatcgaggtttcacctggtcgtcgtcgtcgaggggatcgaacagcccggcgtcgtacatggctcgcttccccttgtcggacagaactgcagcaaccgcgcaaaaaaggatttcgttcgatcatacacgtagcgagcgcaaactgggggcggccgagcgggtgagccttaccggagtacgcctcttggatccgctggaaccgccgattggcctcgccggggtcgctcacgcaccggtccgggtgccacttctgcgcgcgcaaaaaaaaggatccaattcacaacacaatccatcacctacgcgcgccggcgcgggcgcgggcgcgggcgcggccgacgggggagaagagagcggaggcgggggacgtaccatggcgagcctccggtaggcggcgcgcacgtcggtggcggacgcgttcttccggatgccgagcagggagtagtagcagcacgcggacgcgccggcgccggcgccaccggaggcattgccggatccggcggaggcgtccatgggggtgcggtggcgggggcggcgagcgaatccgcgcggcgaggagggcggggcgatgcgaattgctaccgcggctgcatcgaattgggagggagaggggagaggagatgggtttgaagggcgcttggaaaaagaaaaaaaaaggttattattccgcgaggaggagacggatgcgtgggaaaatatctaaatagagtttttggtcgtcgggggttggggccaggtgaaggttcgagagctcgtgccgatgcgagatattttcgacgcccgtttcgggcttcgccctcggggttcgcgagtatttacgagtttgggattctctctcgcggcgcgtctgccttctagagccgtgaattacgctgcgtgggctttgaagatttgggctcgtcggggcattaggcccattttccctcggttcaggccttcaggataaaattggttgtgggcctttgctaccagctgaggctcattttgaaagaggatatataaaggactttttaaattaaaaaatggatcttaaaggatatttttttttcctaaatagttctttggaacaaaggatttgataccattgaattttatgagtttcctttggaataggtccaaagttagcatgaagttcaacctcttggaaagtctcttttcatccaattcgtatgttttcattcggtccgtccaaatggtttcccttatgttttgcttttttttttttgtataggcattcttgccaacatcatgtgttttaccatcgttgtgtgattgtgtctgtgatagctaacagttacgaacaccatgattcttttaagaaaaaaaatcatgtgttataccatccctattgtttcaaagagggttaaatagctcgcagttctacataaaagtatggtgaaacaacttgtaatgaaaagcattcccaataagcatgatcaacaggcctgggaagcatgatagagatctgcaagttaagagtagtatgataattcaatgagctatgcctggctaggcatggttgaaaaaaaatcctatgtgtttggaatgatacaggcggcagggaaaagagtacaactaagaaaataatacgtactgagaggattagttccatactcagtacgtacttgtatggaataaattagcctcaatctccatgtgagggtttaaccgaaagaccttacagtctttacagtcttacatatgctaacccgcgaaacaatgtccacttacatcccaagttcagagtacaagcaaaaatatccaaatctgaaccagaacacttgattaatccacagaacataaggtgtgagaatcttcacaatgtgggaagatcacatatccaactccagaatagatggaacagaatttatatcacatctcctattcactgttacagttaattactccataaccattgtaaactgtgaatgacatcgatattcaatgtcagtcatcaaactcccatgaccattgcaaacagcccaccttcctccagcgatattcaatgtcagttatcaagtggagtacttgtagaacaatatacttcatccgtcctaaaaataaacgaatctatagatatgatgtgatattttataatataacaaattttaagatatctttgtacaaatttgttgtactagaaaatataacatcatatttaagattaatttattttgggacgaagggagtacaccgttgaatattttcaaaccaaaataacgaaatgcgtgagagttgatagtaaatatagtttgaagctaagcctcttgcagtgaattgtaccaaaattatcacaagaaaaattagccagccacatggggaaccagctactcctacaacagtaggaaggattgatacattattcaggcattaggctccggacacctaggatcataattcctccgaaattgaagaaatccatctctaaacaattaaatcggaacagcacaatcatcaagttacgcaatattcggacctgcatatagcattcgaagattattagaaagcaagggaactattaagcatggtttgattttgaccgaaacatcagagaaccagatgatctttgacagtttcacggaagtaggcactgccccgctcaaaggaacattttttttttaagataaccggcatctacacccaaaggatgtgcacagctcaaaggaacatgcatgaaaataaatatagaatatataatgatccgacctgcctaagataattgcgatataaaaacctatagaaacaggagagctaaacataaagatcacctaattaaagtttggcattaagcaaaagcaattactcaaccccagaattgccattcaaagagataaatgaaaattcgcatctaaccaactaaccaagatcttcagaagcaacgcataactgaatcccaaaaatcctaaggaccttcttcagactgagcaccacaatcgaaccaaagaccatcgacatgctagaaataactgaatcccaaaattcccaaggaccttcctcaaactaatcagcataatcgaaccaaagaccatcgacatgataaaaacaacacagtagcactactcccacagttcaccggagcaaatcgacagaggccggcatctcattctttatacgggtccctctgagctctctgcatttccaagttatacaacgcctcttgcaccagagccgattgggcagcagcatccacggtagcaggagtttgctgccacatcctatctctgatctcttctcgcaggcctcttatgaataatgccacgtcgaagcagttgctggagactggatcgaacagcttggcatggtacaagcgctcctcgaactggtctctgtactcgctcactgtcatgatcccctcctgcctcagatccaagagtgccgtgagcttctgcttgtgatcatagggcccaaatctctcctccacggcctcacagaaccgaccccaatcacgctcatggcgcttctcataggtcatcatccacagctcagccatcccctccatgtgcatcgaagcccaggaaacccacatcttcattggcatgccgtagaactcgaagtagcgcgtgcacttggtgatccacaggcgcgggaacgtcccgctgaaagtggggaacttcagcttcgccagacgaaagaaccctcccgagtagccgtcgatcctggcggcgcgcgacgccgccgccgccgcctgctccttcttcacgtcctccaccagcgccgccgcaacggcgatctgcttggacagctcctcgaggcgatgttggtgcccctcgaccacctggctgagcaagggcagcgccttcagctgctccgcgatgcggtccagcttcgcctccatcttgccgtcggggagaaccgtaggttgctgcggcccagaaatttcgagacaaatcaggtccgatgaggtcggaggcgtccgcgaacgagacaaataattaggttttcaaagatcaaataaaccatgaagaagacgaataaataaagaacactaaaagagaaaaagaaaatcatggcgcgggtcgagaaggggtggttgctacgacctcaccttggccttcgttcgatcgtctcgtctcgtcggcgtcgccggttgcgctgcaacctgctgcggcggagcacgcggaagcggtgggcacttctccatctcctcggggagaggcgccagcttaagatggtgtttggttgttggggataaaatggagctaaattttagtccctcttaaaaaaatataagtccctattatagggacttataattttcccaaacagcccctaagtgcttccttctctactaagctgggccaagagaataggcccatgaagattagggctttctatccttctactgtactttttttttccaaattagatttcttttctggttttacaggcttcctatatattttaggctgcctatattttaagggtagagaattacaaagttgacaaatacttatacaattatcctcaccaataatgttattgctaatatgttttggtcttacttccttcgataataaatctttgacgttgatgataaattttgaattggaaatcttattatgttgcgttcgatattttgcacaaatttatcaaactaataaaataactaggggattttcccttaaaattttgtgcaagtatatataattgaaatataattatggatacagtatttgtaatttctactccagcggtccctaagtcaagatgcatggccaaaaataaggtgttttagggggggtggaggtagtacaatagtagatttacaaagtaaatttgaatcatatacaactcctatacaactcctagcacaccggcgagctggcgcccggctagtggccaaaacgacccggtgtgctagcggccaaaaatccaataatcttataaattcaatatcttcccaaccgtaaatccgtttgactccgttcaacttccaaaattcctcaaatctcgagatctatctaatggcacgcttagaggtcattaatagggctttattttcgccgtttgttgagttgtcccattttgcgtgtagtttcggagcccgaagacccgcagtgcgaggatttcgaggatcaagctcaagatctcgagcgaggcaagccacctttgaatatcttgagcctatatttgaacttaattatgttgcttgaaaaatattatgcattgataggatcacacttaatctgcttgtcccgtctgcaaggcagattggaggacctacctatttgttgcatttgatccttcctctgttaattgttataccatgtttccttgtaaccacctagtcacgcctcggaaatcgtgcactctgcacaagtatcgacggtcgccttcaaacctaaaatctgagtaacttcttgggtaaaacttgggttttacaaaagacttggaaaacccgacacctgggtcggtgcttgtgaactaaatgaatttccaaaaccgcggaccggggaacgtaccgggtgtacggtttcccgctcttgcacttaaggaccgtttccttggaatttcatccgaacttaagacaagtacgaccacatgggtggaatgggacacccctggctgagtaactagcttatcaggggagccttgatgccgagagacatgtggattcgccggggtggtgtcggggaggacccccgggcttcctggcacagtatggtctgggacctaacctgttgttggtctgggacccctctcgtcggcatatggtaaacctgtgtcggctttcgaaatgccttgtcatgaaagcttggaggtctcccgacgtggctgatccccacgggctgggtgatccgggttagtaatatcgtgtgggtaaagtgtaccccctctgcagaggtgaacaaactgttcgaacagccgtgcccacggtcatgggcggatgtgaggtgattcctagcgtagttttgtttgactactgccttatgaaattgctgttgtggaaaggggatcgatgtttggaaaatctgcagctgatgggatcagctaggcccgggtggccgtttgaaagttgttggcccgggtggccgtttgaaagttgttggccgggtgccaaccttgaatcaattcaaaagactgatacattgcacatactccgaccggacgagacgcattgtctcatccgtgtcgtttgagaagcactcacttagttgatttcagaaaagagttcaaataaaatcaattgcaaaaacaacagcctttccttgaagcctgcattaaacacttatttcccgtggcttgcagagtactcccgtactcacccttgctctatataaataatccccccagttgctgaagaagatgaagcggatcccgctgacgaggagttcttccaggagcaagccggctacgatgagttttagggtttcggcctagttcccaagtcgcgcctgtcggtgacatggggccgggggtatcgtgactagaggcttgggtagccgcggtcacccacgtggcctgaccccctcgggggggggggggtcgggcccgacggtcgtggccacccctccctctgtctccccgaggggtcgggccgctcccgtttcggccccgagggctggggtgccccgaccccttgtggttttggcgccacgtgtgtgggttaggtgagcacagcgggctcacctaaccgcatttatagcaggttggacgagcgcgccacgccgcatttaatgcggcgcagcgcacgcttatccggtccgtgaccagtcgcggtgtgtgaccggtcacataccggtcagatcgcgggttaggtggcaacaggcggcctgtcacacgcctcgccctgtcccgtcggaatgatgagagcttcctggctctcgtccctagccggagccggcgtgctaactcctggagttggtatgtcagtcccggtcagatccattccaggcttcagcgcaagtatggcaaggaagtcgctggccattaaatgaaggttgaaatgggcgtccaccgaaaaaggggcgagcagagcaggagacgtgcgctctgcttgtcagaggtcacttccggctgtagactagccctcattgtaaaagcatgtttcctttcttaggtggcgagaggcccttgtggtgacccttgaccagaaaaaaaggaggcccaggcctaggaagaaaagggagaggaaaaaaagaggagaagagagggggcgaacggggctagagcctgaactctctctcgctctccggctctctgtattccttcactcacagatccaccagaacacaggagtagggtgttacgcttctcagcggcccgaacctgtctacgtcgcccgtgtcttgcgcatttcttctctcgctgacgttcctcagatcgagggcgaagaacctcacttagcgcccccggccgaaccggtaaaggggggcctgcgcggtctcctggtgaggagccccacgctccgtcagcgcctgtgatgtttggtccaagtcttggcttccgcttcccttttgtaatgcagttgtgagctcgggatctgtccgcagcccaacatgactgtactcctactctataataaacaaacctctattgctgtgatattctgtcttcctgtgataccagcactgtttcctgggaccggtatcgattaacaggttaatttggagcgtcacgggctagttccggtcgggactagttcggggcgtgacaatacgacatataaaaattgttaataaaacaccaaatagaatcctaatgacgattaaaatgagggacgacgggcaggccgtaaagcaaacgggcaaggcggttgccgggacttctagaaagtaaaaaaataaaccccattgataatcatatttgatttttaaaatctcaatgacaataaaaaggagaagtagcgggcggggtgaataggagtatagttgcagagccgccgatggttggcgggacttctagaaaataaaaaatgaattccaacgatagttatgttcgatttccaatgaacaggtcgtagaagagtataatggcagcgtttgacaggacttctacaaattataaaaacgaaacccaatgagacaataaactctaaaaactataagatccaagttttaaaggttgcaaggagaataaatagaaatagtggtagatcgagtaagaaaaaaaagaaggatatgacagaagtaaggggtagcagctggtgtgacttttaaaaactatataattagaaatacaaggataataaggtttggtctttcaaagttttaaaataacgagatagtttttaataaattttaagtaaaatcatattgaaaaatatatgatttcgtttgggtgctagccgcgcaattacgcgggccaccagctagtttatttagatgttcacgtttgcatctcgcaaatgctgccgtatcaaccacgtggtgacgactgacgagggcgggctagctttccagtgggccacaactgggttgggaaatgagttccatcccgaatttggtttaatggacggtgagggttaggctgggctggattagctaaagctaaagggagtttgactgggccaacaattttgtttcagtttcttggtcaccgatatcgccattggctcaacccgcattgccctcgacgacttttgcgacatgccatcgcgaaaaaccctaaaaccagttccgatcttaagattctgatacaggcatggaatccatgccatggattgagaggctggtcacaaatcaccacgaagaaaaggggaaggggctttttgggcaaacgtgctcctattctgacggcagtagtcggcgagtgcggagaagacgacgacgacgatgcctgtttggatgaggacgaggcaaattctgtgtggctccgagtagaagcagtggatcaccaaatgaggcccagccctcaagcacacgtttatcaaccaagtgatatttgacaaccccttgaccaaattaaaaaggcccattaaagttttccgtataaacaacattttccgccgtcaagttttcaatgattgaaggaaagcagaagcacaacgagcccggaaggagtatatttttcagagaacacaaatcagtaagatgctcaggatttcgcatctacgttttcaggaaaaacaaagcatctcgccatgcagtttttctttagctgaaaggcaagaccagctaattgccaagtagaatcgtgctactcctgcatgtttttttcttttggttgtttggcaatctaggagaccggagctgctgcctccccaatgccaaaggatatgtacctacctttgcacccaagaactcaccatgtgcacgcacaccctgttgctttattcctgggcataccactgctgatctcaacgagtgctctgccagcctctgcttttcatttctccctcagcccaatcatcaattagatgaacagaatatgaaattatatgctagtactcctactaattaagtgagctttgcaaattgccttgcgtaaagtcaagggatcatttgcagagttgaacagctcaaaacctcgcctcaaggtcaagggtcctcaggacctcaaggaccatgtaaatggatgagctcctgcgtgaaaccaatcagggccaccacatggaaggttgttggattcagacattcagttggtgcaatgaactgaaagtctgaaactctgtccgagccgatgccaattactagtaatcctatcagttgtcattgccaattaggagtagttagtgctgccatcatcatggccttatgatcaaaacggaccggataaggctgtatacttagaagcatcatgatcgtaggcctaccaaaaaaattctgcttgcacatattacaagcggaaatatttgggggtttcgatcgtagaaaagacaaggccctgtcaaaaaaaatcgttcgtggcagctttgcaaccctagagcgacaggtaatggcgttgtcgaagccagctgtagtgcagattgcagaagcctactgtctttgaattctccatcctttttttctcttcttctatgattctatccgtagcacaattcaatgcccccgtagatacaagtatacaacacggaaagacaatctagcacgtcgcagcagagagagagaggaatcaatcaatgaacaaaaagctcaccctgtggacacgtgtcgggctctggaggcccccaagcgtccgcgtcaccaatctcgaggcggccaccgcggagcccatgcttacagcctggcaccggtagtgacgccagccaccagcgcagcgcgcgccgctcgctcgctctgcggcgcaatctgtgaccccacctggcagtgacacggcgcctccgcgaaacgcaacggctaaaacgtggaaggccgcggcggcgtcgcgcgcgcgcgcacgttgggacgtcggggagggaagcggccaaggccaaagacgtcgtcgtgggcagcagctggtgaaaaaaaaaatggccttcaaaattcgaagcggcgacgttatcgctctctcgtcgtgagcggggcgtcgtcggctccggtggatagtcaacggtcgacgcgaggatagttcaggagcggataatagttaagaaatcgttgagattttaccggcgttttttctcccagagatggttgcaaacgcagttgatttattaggactttaggtatatatatgtaagcttttcctttttctcgcgacatgtggccttgtttctgttggccgatcgtgatcagcgtgcacttaccttaggaacgggtttttgattttgggattaaaaatgtccttgatcagtactacacatgttctcacctttttagttctcatttctgcacgagttaaggatagtcaagatggttacgatcgcaaggtgagtggatcaaccacactctctgtcatgttaacatcttgctctctctctcttttatttactgtcaaggcgccgtttactttgtaggggtcgtactgttcatatttttcctttcgtgcatttgacgacgacttctcagcaataactcgctgcctgaacgtgtagtgttaatcatgttactcgcctacaaatggaaccggaactctggaagagaaaaaaagaagtatttgcgagaaagaagagtagctggaaatttgatacggtcgttttagggttgaattgatatcagatcctaaattctctctccaaaccccatactaattcggcaggatatctttcacgataagtactttcctgattcatctccttatctcaattaaacgataaatatctcaaagaaaacgtgttgagcggaaccagattaaaccgaaattcacaacaactcccaaatgtcgcgcgaaatatactccattttttcttgttagtacggaacaaaaacaaacacgaaactggagctgactgagctaaagagcagtaaaagaagcgatccgcttgacggtgactattacggccgctgccgcccagaggcaccacctcacctctccccttccacttcgctagcccgcttggcttctcagagcctggaggaaaaaaggaaggtgggagaggcagcagaggcgaggcgagggagcgagcgagcgagcgcccgaatccccaaaatcgcagcgcgagaataaacaaaaccgaagcggcagcgggagcagcagcatcggcggatacaataagcaaggggagcagcagccacgggcaggagaggagagtgcgcaggcgtgcgggagggaggaggggggaagaagaaaatcgcctgcctgccgccgcggtggtgggttggtgggtgccgcctcctcctgctgctgctgctgttcccccattacctcgccccgcttcgcatggattccccctcgcttctcccccactccacccgccgatccaccggccggggcagcgcgaggcgatgcaattgaggtgaggtgagaccgccgcttcttccgtcgtcgtcgcgtgggttttttttttctctctttggtgctgggggatacaacaacctggcggccgcgctgccgctggacgacgccatcgcgcgcctgcacggcgtcttggggtggacgaggcccagcagccgcggcggcggcggtgggaggaagaggtggccgcgcgggggaaaggggagcgccatgctgtgggcggcgcgggtgtccgggttcttctccgccgccatggtgatggtggtgctgtccccgtcgctgcagtccttcccgcccgccgaggccatccggtcgtcgcagtttgacagccacgtccgcttccctggccagatcgcggggggcgccaggggcctcgccttccgtcgcgcccccgcgttccgcaatgccgctgactgcggcaacgccaccggcaatgtctgcgacccatcgctcgtccacatcgcgattacgctggacgaggagtacctcaggggctccgtcgccgcggtccactccgtcgtgcagcacgccacgtgccccgagagcgtcttcttccacttcctcgtctccgacccggcgctcggcgacctcgtccgcgccgtgttcccgcagctccagttcaaggtctactacttcgaccccgaccgcgtccgcggcctcatctccacgtcggtgaggcaggccctggagcagccgctcaactacgcccgcaactatctggccgatctcctcgagccctgcgtgcgccgggtcatctacctcgactccgacctcgtcgtcgtcgacgatgtcgccaagctctggcgcaccgacctcggcggccgcaccgtcggcgcgccggagtactgccacgcgaacttcaccaagtacttcaccgacaggttctggtcggacaagcagttcgccgggacgttcgcggggcgccggccgtgctacttcaacacgggcgtcatggtgctcgacctcgccaggtggcggcggacgggctacacgcggcgcatcgagcggtggatggagatacagaagtcgccggcggggcgcatctacgagctcgggtcgttgccgcccttcctgctggtgttcgcggggcacgtggcgccgatcgagcaccggtggaaccagcacggcctcggcggcgacaacgtgttcggcagctgccgcgacctccacccggggccggtgagcctgctgcattggtccggatccggcaagccgtgggcgcggctcggcgccgggcggccgtgcccgctcgacgcgctctgggcgccgttcgacctgtacggcccggccgactccgccgcggaagggtcccggtaaccgcaacactaaagatgattcttttccttctttcgccgaccccgtacaaatttctgagttctcaattcttctccaccattacctgttcaaacacctacatgtttattttttcttcatttcttctttcttttgttctgttcgattaaatgccttgtgttagattgttcttgttggtattagtgatctcttcttccactttttttgatcgttttgttactaaaaaaagaggtcatttgtatcctactctacaggtttggaaggcttgcagcctcagcatcatcataaataaaaagcacagaaaaatagacattgcagcagcatgtgttcttcttcagtcgctcctctttctcccctctcaatctgtttgttggcttcagcttcagcttcactctcgcaattgatccacccatccatcaccaagaagggtcagccgatccaatgcagcaccgcacaccatcactgccgccattgacaggttttacactaacaaagtctaagtcgcaaagacgatcctaaatcgcaatcgcggacaagagtaacttggaatccacgtctttgtggccgtgcacgaactgacactaacaagcatttcgacattaagcacttgcaggtgataattatagaggggggcgttgccgttaagctctcgaggattaaaggggaggaggggagagacggagatagatggccggtgggggcggccaacacgggacctgtgagctaccgcccaagatcatttctttttctggggtcctttccggcggggcctcaccacttcggcacactcacacaccctctctcgccgctttattcttttgcaaaatcattattgtgctcctcctctcacattgccaatgccatatgccatcaaagatttcttttctttaatgttcttttctcctccttttcttttcgcacaaacaaaacaccccctcaggctcatctcacctcatcttcaccacaactctatagtagaggcgtcaagaaccttttgttttttttttattgatcatctcactttccttgccagctcgcacttagcatcgacttgtcgccctccgctaaatgcgtccaaccaaaaaatataaatatatatctccccccgcgaccgcgaggctgcgaagattgtagaagaaacatttcgtgtcatttggtacatggaatcgtcctcgtcgctggcaggtggggccatggtgaagggcacgtcccagctcggcgcgcccgccacacgcgtcggtctccgcccgtgccaggccgcgggcgagccgggccgggcgcgggtgtggctcgcgcgaaagtgatggtctaaccgacggggttcttttctgactttacccgtggcttaatcgcctgcttggattcttgctgtgcttggagttggaattggagtctgttcgtaaatcggattcgctgtgatgaatctactccgttgcgtgccttgcgatcgaggtgttgtgccgtataaatgtttttttctttcctttggtgggggttctgacaggtacgtgcttctgctgctgattactactcgattttattcgtaaagctaaagctaatcagcacctgattgactagttgtgtgtgtgtgtgttttcgtactagagagtccgtcgcgcctaatgtccttgtcgttccattcatgctcttcaatcaagctcattcttaattgcagacgatgctgatttctgttggtagtaatattgttagagaagaggggagccgtatttctttctttgtttctgtcttttgtacactttaggttaacaatgccagttgctgtattgtagtatcatcaccgaaaaagccacaccacctttatgccgtacctccggcgaaactgtgtctctttctcctctcggtagaaaaaggccctcaacaaaatgttgtgtcctttccgcggaaaccctaaaaatgtactactgcgcagtacagaataccggtgctgtctttctcctgacccctgtggactgtggagtgccgtattgtgatacgctattgctcgcccacgatggacgacggaacggatggagacggccatggagggggcggccgcccttgattgagagcgaactgcgcgccgtggtcctctcgctagtagtctctcctcgccgcctgatgccattggcattggcatgtcacgcggcggcagctcacatcatgggacgcgcggtcttctctcccgcctcgttccccgtcggttggcatgtccgcgtcgccgtgcccggtcgcctccgcgaccgcgagtgaaaaggaggttcacgatctagtagtttttgttgccgctgccgccgaagcgtaatactccaacgtgatgcgtcgtgacgcgcgtgctggtagtggtaggtaggtgcgcgcgcgcgcggccgccgtgccgtttgtttctgtcgtcgaggaggccgcggcggcgcggccggctcggtgaggggtgttcggttttttgcctagattttaccatcatttagcatgatgtgcagttgcatcaacgtatggacggaaggacctggaccacgggggaagtatgacctttggagtttggatagttgacccttcttcattagccgggctaggttggttgcccacaagagagggattccaaaatgtggggataggaacacatgctgttgcgttgggtggatctgccaggaaagaacggtcgatgctgtttcagggttcgcgcgcggtagccatgttccgtggctggggggtacattcctgtttatcgatctgtggctgttaaagattttccatcctgggctgcttggtcgctttggatcgaatgtcgctgctgaattatgcctggaggtgtacggtgaacaatggcaaggacattcccaactattgtaaaacgtgcaatcatgctgcctataggtcgggtgacgaggcatgcagcaatatgtttgggtaaattccagcgtattccctgtgcaatattgcaacgtaatccgcatgctttgcttgtccttgccgtccatcagccatccattcttttgctccaaaaaaggtcgaatatattgccatcatagatgcaacaggcaccttccatgctccaatgattccatccaaggcttatcatcaccctcgtccttagcaatggtcgccatttgtaattcacccaaatctgtgattgcaatctaatggagagaaaatctcttgttcatatcaaaggtatcatcaatccgcccccacgcattagcataccgccattcatgtcccgtttatgccatggaccgctgataagaaggacgtagatacatccaggacaagttaggttaggcccctgctacatgatctgcattgcacgtatgcggataaggctggaacattttggtgtacctgctctccacagaactaaacatgacaaagccagaactcttatctaggtctccctaccaaccatcactggaattttgttagcgagtacaaaccgaaaagaaaaaaaatcttaaatcgtttattatactatagatattagcctgtgttctatgaaatttatgacattatgtgatacaaatgagcctgaaatattggtgagcttgtcagagcaggtaatagcaggttataagccatctataaatatattttaaagagataaataaagagagagaagagcagcgggctacagatttgtagccagctgcagcacagactccaaacgtaatgtgtatatgacaggtgggaccagatattaatagtatagtaagcaactattgtatgaattggctattacattggctatagatgatttagagctagtagtgagctgtaatattgaccttgctcttagagcaagtttaatagtatagctcactgcttattattagtcaatgttaaagctaacatgtatagtaggttggctataagatcatttttattttcttcatcctctctctttctctcagtatgaatttaatgcatatttcttgtagcttgtgtatagtgagctcttacatgagagccaatacaccctacttttgtttatctctctcttccacataagcatatagcttgcttatagcccactattatcttgctcttatacgtggtcgtccctacgtactctgcctcgggaaggggggctcctactccaagtcacttgcagtggcagcaggagtcctccagggttccaggctgtgaagccagcttatccaaggctgtatcgctttgccgccgcggtctccgccatcttccactgcgctgccgcttgcacatgcaaatatgcaatgcaatgcaacgtctcttatcctaatcgctttgattgcctcacactcccctaatccccttcgtaaatcccaatccttccccaaatgcaagtggatattggcttaattcctacgtgtctcaaatgtcaatactatacactaaagcattctctcgagccaagggggaccctttggccgctttggactaactgcaggggaccatgacacacatacgaccctgcagtatggtcgtgtatatcctagccgaaaatggttggtatgtgacaaactatacaggatcagagaggatgagaattgcgtgttgcaagatttgacagatatttctggaagaacaaatggatcaaaggccacctactcacctgataacggcttaattagtccatggggatcgaactcatacgcctggcagctgcaagagaacagtagtagggtccatgtatcgactctatcatctctgtgttgatgctgagattgctggattgcagttgaaggggacccatttcctctcgctgtccatttcttttgtgtacggctatatcaccatctgcatctatcgcgaccgtcgatgatgagatcatcggctgcgagttgtaaatggacccagaactgttgatcgctaaacaggacgacgtgtgtgtatccaccagggtttacaatctcgtttggcgattgaaatgtgagccctagcaagttgacgagtcttgtgaaatatttgagcaaaaattaagaatttcaatgtaagttgaaaagaaacaaaatgtgaatataaattttcagcgactgtgaatcaagtaatcaggtatgaaattcgattaaaatcctagaaatttggaagtattagttagaaaaaaataaacatgaggcgataaacgaggggatcaatagcccaaattaaattcaattatgttttcctacaaacagacatatcgcccaaaaaatgtgagaaaaaaaattagaaaatgcaggagaaatgaggagaactttaaaatatgtggcaaaaatatagtacaaaattaggaaaagggatggggaaaggtggaaaattatgggaatgcgtagagaaatgtagaaaaatattaaaccaaatattaccagttccaaagtataaggaattttacataaacaactactttttgatgaaggtagtatcattttttgggggtggttggtagtatcattttttttattgaactgatttaattccacttgatatcaaactgtttataggatttaaaaaaacatatttctcatttttcgaaagggtagatttaccgtccttgataatgtaccgagaagtaccacattttctagtgtaaaatttggtacctctagctactaagtatcatatgtaccaaaatttctagtgtaaaatcttgttatctctaagtactaagtatcttatcttaatgtatccgaatttctagtgtaaaatattaatacctttagatattttctcaagaactgtaaaatttctctatttgaaatggccgtagtccattcgaaattctagcgaaatgttgtttctatgtggatcgagaagttcatttttgcgaaatgtgagaaaagtttcagcaaaattacaaactcttatagcatctccaacaacatctccaaatctcactctccaaatatgcatttagccaccttgacaaaaatttggatagtcaaatctgcctttcactccaacagcctctctattacagttctccactgtaactgtgggtcccacgtgtcagttttttcacccttcttctccacccccctctctctctctctctcttcttcttcttgttcttcttcttcttcttcttctcctctcatctccgccggctgaacccgtgcggtggcggaggtgctgtggagcccgcgtggcggagaagggaaggcggcagcgagggaggcggtctgccggcgggagcggcgcacgcgtcggaggcgttgtggagccgcgcgtggtggagaagggaaggcggcgaggggggcggtcggccagcgaaggcgctgtggagcctatgcggcggagatgggaaggcggcggcgagggagacggtcggccggcgggagcggctgtgtggcgatgggaaggcagcgacgagggaggcggtcggccggcgggtgcggcgcatgcagcgatgggaaggtagcagcgagggaggtggtcggctggcgggaacggcgcttgcgcggaggccgatggcaacgacgagggaggtggtcggccgacgggagcggcgcttgcggcagaggccggtggcaatgacggcgcggcggaggaacggtgttggcggcgcgcagaagggcggcacgcttgaggagaggcggacggagtgagaaatgggtgggcccatgcgtggggcccatgattagcaaggcaattttggctggccatctttggccaatgaggggagccgaccattatattgaagaccgagtgagccgaccaaggcagtcttaaagaaataggagtactaattagggcgtatggtttaagttgaggcgttcctttcaccatttcatactcgtgataacattgctggccatagcaggggttttcctgagcaagattcgtacagctgatcgctctctcacttactagaaaaatagagaaaaataaaaaggtgacgcgcgatgtcatggcacatctgtgcaagcgatcaagttaatattaccgagcaatcacaggcaggttgtcgacgccgacgccgacgggccaggcccggccacctacttcgttttgtagcaaccaagcgaagtgtttaagcctttttgtcacgcaatgcagtctcgacgacacagctgcgacgttcgtgtcacggctcaccgcgcccctcgctaaattgttgttgagcgtcacatgaagccggcagggccggccggtggtgaatgcttggaggcactcacgagccatgcagaagccaacattttgcgtacgctaacccatcattaccaacatgtacgttgtacagctagtcaggagtcagccactagctactcctgtgcatatatatagtaggaaaaagtatactagctgggaacaaaccttaataaaactgcgtgatcggtgaccgatcaaccgacagcgtgacagcgccatcccgactgatgaagagcgcggaacagaggcgaggaggcgagctgctgcatgcaggccagatcttgtgttgatactggcaacgtgcagcgcgtagcgcacctattagtgtccagcccacgccgaggcaattaatcaggcaaccgacactgccggcgagacggaagtgaaacccgtgtggcaccgtggcgcgtcgtcaggggacggaggctgcgagtgcgagacgatttgtgtcccctcgcgtgcgtcgtgcgcgcggttgagaagggggcccttgctggctgctgctgctgttgcaacagcgagcagccccgcgtgcgcgatcaccgacagggggatgcgcggatccaaggcgcgggaggacaaatgccgggcggcgaggcgtacgcctgcctgtacgggtgcggccggcgacgaaccgcgcgcgtctgcagtgcagcggcaaattattttagctaaattattttagctgccacgacaaacgtactccctccatctcaaaaatataagtatttttaactatgaatttagataactttatatccagatttataatcaaaagttattatattttgcgatgaaggtgttagcatcaagcattcattcggtaggttcagttgcttgttggaccgggctcgctaaccgaaataataatgtgcattgcttgaaacagcaaaatttgagtggattttgagttgtaggaaaaacaagcgtcaaatattgagaatagaaaggcaaacattggttctggcagtgagctttctttttgtacgatcagcttcaccatttttctgtaggagctggggtatataggatggatgacgagggatggttgactggtcaacttcttcggttggagcagtactaggcatcagtacgaccataaatatagtaacccaacaagcaacaggtccatgtgcagtttgttcagattgcatagtttgagagtagcagccagccagccagcaagcgtcccagtgtcagcaacgtgaaggtccaggaaaaacggaatggaacatgtacacaacaaaaggacgtagacagaaagggctaattcctgaacgttcgtgcttgttgtttttcaccgtgttctaccttttcactgatcgaaaattatgcactagaagtttacaaaccaaaagtttgtacgtccaacttcgagtttgattcaaatgttgctacatcaaaagtttctacatgtaaataaattttcttgtagaacagaactcacaatgaaccaagcacacgtgaaccgagaatatttaactatttaccactcttagatttagcgtttaactatttgaaaataatgtgtttatgacatgcatgttgcaagtatagttaagtaccacacttagagcagatacaatagcagactataattcaactataaccacatatcgagaagaaaagagaagagagagaagaaagggggctacagatttgtagccagctgcaacacggactccgaaatgttacgtgtgtatgagaggtgggaccgagtattaatggtgtagtatatttttatagttaactattttatgaatgagctattagattagctatagttgatttggagccagtagttagctatactatctaagagcaaggctaataatacagccgacctattgtctataaggttctttgtagtcctctcttggcctacccatataatagttagctctttacaattaatacatgatccacttgtctctctcatagtgtttcttggttcttatgtccaagccggctgtaagtttacagcccgcttcttctctctctcctctcttttctcctcaactcagcatttagccggtttatagcctactattatacttgctcttaaacttgctcactccccggcacacaaaacgaagcaacgtttagcgcgagattaattaagttgtagctttttttagaaaaaaggattaatatgatttttaagcaacttttgtatataatttttttttaaaaaaaacacaccgtttagcagtttgaaaagtgtgcgcgcggaaaacgaggaggggagttgagaacggcgggaactaacgcaggctaaaagtgccaaatagttaaatattctcgtgaattgagccttttgtgtccttgcaaaatcgtacaagaacatatccatctcgaggaacaggaatatcgccgaggcccatgagtttcagccgttggcagtggcggcaaggtctaggcttatggaagtatacgacttatggatgagtagcccaaattggttgaacagcccatataagatgcatacgtggagatgactgggcctgctacgaactgggccttgtaaaaagctggccctttctgaacataacttttggcccacgtatatttcctatccgcatatctttccggaataagtctaattttccatcctggaaatcttatacttgatcaaatcacatccctcatccgtaaaaccgggtataatacctctcccgacataaaaaaccaatacagattgactcctttaatggtttgtaaagtagtttatgctgacttggtccaagtatactgttgtggcagcctaggcactaaaggaattgaaaatagaaagtctccccacatatatgtgagaaagggtaaaaaaatggagggacccacttattagcctcacaactcctctcttagtcttgacacgtcgccctggtgtcgcaatcaccacagaagagtgagtggttggtgggcagaagcggacggtgatagtggggacacgtagcgcttgtgatgatgatggtcctcgctaccacgcgtgccgccccgtcatctttcccccgaggctgtccgcacaaatcttgccatgctacgtgtcgccgatggccgtccacaacttacaacgttgagcctaggggcgcggtgtgcatagcactattgcccgctgtagaaataggcacgaagcgatgtgaggttcttgtgatggagagtggtgatcgcgactaccttgttgcgaaactcccgttatggaataggcgcctagcagagttgcttgacaaccatgatgttgatgccacccttgagccgccaatcaccacctgatgcataataacccgccctctagaaccacaacccgacccttccgacagcgcgggaccacttacgcatatcaacccatttgcacttcatgatcacttcgtgtaaaaggttaatttgggaataatatggttgaagggataagttgattcactattgctcaattagcaaggtgatactaatttgagccttgttattctcttgtcccaacttatgcggggtttgaatttgtcgagttgtaccagtgccctaaacctaagtattttattgatcaggcaccacccatatttgaattggattcaactcgctctactagcaaggtgctactaatcaagtgcatagaggattcatggaccacacatgtcacatcccaattaggccggtatgtcaagtacatctcttgcaaaggagcctacatttctgatggttcaacttacctacatagccacacaggtatatatacaaatgtccaggaacgtgccccctctcagcggatgttcgtgcgtccagcgtcggcgccatatgtctcgcacagaggtcacatgcgccatgcatcatatactcatatgctcgcacattaacccatatgcacaaccgctagggtcggctataatatcatttgtaacaaccctgtcctcaacaaccacgtagcccaatccatctgacagacaagtcccacttacacataccaccccacttacgctttcgtcatcgcttcctataaaagagttaattcaggagtaatatggttgaagaaataagcctttataagttggttccactcttgctcaattagtaagtagatactaatcaattgcacacaacagtcatgggccatatatgccacatcccaattagcctaggatgtcacatgatgcagacgaccaacaccacagcgagagcactccattgagctcatggttagtgaccatgacaggtcattggcgagctgactagatgggttgcatctatggagtatttttaagttctcatctcgaaagaccagaaaacaaaaggatttgagacaaattgacaagaaagaagagcaaacaaaggctcacgagctcgtgtttagcgtgacgcccagcgagactacccatgtcggcaagggaagagggaagtgaggagagagagaggggtgacaaagaagatgggatgaggtgtaaatcattaacatgtgggactcacctactgattcaagtatgtcaaccgtgattaacctatcaagttagcataatccgctttcaaaaaccatcaaaagagataatttgtaccaattttcaaaaattaatgagacgttatggtaattttatgattgagggagacgatttaatcaaagagtaaaagataaggaagagggagacggaacctttgctttccttgctcatttcggggctaagggcagtcccaaccctccacctaggatggtgtctacagtattaactacattgtcatgtagaacttttagcttatgttgcactatattaattaagagagagagtgaagagaggaagaaactgggtctcatgcaaggcacaacttcaacacgagaacctgtgcactagactgggagagaatagtgttttcataatagatgaagaataaatatgattggtagagaagagagatgatgtatttattagtagcctactttaataaaccatgggttatagagtgtagtttctattgtgatgtcttattaacatggcatcatagacactgtttatggacgctatgggttgggaccgacctaatttggcctgatacacttgtcctacctaggttgcgacgaccacggagacaagcaccctctgcatgttgcacacagagacggaatcaacggcaatcacggcgatgaacgtgagaccacgtccacatgtcgcggcaaactagcggaatgaaccaataaactattgacggtacaaaagtgaagggatcgcggcacctgttcgggccgggattcagctcatcagctggctccgccgagtgctcggctgctcgctgagctgaggcatcatcgagacgtacgggtacaaaccgcgacaggtcctcacatctggctgggtcacaggcagaccggttcgacttcgtacgtgcacgccgcacgcgacgttcctgcttggctccggtacgaggagaaaatctcacgtcaactcgatcaacgtcgagccaccgacccccgtgcgaacacgtcgttattagcaggcgtgcatagataatactcctactatggacttgttctccgtgttgcttatttatgttagtcaattactctttagcttttttattcaccgcaatagatggaagcctggacgagtaacaactaacaactcatgcgcaataatcctcatcgatttgttagcaaaaactgcttgattagctacgcattttgcttcgttttcgaccccacatcaattttccatttttccttcacaccggaaccatcgcgaaatgccgaaatcctcatgaaccctctgctctgcttgattcaccgagtcatcaaccgaccttgcgcagttgtgctagctagcaggagagcaccctgcacgaacctcacatgtgtgggcggtggggtcacccgaccttgccaaacaaaacgtctcatcggcacatgcgtgggcccacccatccatcccaagatcaaacgccagcctgatatctgaccgtccgttcctgccctagctagcatcggacggctcaccccgtgtctcgccacgcggcccgaagaagaaaaaccctaccgtttgagcagtctccgctccacgggcccactcgtcagtgagaagtcgcccagttaatcatcgcctcatcggctccacgctcctcgtctctctcggccggcgtcgctttccacgcccttttgttcaaaaaccacacagttttttttttctttttgagtttttattagcaaggggaaaacacggagacgaaggaagcagccagcaagctgctgacgcacgcggcgccgctcccccagttcaaacccaccaggccaccaccaccttcccccaaatccccagctgtgtgtgtgcacgcggttttccaatcgattcttcttcttcttctacctcgcatccctccccccaaattcccgcattcgctagctcctgattcggccatggcggggtgtattgttgttgtatttggggttctggtgctggtcgcggggatggcggcggcgcaggggcaggtgccgtcgccgacccccgcggcggcggcggcggcaccggcgcccacgccggactgcaacggcatcctgctcacctacaacttcgagggccgcgccaagatccggccctacgtggcggacaggaacaagcagccctactcgttcagggccaacgccaccgtgctcaactccgggacgcgcccgctcaagtcgtgggcgatgctcgtgacgttcgggtacggggagatcctcgtcggcgtcgatggcgccgtgctcaccggcggcggcgagatgccgtacaacaccacccaggacgccggcaacgcgacgtcgttctccggctacccgcagaccgacctcctcaccccgatcgccaccgcgggggacatctcgcagatccaggccaaggtcggcatcgtcggcacgctcttcgccgggccagggccgttcgtgccgctccccacggcgctgtcgctcgacgacccggcgtacaggtgcccccaggagaccaatgtttcctccggggtgctctccacctgctgcgtcctcaccccggaggcggaggccaacgccaccgtcatcaacgccaacgccaccgacccgaccaagaacttcctcccccgcggcaccggcgacctcgtcatcacctacgacgtgctccaggcctacccctcgagctacctcgcgctcgtcacgctcgacaacaacgccaagctcggccgcctcgacaactggcggctttcctgggagtggcggcgcggcgagttcatctactcgatgaagggtgcgtacccatcggagaaggacacgaccggctgcatctatggggcggcagggcagtactatcagagccttgatttctcccaggtgctcaactgcgacaagaagccggtgatccttgacctgcctctgtccaggtacaatgacactcagattgggaagattgaccattgctgcaggaatggcacaatcctgccgaagtccatggatgagacgcagtcaaaatcagccttccaattgcaggtgttcaagatgccaccggacctgaaccggacaaagctcttcccaccggccaatttcaagatcgccggtgcatcatcactgaacccagactacacctgtggccagccggtgcccgtcagtcccacagagttccctgatccaagcgggcttgattcaacgactctggcgatcgcgacatggcaggtggtttgcaacattaccacgagtaagggggcgaagccgaagtgctgtgtaaccttctcggcatactacaatgattcagtgatcccctgcaacacctgcgcctgtgggtgtccgtcgaaccagcggggtcctacttgcagcacgactgctcaatccatgctcctgccacccgaggcgctgcttgtgccattcgacaatcgcacacagaaggcattggcatgggccgagttgaagcactacaatgtgcctaagccaatgccttgtggtgattactgtggcgtgagcatcaattggcacatatctacagactacaacaagggctggagcgctcggatgacattgttcaattgggacaatgtcgacttggcaaactggtttgctgctattgtcatggacaaggcttatgatggttttgagaaggcgtactctttcaatagcacatcagttggcaagaacaccatcttcatgcaaggtcttgaggggctcaattacctggtgaagcagaccaacatgagtggatcagactaccttgtgcctgggaagcagcagtcagtgctctcattcaccaagaagctgactcctggcatcaatgttgttgctggagatggtttcccttcaaaggtcttcttcaacggcgacgagtgtgcaatgcctcagaggattccaatgagcaatagtggattcaggacccatctcagcagtgtcctctcactggttttggtcctggctgcttcggccttcgtattgcttcagcaataatcctggccgttgctccgattctttcattctttcaggtggttggatcgacgccatttgtaagaaacctttttgtttctggcggtttactagatgcgtaatggttgctatgtagcagaatctggcagcaattgtgcggcgagatgaacacatagggggaggaaacattgttgcagacttgcaacatagcatcaggatcactttcctgaatcctgatgatatttattactacatgtttacatcaagatgagtgatattgtacatctctgatttaagttggtgtagttgccaggaatgtcttatgtttagttatgttatatacaaaatacattttgccatcaaaccgtatgtctgctcattttctgtctgcttttctgaagctaagctgctctcttcagtttattgtcataccatacgatacatggtactagtaattctgaaactgttgctcttgcaagtgggagcaacattggatgcttcttaatcagatctctacagtattaaatacgaactaaatgaatgttcgtatgcttcttgtatacaaacttcaaaacatgtttggaggataacgctcgaaatggccgttgggttagctggggaccacagcttcagtgccaatgtaatttcaaaccatttggcaactttgcaagcctatagtttttttgcaacgttcaggtttcaaacagcaagaagcctttcgctttcttgaaagcaacttgcagctgacaatcttatgcccttctttatgagcattgaccgaatcaaagaaacggacgatactggtatacaggatagatattgttttctctagtaatcttatgacatcgcacacttcagttaacagcaacgtccttttggttctgaccatctcctccatccagagagtccagacttgttccgagttgcagctgaggaggagtagcgtattatcatctctgcacgcaatatcaatgtgttatatgtccatgtcaaacctgagataacataactggcacgcacgatcatgtgtttgttttatgcttatatgcatgcaggattggggtggtttgttcgtgccaggtggtggaacgcaacaaacaccgtgttttagatatagactgcgttaaccctggggactaccgattgctgacattttctaactgtacaggctgttgatgttgtcaaaagctgatgtgttcaaaacctactatgattcttcacgtgagagcttgtccacacggtaccactgtttcatgttttagtcatctactagttgtgaaaacaggaggcaatgtaattgggtggattgacaaaatgatgtagctgcattgctcagcaatatggaaatcgaaggtccagcaaccaaaatgatctggcatgacggtacgaatttgacgaagtgatgtactgctagatgtagccaggactgatggcactaacatgctgaaaagtgatttgaggaataaatattttttttattgattcattcatgcggagcatgatgctgcaaatcctgcgctaccgttggtgcaagctgagcatcatttggttgactttcttttaacacatgcgggatgttctggttctagctgatctttctccttaagaactcagacgtcctggcgttaatgctacgagtaaacatagacttcttgatggagtcaaaacccagaacatcctccccaaaaaaaaagtcccctatgccgcgagttagagtctcatcgggtgctcatacaaagtatttcccaataagccgttttggcttattagaaaataaaaaataatatatttgttcgtagcgatttaaaaaccaatattaaaaaaatacgttgaaaatatcttaaaatcaattttaaaatttagtttgaaaatttaaattttagcttttactttgacttattaggtcaagtgatggggttcacactggccagtgatcacaaatcaaagtgacggtgatgtaaacgtgctaggggcaatattccactggaaacttctgaaagtagctgattatggtcgttttgaaaagtacagtgtttgttagcttctgcttttctcgttgatctttccttcagcgagaacggtatttgattcttgatttctaagtggacgcaaagagaaccaaactagagcaaatctcaagtcaatgcgatctttgctatgcctcagcttttccaacaacgaggagtcccacaattgcaaatcggcagtctccagttctccaccaaggtttatcttaccagcagcggaaactgccggtaaaatttggtaaattagttcgaatttagatttgaaaaaaaaataaaaaaataaaaaaaatcatataagtaataccgagtttgtagttctatctgataataaggttctatgaaatgtactaagttaactccatgtattgcagccgaactgaaactgagactaaaattagaaaaaatagacagatgggctaggccaatagtgaacactattcatgaagcccattaaagtccgcttgagggaaaaatgtgattcctactttatttcaagacgagcacatgataccattcgaacgagatacttttatggaggctaacgtcatcctgcccctactcctcgtgcttgcgtcctcgcgccttgagccagcgcgacagcagtagtaaggaacaagggtcaagtcgagaaaaaaggagaatatgagaggagacgctgatgcttggtacttgctacctcgcaagtactaatcctgccatcctggtacctagggtactatgtatgatacctattgtaccgctacgaacgatatatcatgtaacgtacctgcacaaactccaacgagaagcatgatggctcaccgtcatgtcgctgccaatgaaaacaccatatctagaagcttcattggtcacacccttccatcactctcgacaacatgcctagaaggaggaggttgagaagcccacgccaatcaacgtccttcctaatggcttcacttcttctgattgcccctggttaccatgagagctagattccaatgggtgtcgccatgcctcaaaagcatgagatggaggaggccacgagattggtgccgtccactatccttgttgccgacatgcgctcggactggatcaaagcagtgaagagggcccatgcctctagatccgttcttgggggcttgctccaccattgccatgtctacatagggaagctctttgtggagaggaggagaggggaaaaaaggggaaggaggggaggataacgaaggctcgaataagactgaatcgttatctacttatcccatttccatgggattttgtagagtagttttttatgttattttaattttcaaagcatagcaaaggtcatgccaaaatatcacgcatggctcctaacatcctgttatcttttctattttctattttttccctacaatttcttagttttctacaatttatagttttccaaatagtatatccgtcccaaaatatgttcatttttcacccatcaaacacatatcaataaaaaaagattagaaaaccactactttatcaaatcacaatgcaaccattcatcactttatctattctcaatataattattccctactttcacaacttcaatgcaatgattacttaacaaataaagttattttatgataatgaaagaagctaaaacaaatttaatatgggatgcataaagtattgcgtagaagctcagaaacctagtcaagactcgagaggcggtggcgcgtcgacttagccgttgggtaccagccggcagccgctactatgcggttgttctgtgcaacaccaatccttattattgccgcagagaaagaattagagacgaaacgagatgaattcggcgtccacccaaaggaataagttcactttaggtccctctatttgtcgctcagtctcattttcgtccctgcagcacaaaaccagatacaacacatcccccaacttacaaaaaccgtgcaaacaagatctctcgcgcggtatagtccctggttttagctgacgtgacgcctacgtggcgtttgacatggcaaaaaaacctaggacccccatgcaagtgattgttcgattaaaaataaattatttacggtgggacccacgtctcctccagtcctcctccccaatctcgctgtctcctccccaatgcggcgacccagcggtggcctccccatctcctcctcctccgggatccatgcggcggcggctggaagggtgggaggacgagtagtggccggcgaggaaaaagggcagagcttgccgacctgtagacgctaggaggggtcttctcctcagccgacgttgtcctcctcacagtcggcgccgtcctggttggcttcctctcagtgtccgtagcaaccgtcttcgcctcaccggccgccattctttcctccatggcgccgcctgctgccaccttcctggacttcgagacgatggaaggggcctttcgttggccggctcaaaggagcccatcatctcctcgaggtttagcgagctgatccggatgacgtcctcggtccatccccatgaggtggtcgacggtgagcggcatcttcttggccatgacgaggtcgaagaagttgggattgacgaggttgggggtgatgggatcaagtgggacggctcccatgtagccgtcctagccgttgcagaaggcggtgatgttggatcagtaggtcatgtcaatggggccatgtcgacctcgatgaagaagcacttggccttgccgatggagtggccgccggtgaggacaaccatctcagcagtgggcggagctgagggcggagcagcgacgggccgcgggcggctcctctcctctcgccggtggtgccccgcgtccctccggccatcgctgtgacttcgcctgctccggttgccgcccaccacgctccgccggctggagagagagaagagggagagagaggatagacatagaagatagagagaagatggtagtgagagcaaccacagtgtttggttcgaccattgtattgatcgaagtcgaatggagagtgaaatcgatagctgcagtgtgaaatcaatttgtggggccataaaaagaatccatcaatcaatcagtgtgtctaatttctatgtatgtatggacaacaaatattttttctccctagagttcgacttcaacttagagttcgatttttttttctgacaccatgagtcggctgccacaatgtgtatggttcgcttttctccgccttaaatcgattttactttcacgctggagatgctctgaggatgatgtgtgggtccacatagggcccaccttttttattttttgtgtgaaactgacatatgggtcccacgggttttattattttttttatctaattatcacgtaagcactacatcaatgatacgttggacaaagacatagtcaaaaggagcctcataggcgccacctcagctaaaaccggacacaatactactgagggacctcatttaaacggtttcgtaagttggggacccgtcgttttgtgaccagggtccgtaaatcggactggacgacaaatagaagtacccaaagtgaacttattccccacccaaatcccccaacctcaaaagcccagcccaacaagaagcccacatctggagagagaaccaaaacggcacggaccacgtgcagagcgccgtgccttgaagcaaaccgaaaaccagccaaccatttcgaagccagaaaaacctctctccattttctgaagcgcacacacgccgtattcgctttgccacttgcggcggaagcgccactctctcctctcctctcctccctcccccccacccatcccccgcgccccacgcgcccacgttggcggtgcggttgatccggcaacagcgggcgcctcctcctcctccgcccccaaccaccacccccacccctgcggcgcccatgggtgtccgttcctgagcacaccccacgcttccgctccgcgcatctccgtgggtgggttgggcatataccttgcttcagtcgctttcccatctcttgcttcgtcctgccttcttctttcttccgtgatcccggaacccggtggtcgccgccgcctcggtggatcttgctcggccctgcggggtgctcaggtgcgtcatcccttcgctgccggtgggcattggcttgtgttgctttggttagtctctgttcaggcattccgtcgagcacctgtgctgcgttggggcattggaggccttcttgtttgtttgatctgtaattagctctggtggtgctccttttttttttcgtgcattttgattgttgtgtgtatcttcccttttcctagttttagcggtcctgaaaaattctgggttttttttttctgtgtttctttcagcatgtccccttcatagcaatgtacgctggtcatgatctagatccggggttggctacttgatgtgtgaaccgtgaataagtttggtaatcaagtgttgtgagttgtgatttggaatgggtttgcaatcatcttgtgtgaaccaagcatgttcactactcaaagcagggtgaattttcagcatgatgtttgaatttcatcttatccatgttgcctggttatcgttgtctcgttgatggtattctgtgaattacattaggttgcagaaaatgtttatacacttacctgcctggtgaaattgcctattttgtgtctgcattgtagtgatcgcatttgagaagcttatttgcacaatgtcctacacaaactgtttgaggagatatccagttagagccatctttccatacactaatgccatcctccgagcttctttggagaaaggatctccggaaaagtcactgacagattacaacagtatgcttcgtttcactgctttctgccctgattacagaacatatgtgctccttctcaaggcttgtgcaaaatgttcaaatatctatgctatcatggaaatccattcccatctcgttaaacttggcctgctatctaatcaacgtatagtaactcatctcttcaaattatacattgatcatggtcgcgtgatggaagcttgcaaactattttggctaatgctggagtggagtgccgaacccttttatggaaatttgatgctcatgggattcttgaagtgtggacagatagacaaggcatatcagattttcaagaggatgcctgtcaaggatttggtctcatggaattcaatgattgcaggtacagcaaggaactcgtgcctgaaagatgcaatgaatattttcagcaagttggtcaattcaggtctagtgcctgatggcttctcattctcctcagtcctatcagcttgtgctcaagctggtgcccgttgttatggtatgtgggttcatcaactaatggctgaactgggattggaaatgaaccatattttaagttcatcacttgttgatatgtatgcaaaatgtggaagaattgacgtggcaattgggatattcatgacaattaagagaaaccatgtctctgtatggaacacaatgattggtggcctggcagcacatggtcttggatctgatgcggtgatgttcttccgtgagatggaaagtgaaggtcttgttcctgatggggttacatttgttgcactcttgacagcatgcagccattccggcatggttgaagaggctcgtcaatactttgaagcaatgactacaaagtattctatcactccgaggattgaacattatggtgcaatggtggatactttgtcacgagctgggctactggatgaagcatatgacttggtaaagacaatgaatgtgaaacctgatgctgtgatatggagggcattactcagtgcttgttgcaggtaccggcaaactaaactaggtgagatcaccgtcaaggagatagcgttccagggcagtggtgactatacccttctttcaaacatctactcatctgcgaatagatgggaagattcagaggaagtatggaaagagaggaagaaaaagggaattaggaagagcaagggcttgagttgggttgagttagggaggagcacccatgaatttaaagctggtgaccgatctcatcctgacactgatggcatttataaagtgttgcatcggttatcaaacaaggccaagagtgaaggatatattccattgactgaactagtgtccaaagatgtctctgaggaggaaagagaagaaaaccttaccgtccacagtgagaagctagcggtggcatatagtatccttaagacaatgccaaggacagagataatggtgtcaaagaatctgcagacttgcagtgattgtcatgaatggatgaagatagtctcgaaggtactttgtcgtgttataattatgagggatagagttcgatttcaccgttttgaaggtggatgctgctcctgtaaagattattggtaattcctgttttggagacagatgctgctcctgtaaagactgttggtcagtactgtttggagaactacagaattgatttgtttagcatcatatcaacagttctgacaggaggtacaagtagaaccagtggatataactacattcccttgtggagtcatgggtggtctatgtgactatgccaatatatgacccctataatacatggtattatcattttgtctgcacagcaggtgacatgaaacaatggaaatatgggtaaaccagcgcacacatacatgaaattgtgtactatacacgcacccaccaagtatgtacaagtatcctacagacttgaagcctgtcacccacaatagaaagatcaaaatattatcttctggatttttttgtattttctaattgactttgatgctcttatggctttccatgtgtgtcatggaaaatttttactggagtatggcattttctgcacttctgccatcttcgcacttttttggttgctttcgtggagttgatgtgtcacaggctcacagcatatgatggctgctttcttttctgtttggttgtattcttgtacatctcttctccgactagtttaatttttccaactaaagttattctttgtttattgtttcaggattaacagtgaggggacattctgtattcagtaatatcaagtttctacaaataaataggtgtaggaatacctttgatgccccatttacactgtttgtgcaatgtctttatattatattttctgtgggaacttccatcaactaaggaattcaataggaagctgttctagtaccggtttgcttaaatgcggattaatctatagaactgtacttcagaacagaggaaataaaactcgaccaatcagtacgacaatactagcaagaagtacaagaaaagaaagtaagcagtcattcaaaaccagccgtcatttgcatagtgaatcggttgagtcatcgattgaagtgctcaaacagtcagatcttgagcatcttaaatcacttcaatgctacaatattccacaaaaggtttccggagtgaagaccgattggcctgcaactatccttgtttttgatattgaaactacaggcttctcacgccgctatgaaagaatcattgagtttgctgttcgggatcttatgggaggaaagaatagcactatccagacactcataaatcctgagagagagataaaaaatgcatatgttcatggtattagcagcagcatggtctgcaaacctgatataccaaggtatgacattttcaacagatgctcagctgatattgttaaattatttcttcttatgcaaactgtacttttcatgcaataaggaaagtatggaagtaaaactgtaaaagggcatccgagagaacagtggactagttgcaaactagatattgtatctttccttgcttgcaaccattgacctgccatttttttattgtgatgctgtcttctgaaaaaaaggttccctcttctagatattccgaaaattcggtgctagaagaaatgtgaactgatatcaaaattccatttcctttttctgggataggtgcctcttttaatcatctccctttagtataagcttcagtcattgagcactaggatgccaaaacttgattacgttggactttttatgttctgtaataattatagaagttcttttttctggctatgcagatttcgggagtttatccctcttctattacagtatgttttgagtcgtcaaatggctgataaaccagttctgtgggtcgctcataatggacgtagctttgatgtaccatttctcatgtatgaattccaacggagtaaaatagagatgcctggtgactggctatttgtagatacacttccaattgcaaggcaattgattggttctgatggtacgttcttttgtcaagtgttctgtttacttgcatgaacttaacttttctgactaatttgcactgctagagattagagctatatacagttcaccctgatattacagtgtaactagcaaaacaaactagttttgctattcaacttccaacttttcataagcattcatgtgattttaattgttatgttgaatcctgaggcaaaaataaagttaagttagcaatattaggtcttctctaaagaaagttcagtttttatcactggattctttttctttttttcttttttactgcaagagagaaggcataatatgggagcaaagcaggtgactgaaagtaaaaccttcctgttattttatttgcaggggaaaaactgaaatctgtatctttagacaatctgagggagcactacaagatcccattggcagggagcgctcatcgagcaatgcaggatgtgatcaccctctgctatgttctccagaagttgaccttcgagctgaaactaactgttcctcagctccttgagaggtcattccgggtttccgatctttcaatccctcgccctggaaaatgactgcagttgcctcgccgaaaggatcacacagaaacctggattgtttcattgtccttgtatccagtgctgttgtttcagatcccagctcatatgttattccgacaacagaataaggcaggcctgatcgttaccgtgatattaatcatttttagtttagtactgatacttgttgccccttgaaacattgattagacgtacatttattcaaagttgtaaagaccaaaacatgtcctggtttccaacctggaagaaatgaaacgttcttgactatctgtagtcactgtggtactcctgttccagacaattttatgagctcctgtgtgatagactgacatgtagaagtaacaaagagaaatttattctgcccttgttgagtaggagtactagcggagtaatctccgcaagcggactagcggagtcaggagctcagtgatttgtcaattcattttcatccatgctgggctgtaagcagagtggcgtatctagaaattttatgggactgggcaagcctaacaataaattataaaatgtacctaattatatacaaatctatagattattttggggtgagcatttgctttgttagttgtagtttgttctaagcatgttaattatgtatgtacactatactactgcttctgtcagtgacttagtaattaaaatgattagcaatagcaaggtaattaggattaatttactgggacatagctgggcgtttgctccgccactggctgtaagcgaaaacctttgctattgggtgaatagccagttcagtccttcaacttttgttcatgggtcgaattagtccttcatgttttataatgtccaaccaagactctaaagattatcatgcggcttaatatagtccttagagccacttaaaacgctacgtggacatgccacgtcattcgtgcatgtaagataacatttaaatgtccattttaaccttcaattttctatcaaataaagaaaagtaaaataagaagaagcaatcataaaacaaagaaaaatgttaatttttttatctatcaatgctatatatttttgccaatggtcaaaagcttttttttttgtgtgttttctcaatagttttcctttatttcctatgaaaacataagggtgtaaaggacatttaaatattgaatttgcatgcatagatgatgtggcatgtacacatggcatgtttagagggtcaaaggactatattgaatcacacaatgaacttaaggtacttgtttggacaatacaaaatgtcagggactaaattgatccttaagcgaaagttcaaggatcatattgggtattcaccctttgctattaattaatagcatgcttattcagagttaaaatatactatgacaataccacaacaagggttttaactgcaaacaaacatttttatctcattacagatcattgcgatggtcaattgcaaagtttccgcggtgaagcgtgttctgaacttctatataaggcgggggcaatcgagtcacttcccccgagtctcaaaccgcagctagcctcccgcttccctccaattccccaacccaacgaccacatgaaggtaaccgccgcgagctcgtcgtctccctctcgatgaatcgatccaaaccctagcctcatctctcttctgctgctccatttgcagcttgggatctcgggtggcgcgggcgaggcgatggagggggagctcagcttcgtctcgccggcgaggtcgtcctgcttctccttcgagggcggcggttctggatccccgacgtgggtgtcgacggtggaggcgctgctccgctcgcctacatcgagcgtctccgatggcggcggaggtggtggtggtggctacaactcaccggcacgggcgtcgtccccgctgcagaagcagatcccctactgccgcgacgctggcgacttcagctctctgacatgggcgtcaactctggagaagccgctcgagtcgccctcctcgtgcatctccgacggccgcggcggtggcttcggctcgccgacaagcgcgttcccgcctgagaagctgctcatctcgcccccaacgtgcgtctccgacaaccgcggcgtcggcaacgttggcggcttcccctctctgccatgggcgtcgtctctggagaggctactcacgtcgccctcatcgtgcgtctccgacagccgcggcgtcggcaacgctgacggcttcccttctctgccatgggcatcatctctggagaagccactcacgtcgccctcatcctgcgtctccgacggccggagcggtggctacagctcgcctctcggggcctcggcggagcgagagcgcgaggtgcgcgaggcggagatgctcctgcgcgcgatcgccgagcgctacgacgactgcttcctccgcctgcgcgacgccgcggccgagctctcagacctccaccgcgagcgcctccgtctcgccgccgagaacctccacctctccctccttctcgaggagctcgagtccgagcagcggaagcaggcatccgccatggctccgccgaagctagaggaggacgaagcagcacaggggggcgcaccgaagagcatctccattcgttcgccgggctacctctctcagaagccgccgcaggggcaggccaggccacagcgcctccgtgttcgcgcttctcaggcgatggaggtgagcccccaattccttgcttgttaagctcgtcagacatttgcacacgaaccctcacagataattcagagttggttcatatgtgattagatggtgagaatgccagcattaatcctcacagataatttagagttggttcatatgtgattagatggtgacattgtcagcattaaactttgcaaaccacacatgctttggtaatttgatgccttgtttgtgatttagcaatgataggaagcaatgttgaattggatatgctcgattctagatttgcaaatgcggtagcagtcaatctcttaattctgaaagtctagttagtgaatctcgttggatatttgcacacgaaccctcacagataattcagatttctaataattcctgcaaattggttcatccctgtgattactgattagatggtaacaatgtcaacatttaacttgcaaaactacacgtgttctggcaatctgtgttagcaatgatacaaagcatcaaagtgtgttgaattcaattctaagttgcatttgcaataactttcagccttgtcaatatttctgaaagtctaattactgaatctggagaaacttctttaagatttcgcaccccaactgtttgatttttgtgatggggaatcaatgttcaccgaaggaggcagcggcagcaggggatgaggaggatgaggaggacaagggcggcggcgaggtggaggtggaggcgtacaggcagggcgcggcgaagacggagctgtgcaacaagtgggagcgcggcgcgtgcccctacggcgcgcgctgccggttcgcgcacggcctgcaggagctgcgccccgtcatccgccacccgcgctacaagaccctcccctgccagatgttcgccgccgcctccggctgcccctacggccaccgctgccacttccgccactccccgctccgcgccgccgccgccgagtccttctgctactaggccgcgttcaaggtaaacacgccttgccgcctccctgagcccataagctgttcatgtttaagcctcgttgcttgtagctcgtttgggccgtggtagtgtctagccacgtgatgggccaaatgggccgtatgtgatatgctttgcctatatagccctgggcttcttatcatcccatcacatggatactgccatactgggttgggctctatgtaaagcctggatccttcctgtttttatcctgcgcgtgcccctgcatgtttcgatgcttctgccaccatggggagtaggttagcagcgttgctgcatctgcatgtgccggatcaggtcgaccggaaagctgtttgcatagcaaattcagtagcctatagccacctctttgcccgtgtctgtacatgtaaaaggatcaactcgatgcacgaagctggcgaatcataaacagtaaaaaaaacaaagggaagtaagcaacacagtaattctacagacctccagggctccctccagtttgctaggaacatcagggtatagcacttagcattctttgtgcacacctgtgtgtcggccatgtctcctagccggcttagctcatgacgacaccgagtcagcagcatcagcatcagcagcagcctcggataccaagcgcgagcccagggacagcaaagggccgagcgcgcgcccaaagcgggcgaggggagaatcagcatcgtgtgcttaaagacctgccctttcttcccacatggacgaggggagagctaggatgcctcgcctttgtttgaattgctttcctggagatttgaagacagcaatggcagtgtgtggcaagagaaaaaaaaaggaaagccctagaggaggaggagcatgatgtaagccgcttttcagtttttaggggcaaaggcgacggtagaggcggatgagaggctctcccctctgccgccatgtcgtctgcttcgttatcctggggaagtgtgtgtgagtctgtgtgtgcctgcctgcagatgccctggtttcgcactttctaggattccttttcgggaatttggggggatgatagaaatgagaaatccatttggatgcctgcgcctgcacgtctgcatggccagtcggccactgcatacctgcagacttcacatcaggaaatctgcagagaagaagactagaagaggcagataggcagtgcctagatagaggatcagattagtgatgctgatactctgttgctcaggacaaaacaaattactaagacaatacacgccctgatcgttgaactgacttactgaactcgcaccattcttcttccgttccaagttccaacacagcaattttcagtagaaccaatcatgaactgatcaacagtgttcgttcgattttattctcacatttccaccgctgaatggagcaaaggagagataaagtggaaaagaaaaaaaaaagtaaacgcaaaggctcctatcacctcatctcctccatattctcgccatgcaaaaccagcacacgtacgaacgcacacgaacgcccgagagatggaggagaagaatcgcaaccccgcactctgtttttttcatcctctgctttgcgctttctcctcctcaaatctcctttcttccctctctacggtgttgcaccgcgcgcgcgaggccgcgaaaagctcccctttgtacccatctttcatccccccacgaaagcctactaccacccatcctccccgtagtagccaccaccaccaccaccaccatggccgttctctgcttcctcgaagcttctccaaatccagccgtgcaccagcacggcccgcaccccgatggcccgggcgtatgcccattccatcgaacaactccggggcgctctgacctcgcccccccgctttgccgctttctgacaaaattccgcgccctttttggtggcggcactgaaagagaggagccgaggtgagggggaggaggagaaaaggcggggaggagggagggtgggtgtggccgaatcttggcatttctagggattctgatgaggagctcgccgctttgcgatctttttgccggggaggcctagctcgtcatctcctcctaccgggagcgtgtccgtgacgagaccgaccccccctctcctgccgccgcccgtggggagaagcttccacgctgcttcctctcctcttgcccccgctatttatagccgacgtggtttctccccagggttttacggcggttttgttcatctcaggtgaactcaactcaactgaagtctggtgcagtgcagggtagtgtagtgtagtgtagtgtagcttgttgattcgagctgcattgcgctgatggacttgaagagggttttggaggtggaggaagaggtggtcgacggcgacgaggacgagctcgcctccccggaggccaagcgccggcgaactttcatcaagtgagtgaaaatggcattgcatttgggcatttcggttaagttcttgggattcatgagttgggttctgactgactgactgacgttttgtcccttgtcgttttcattgtgcagtaatagctcgatgcaggaggccattggcgcgcagtacatgcagaggcatctgcccaagctggagccgtttctgcgcagagttgtaagcaacattctgtagcagctactatacggttagctgcctgtcgagttagattctgctgaattctaaattctcatggtgtcactctcctgaattcaggtgcaggaagaggtgcagaatgttcttatccgccacattgattcggcacacaggttggcctctacattctatttgcattcagtgtttcatagtactagtagactagtagtacttcctttttgtttccatttacagaagtttattgctgtggcactactaatgacaacatagagcatctacgagttcaagaccctgtttatattttctccatgttatctctgaaatttaattcttctggaacttccaatgtcactatcgtatgaaacattctgaacctcaattctcagctcatgctaaaattccttcaagctgtcgcttatactaatttctgaatgcatgctgtcagttcagtgctgtccttcaccttttgactgctatatcagttttaccaaaaatgcccactcagatgttcctgtttttgtggttggaatgtgtcctgacttgatgtttgtcctgcattcgtcaggcttccccttcagctaaagacaagcagtaaacgatacaagctgcagttccagggcaacctgcctctgaccctcttcacaggcaacagagtggaaggggagaacaagcagcctctccgaattgttctcaccgacgctgtcagtaaccagacgatcacctccggcccgctgtcctccatgaaggttgagctcctcgttcttgatggcgatttcaacgctgacgagcgcttggagtacaccgagaaggagttcagcgagagcatagtctttgaaagggaaggcaagaggccactgttatccggcgaggtgatcattgtgcttgagaaaggtgttgcatctatccgcgacatttctttcacggacaactctagctggataaggagcaggaagttcagacttggtgcgaggatctctcgggccagctccatcgaagaaagagtgcaggaagctgtcagcaatccttttctcgtgaaggatcaccgtggggaaggtatgtccttattggtattcatttcatgctcaacctgttcgtcagttctatccttgcagtgttaaagaagaaattaatgataaaattttcatgtttcagtttacaagaagcatcatcctcctgcactagctgatgacgtttggcgtttggagaaaattgggaaagacggcgttttccacaagaagcttgcagactttggaattcacactgttcaagacttcctccggaacttggtgatggatcaatatggactacgtagtgtaagaaattaatcatcccttttacaataaaaacttctatttttttagataaacttctctgtccaactttaatgtagcttccatgcatatattctcatcctgaactgcatgtccatttttcagttacttggcagtggaatgtcaaacaagatgtgggaagcaaccgttgagcatgcacgggagtgcgttctggacgacaagctttactcctactgcagcgggcatgggataatccttctcttcaactgcatccatgaggttgtcggtgtgatcgttggaagccactgcttcactctgaatgctcttactccaacacagaaggtaaacacctgaaattctgagaaagacttgcaagttgccatcaatggcatcgaaagatgcctgatgcacagatgaaaggacatcctcattatgagcagcacctggacagcgtccaaaagtagttactaattgattcagatgcatggcagtataattgtcttgtcacccaattaatattgctaattaatttgcaggcgctggtggtgaagttgcagcaagacgcctacaagttccccaaccgcatagtggaattcaaggtgcagtcccagtgcaccagccagtcatcaccaaccaccatccagtcccagtccgtgcagatgccggcttcagagaacgcacagattctgaacctacctcaaggtgcccattgctttccatcaggtgtcttagctaggtcaaagccctcatagatcatccaacactgacagagaaagaactcgccactgtttggtgtacaggtgagctgccgagctcttcacaggactgcttgctgaatccgctccagtaccagccgctcaacgaggcgctggaagacgtcctccagacagccggcggcagccaccaccaacaccagggtggtagcggcgagctgccatggatagcgtcgtcgttcggagcgggcggcttcgtcgacgcgagggaccctttcgacgtgcagttcagcggctcccagccgtgcgggctgctgctctccagcagcggcgccagattgtgaggacgagacgcgtgcgtgtgcagcaatgtgcaatgcaagcctccgtctctttgcatggagccgagtaatggcgccgccattgtagctaagctaagctcgagggtagtggcgtggggtccatctaactgtttgtctgctaacactcacaaagttgttttgggtgggatatatagagagagagatgatgatgcagagaagacaataagtgggtataatttggtagggtatgtgatctaatctgtgctgttttgtggcatgtaaaatgacaagaaagcactggtctggagattttttttagtgctaaaccctggatctcctttgtgtaaaaggtgcttctttgtctcatcgtcttttctttagtgctctctcagttttttttttccaattcatttgcaagaacagcaaaatgaaataggctcgtcggtggatagatatgctatgtggtgtaatgagtttggatgggtccatagctggcagtacttggattatgtaagcacctactttggcgtttcagctatttatagaccatggcaattggccggcatgatgagtccccaacccacccttgtatcttgtacagtacttgccaaccgaaaatgctgtgccatataaatgcattcatcaatcattcgcagtgaaccagcaaggcgtcctccttcgtaagggaacatatcctgtacatatacaaggtattttcagttagtgtgcagggccagtgcaccttgtgcgcacataatacactccccttttgtaaagcagtaataattcatttgttgacaattctgcagagagagagagagagagagagagagagagagagacgttcaaggcttcaaggagaggtgcaattgatcaatatcaatgacagcgaaaatgccgtagttctagaatcagaagtccggaatccaacgtagatttttttctcgattacacgatagatttctcgattacacgatagatgcacatgtacatagttacacacaacatcacattcacatccccgtgaatgcgttcctcgacacatgctaaagagaaaccagcaacatgccggcatatccctaatatcataatccaacacagattagggatatgccatgcccgttcatagtggataaattccacaggaacttagaaggtaaaggaaacaccagatgcccaaaagcctaatacaatgaaaatcagtccacgtagaacaccgaaagacattaccattgattaggatagcatgagataaataaattagtctgttcggctccacaagcatatacattccaaggtagaacaaggagccttgccaattgccatctcttacaaacattgttaagctagacatttcactttacatactaaggttcaaaaaaaaaaaaaactacggggttgaaatcctgtgagctatcttcccagtgcaaacagaaattttcatctgcgctgttgatagactcccaagattgttagtagcccaatttgttcagttcaggctagattgcagttagtttcaccaataatacttggatccagcagcaaacagattattatcctctttttacatgtggcagacaaccgaaccaggagaccagtttgcacgaacaaggaccagttagtcctattggcaatttcacctgcacgctgttgagcgactagatcttttaccttccattgcatccttctttttcctacaatctgaacaaagataagggccaacccatggtgtcgatggggcagaacagcaaccacctccattatctgtcactaaatcttcaaaaggtgcttgatccacttggcagattgcacagcgagatggggacgagtttgcttttgatggaaaattcctacccaacctgcaaaagtataaataggctgttaaggttctgttcaatagcctcaaatgcagagacgaggtaacaacagagtgggcttcctcgacaaacagaacatcaatcagtaatatatcttagttatcaacagttaattggacaatgtgataaagaagcgtgtgataatgaggaaaacaattcaacagaaaacatattatccatggcatagctcaagtaaaattcttctaactactggtgcaatatgttcattcaagcactatccaacctggggaacttggaccatcaattgagaagataaaatagtaggatggtgctgtatagtctaggactctagtagcatacaactcaaatatgacatagtaacttaggctgcaacataaacgcaaactaacagaagtgatatttcattcttgaaggtcacaaaagttctggaactgcatgaagcaaagtagaagttacatgacttctgcattgaaagagaggttgtctccaaatcatatcaaccatatcaaggtatgccaatctatccttaccaagctagctactcaatcccttttgctttggtctaactacaatatcataaatatttatgccatgcaacataataacaaaaaaaatgtttcaaaagttaattcgtcagcaatttccttatgtgccataagccacacaaaggaacaacagaaaccaaagaagtggcaatagcaacagggaggtcttagtatgagtacatattatcatgttgccaagcccacaagatataattgacaagccaggattctattgcattgagttcaactaatgagccacaatcgggagtggaaacacaccactaactaaagaaaattatgaagtattcatgtagttttactatactgttttttcatgaaaaaaaagccacaaatgatattggacaactgatcaagaaaaagacaaccatgcatcaggaacttaggatggaaaagttcaattagtggttagtggaggctggggacccccaattgttccccatttcaaaaatatatcatatgttataaaaccaagccagggacatgtgataagggaaaaatcataaaggaatcaatgacgataacaaatacacagatgacaatcaaccgagtgattaataatgcatagtaaggtactaaacaggggataacaaaatgaactgcaacaggaaaatgatgcatgcctttcatccaacattgcggaaccctcttcaaataattcctccacagagtcaaatgaagcagacttgtttccaagctttccaacagaactatgtgacctcctaccaaaaagaagagatctcaacttgttctggtttttctttggagatagtgatggaggtgttgaagaatgatcagatgggatgatatcaacaaccacacaggtggtgtcatctttcagcccacttgtcttcagtgcttgctgtacaatatgaatggatctcagttggatgatcaagatagtgaagcattccatataaagtaagatataaacaagaaactgaaaccacacgtgaaactaccttcacgacaagctttgcagccagctctgcaggcaatcctcggcatgcctgagcagcagcttctgaggacagtgcatcccaaattccatctgatgcaattattagcctccctccagcatttgatagctacaatttcccagaatgaaaagcatacacagttaagttcattgcgataagctactccttgcatttgatcaaactcttaaaatttcaccttcacttgcttgacatgtggaattggcacaatgaactccccaacgtcagtatccccaatcgatcttgaaaggcacaatccacctggccagcatctgagaggtcccacctaaaacaacagcaagatttcacatcaaaacccataatgagaaatgctttgacagcattgaatgtatccttgaagttctttccaagaatatttactagcagcttacctcctgtccaccacacaggttgagccggctgacctcccctccactcgcggtgacgcgctcccgctcctctacattctcctcgagacgatggtccacggttagcagcgagatcacaccgccctgcgtgtccaatatgcacctggagtccccaacagacgccaccgtgaccgtgaacccatcgacgacgaccagcgtcgctgtcgtccctgatgcctcccctgcaatcacactcacacaacatcccccaaagttaacatcttcacagcggcgatggtccaggctttcaagtttcaacggcattgcgaggatctctctcacccttgcgttggaagtcgatgtccgtcttcacgaagcccgcgaccagcgcgcgcggcagcgcctgcagccagtcgtcgcggccgatgccctgcggcacggcgctcatcacgtgctccagcaggtgctccttgctgaacaccgccgccgacacgccattgtgtccgtcgaacacctgccaaaccgcagatccaagaacaagaacaaaacccgacacgccatcagcatcacggaatcccgagacgagaccagaaacgcgacacggggggagggcacgtacggcgaagacggagaaggcggaggaagggtcgcccgggacgcggaggcagtcgggcttgacgaggaagtagtcctcgccgcgcttggcgaagccgaagtggccgtaccggacgagcggccgctcggagccgccgccgcggagctcgcggccgatcagggtcgccaggggaagcgacggggcagccttcccctcctccccggcggcgctctccatcgcagcctctccccgagccgccgcactcctagtcctcctacccaccaagcatcatcccaaactgccaagaactcaccgaaacggcgccatttcttccgcggaaaaaagctccggctgctgccaacggcgggaggaacccgagatggatctgagattactcaaggagtactcggatttggaggcaatggcggcgcaatgcgggtggcgaacagctgcgatttgggggaatttggtggggagagtgaaggaagaagaagtaccgaactgaggaacaacgatttaattagctgacgatagtagaagaggtgggatctttttgtaattcgtaggtgaaatagggggcctcggtgcaaatgtgcttgccaaatgcctgcatttctgcaagcttgcagcagcagcgaggccagctggtcgatagtggttagcaacttttggattaagaaatctgagttggattaaagaaaagtgtgttcatattgtggatttagccgcaggttgtccggttctgaggactactagtaatgtttttaagattttttaagcatgtttgaatgtatggttgccagctgctaaaatggatatgtttgactgaccacaggtggttttggtgtcaggtgttatggacccatgtgctattgcttgcaagtccacaactccacatatgagtacaagaatagtagtaccagtagtaagcttttccaaaaatgcatttaaaaacttaagatttggtgcaattattttatttagtctttacattcatatgcagctgtttagttttatgccgttatgtggatatcattttttggcacgtctcgttataagtaaaattaaatgcctcgtcctatgcatgctaggtggtgtttggatccaagaactttagcattagagaatgtttacggtagcatcacataggctaatcatggattaattaggctcaatagattcgtctcacgaattagttcaagattatggatgggtt

SEQ ID NO: 5855 - DNA, 7345 bp, Oryza sativa
  unsure (1)..(7345): unsure at all n locations
caccctcatttttcacaggtaagcaagtgagcacgtctactgcctatatatctccaccattgcatagtacaagggctgggaatttagaaaatatttggttcaagcaaaattgaaaagataaaatttccaactaatgaaattcttcctatgattaatcttgtatatattttattcttagctaaacttgttacttgtgaacaaccatccatgttagggaaccttatgcatctaagtaattgttatatgagagatggttaaagatgaaagaaaatcttgctacatttgccatgacttttgggaatttgtttttcaaaataaaaattctttttcaatgctcattcctctaattgacttcatcttatacctatcaaggccatatgcaagtatatcaatgataaaccttattacgcatatgattgcagctttgtcaaatttatatgactcgtgttagatatccttcatactctcatgatcaagaggccatttccactttcattttcatttccatatatataatcaagctaagcttctacattggaagttggcttcccaaaaaaaaatcattcaaataaactcctattcagactatgctttcttctcctaaaaaaccttggcaaaagaaagaaaatgaaaaaaaggagggaaaggcatggctataaaaaaagagagaaataaagcttgccctcaaaacattgagcatgatgaaaaaaaacagtagccatgccccttccatatttatgcaaggaaaagtggagaagaaagtataggaaaaaggagaaccatttctattccaccattacacaaaatatttaacttttctttttaccacctcaaataaagacccttgatctagaagtatgactaataatcttcctgagtctgtatatttggctttgcaatatatatgatgcaggtatgtcacaatttatccctaccgagcccaacatatcagcttgtaaaatagggataaaatatggcacaatctgccttggtgaggatccacaaagtcaaaaatacttgagtgatagagaaaaagtcattaagaggaaaagagttgttttgcgaaacttcataaaatcccaagagtttgatagatgaagtaagaaggactggaatcaagaccattccatttaccaattacccaagatggtaagttagccactgataaagttcacaggtataggtatggttttgaataatttatatgcttgagttatatcttggaaaacttcattctacaccaatatttactcagggatgagtaaaaagctaagtgtggggggttttgttggcggctgttaaatgccgattatataccaccaacatctgcataaagtccagataataaaacatccaacatactgataggtgttaaatctcacattttctacaagtgttagtatatatttgtatgtagatggtaaacctagaagttgggaggaaaatcagactaaagttggagaaggaacttattcattcaagagtaggctttttaacttccaaagaatcagcccgaaatttgcagaaaaggataaggcaggtcaggggaagtccacaggccaaatcctgggcttgttgggccaggccagggttcagccgaactcacatctccaccgtcgatcctatggtttggcatggacgtcccagatgcattcctaatggcggttgcagggcacttcggacaattccccatccacaaccgtcattacctgctctataaaaggagcttcactccttcacttcttcagacacttccgagcttcacctgaattacaagagactctattgtactatttgtatactagaattaggaagagagtagagtagaagaagtcgggagaattccggagctgtcggtaatcctctcttatttcttttattctattcataactctgatattaatagaattatttttcctgagtattttagatttatcttgtgagaattatctcttggttagttcgtaaatagcatatgggatttttgtcactataatcaactaactatagtgattgctttggtgagttataaacactaaggtatatattaattgcttagacgtggtgtttaggtaattattatccagtaattattacgtatcccacagtacgtttgaggtaggtagaggtggtgacagccctcaagagcacttaagtccttcctgtccaggtatgtagtagagcgatatctggaaatagcgggttcccagtgcctcaagtatcacgttacgattaaagttaagcttttcctagacactgtttctcactggtaaatcctctctatcctagcctattctttgcttggtgtccttagatgaaccggaggaagaattaatcacacacgttcccttcgattcgatacccttggaatactccgtaggtgaagtgctacattggtatatcagtgcgcttgcggattttatctgtgaccataagaattaccaatagggcatctaccactccctacgacgacgcgtctccgggtgccgccacgggttgcacataacgtgctcaaggtgtggcggtgagtttttctctttcctagcactctctttcctctgtcatagtatagaaatgacgtgttaacttttatagcccgtttatgcaggactaatgtacccgctttaagtgcatcttcactttcctcgtaaaggtaaccttaaacaataaattaatatttatagtacaattctttatattagaagataaacttaaattaagatgttgctatgggcgatcttaagcttaaggcaatgttacataccgttgatgtgaaaagatggcagcaaaattttgttgttaacacatactacattttcccaacttatgctcccttctttttcacgcgcatgtgttccctaactagtaaaccatgcatttttgtgaatagatatattgaaaagttgttttcaaaattcatattaatcaatttgtaaatgttttcactaatattgaattggtcatgtgctaattcatcgttccattgtgcatgcttggggtgagttcccaactcttattacccaacacaacctaaagctacaccacaaggtacaaacaattacgctatttttttatttttaaattgttcacgaagcaggttagaccgctgcttatggaccagtttgaccgacggtgtgtgggcggtcagaccggcaaagtctgaccccgactccactacatattgtcgggtcttgggtttccttgttccggaaggtatgtagagggggaccagttggactctaagtagaccaacccctatattagggacaaggtcagttcaatcggaggtataatctactctcagcacaatttagccaattgaatcaccttttcaatattgcatctacttttcgcctagttttagccaagttcgtccatctttgtcaatttgtgctgtaaatcgtccgccttcactgtgagagtgcgaaatccttttgtagttttgtcccgtacactttccgttcgcccatgagacgagtgttaccgcctgtttcatctaaatcggccctgctagccggtttaatctatcaaaactcatcttgagctaggttgagctggctagcctgtttatgtgtcccagtcatgattgtcttcttgtcaaaaaaaaattaccaacatatatacagtagtatttgccgataagtagaccgaatttattgtgttggataagtagaagttattgttttggattgaggacaactagaagaacgatttttcatagcgttaccctataattttcgctggcggcaatacgtacaaaccgccaacaaaaatataacgagggggggttacggaccgccaacgaaaaccgatttttgctgacgggcacactaagagatccgtcataaaagaaactctatttttcgtagtggacctcttaagtgtccgccacagaaaacctgattttaggtggcggaccaggaagagcaccactacaaaaaatatatgtttcaccgctattaaaaatgcaccgcctctcccccccccccaacgctccacgctattaaaaatccatgctccgtctcctcggctccccctcctctccggctttctccctcccacctctccccaacctccctcccacctcctcctagccttctccctcccacctctccccagcggcggctggctgtggcagatctaggggcgacggcagtggcaaggaagggcgatggcagcggtggggtggacggcggctggcagcggtggcgggcgatggtccggcggcgggctcttcgtctcccccgtggtggccggctgcggcaaagggcgacggcggccagatctgggggcgacggcagcagcggggaaggggcaacggctggctgcggtaaaggagacggtcgtccgggggcacggcatcgacgacgaagactgcgatggcgatggcagaaggagccgccagcggcggtgatgcttggcgatggggctcacacatcggtgctgctcggtcggcgacggcggcggggaggccgaggaggagcggcgagctcaggcgtgggtggcgacgaggaggcgtgtgggcggctgatctggcgacggcaaggtcccaggtctctctcccccactcccccgctcctccccggccctctccctctctcagatctggcgcagcgacggactgggcggtggtgaggcggatggatttttttgagagaacaatggatggaatgtttttttttggtattttattgtggtttgggaatggatatgttaatttgtgatttgtgaatgaatctgttgaatttattatgnaatggctagtatttntctcttgntggctggctcagtgtaacccactagcgaactacattttcgctggcggccaataaccgctagcgaaaatcttgatttttcactagcctttgctttgtggcggctccaaattccgccagcgaaaacccaaactgaccgccacgaaagatgattttcgtagaagtggagccctcttgctagtgcaacaactgtaagtactggctccatcttctgttgctgctgatgctgcttgcccatcatagtgattctcattctataggcgagacgagctgtagcagtgtactcggcgtgcattcatgacgcccatgatttggctcgtccgggtcgacaattaccgctcatcagctttattctccatgaggttgacaattgatcgactatttgtggcgactcccaaatcatatttattaccatccgatttggcatctactacttcactaacaatttataatgccatcatgcagctagtttacactacaaacctatcgctgcctagcaggggcaaatctagaatgagggcgacgaaagctcaagcctccacggctgacaataggaccaccataaaatccccaataaaactttttatcacatgcacatacagaatatacatacgaagaagagatatatatagctttctcaagtttactgaaacccctcgttattttcttcttgatccatcagtgtctagaatattaatttgggtcaacttgacggtccttcttagggtgtgtttaggaggtgagattgggaactcacctttcccgcacgcaaaataaagcaacacattttcttatgattaattaagtaatttattatttttttaaaaaaaattgattaatatgatttttaaaacaactttcttacgtaaaccttttttaaaaaaacacaccagttagcaatttgaaaaacgtgcacatggaaatgaagaaggtgagttgaaaaagatgggggaataacacagccttagacacagtacaaaacatatggatgtaactgtacaatattaattttagtgcgtctgctagctagatcgagtctgtttcgatcggttcttccattggtacacacacgtcctaatctatttataccgtgtacgtagcacaagtgcacaactggtgagattctgggctggacacatcaaattgacgagggccagcgggtctctcgtgcgcccgtgcttttgcctgtctctaaaacgttgatcgggttcatggtgccatgtgcattctatcccatgcactgcaatgaatgaacttaactgacaaccaccgtatcatgccaattgatagtagaagcagtattagctagctctggcccgtagttgcagaggagtactatactgactggcaagagctaaagaaaactgtactatatattcagtgctgtggcggcaggagaacgcacattccgctggtccaggcagagagaccaatggcgtcttgctgggagcagctgcagggcctctgcgccgccggccacttgcgtcgccgctgccgcggtagaagcttggtcctgctgcagcagctgcagctgctgggggttttggtggtggtggtggccggggttgcaccaggcatcagtgaggcacaggtgaggagccggttcaaggcgatcttcatgttcggcgactcgatcgtggatccagggaacaacaacgggcaactaacggaggcgagagccgacttcccgccgtacgggcaggatttccccggcggggtcgccaccggcagattctccaacggcaaggtccccggtgacttgataggtactactacgcacgtacacacgtactcctaaattaatttccgagaatagctccgaacaaatatttatctattggtctttgaattttttttttatggagggagtactccttcctatagacgatgcactctctggatactttctgctaattaagtaactgcacttaattgctctatttttagctatttcctctgttccaaaataagaacagctctattaatttaaactgtgtggggctacacttatttgcaacagagaaagtatataagctgtgacagcgtgttcgggcttattttgacactaaatagtcgtagcaccatcattttgtgtagcttcggtttacagcatgtttatttaaggagtactccacgtcctatggtttgcactatgtaacacaattaattattattctctaattctgtttttaagtaggagtatgtttttgagatagagatagagtactccctccgtcccaaaatataagcatttttaaacttgcatacagtttttgatatgctattttgaccaccaatatctataaaaatatgatattttaaataaaaagagttacatattatgatagtttgtttaataataaatctaataacatcaattttatatgattgatcttttttatttttttactactaatagttaaagttaaaaatatttgattttacagtatactaaaaatgcttgtattttgggacggatgaagtacctcttaattggtttgcaccacacgccctatgcaacacaattaattacacgcaccaagcgacacagttagtttgctcaccgtggg

SEQ ID NO: 5856 - DNA, 732 bp, Oryza sativa
gccgatcagcaccgtaaaccagcggtgcctctactggtatccacacatacagagacagaacgccacacacagatgtgctagcacctgcgcgcggctagggttttgctcggggagggaagtgacggctagagtttctcgcatgatgcaatgcctccgctggtcacacccctcacgaatatataggatccatcactcgggcctccaacgcccgtaggactcctattcggatccctatccgaattaagctcatattggatctccatccaatccccttattccggcccattaagcgtccgaccctgtaggttcatgtatacttggctgtaacccgaaaactccttttcggtccacgcgtcaacagcggcccctagcagaacgtattgacccaccgggcatacataaagatcatatcggctgaacctctagtgtatacttgtatgaacccctttgcctcatgatatcgattaagctcaaggctagatatgtgtcatcctctaatagctcaatcattcactcgaacctgttgatagattatataacttgtgattgactcctcaatcacctttgccatggccatgaacttccataatctacaacatcgaggggccaagagatatctctccataggaggggcaaatcccatcttgattattcatatccaatacatgtttcatagcatacccgaaaactacttttataacaacccaattacggagtagcgtttagcagtcc

SEQ ID NO: 5857 - DNA, 38239 bp, Oryza sativa
gattaatatacatcattagatttgtctcgcaaaataacctaggggttatggaatcggttttgtcggtaatctacgtttaatactcctaaatagcaagatttcggagggctatttaataacccggaggatccaaacaaagccgcgtcaagctagcatgcggcatcgctcattccattatggcccacggtgagcaaactaactgtgtcgcttggtgcgtgtaattaattgtgttgcatagggcgtgtggtgcaaaccaattaagaggtacttcatccgtcccaaaatacaagcatttttagtatactgtaaaatcaaatatttttaactttaactattagtagtaaaaaaataaaaaagatcaatcatataaaattgatgttattagatttattattaaacaaactatcataatatgtaactctttttatttaaaatatcatatttttatagatattggtggtcaaaatagcatatcaaaaactgtatgcaagtttaaaaatgcttatattttgggacggagggagtactctatctctatctcaaaaacatactcctacttaaaaacagaattagagaataataattaattgtgttacatagtgcaaaccataggacgtggagtactccttaaataaacatgctgtaaaccgaagctacacaaaatgatggtgctacgactatttagtgtcaaaataagcccgaacacgctgtcacagcttatatactttctctgttgcaaataagtgtagccccacacagtttaaattaatagagctgttcttattttggaacagaggaaatagctaaaaatagagcaattaagtgcagttacttaattagcagaaagtatccagagagtgcatcgtctataggaaggagtactccctccataaaaaaaaaattcaaagaccaatagataaatatttgttcggagctattctcggaaattaatttaggagtacgtgtgtacgtgcgtagtagtacctatcaagtcaccggggaccttgccgttggagaatctgccggtggcgaccccgccggggaaatcctgcccgtacggcgggaagtcggctctcgccttcgttagttgcccgttgttgttccctggatccacgatcgagtcgccgaacatgaagatcgccttgaaccggctactcacctgtgcctcactgatgcctggtgcaaccccggccaccaccaccaccaaaacccccagcagctgcagctgctgcagcaggaccaagcttctaccgcggcagcggcgacacaagtggccggcggcgcagaggccctgcagctgctcccagcaagacgccattggtctctctgcctggaccagcggaatgtgcgttctcctgccgccacagcactgaatatatagtacagttttctttagctcttgccagtcagtatagtactcctctgcaactacgggccagagctagctaatactgcttctactatcaattggcatgatacggtggttgtcagttaagttcattcattgcagtgcatgggatagaatgcacatggcaccatgaacccgatcaacgttttagagacaggcaaaagcacgggcgcacgagagacccgctggccctcgtcaatttgatgtgtccagcccagaatctcaccagttgtgcacttgtgctacgtacacggtataaatagattaggacgtgtgtgtaccaatggaagaaccgatcgaaacagactcgatctagctagcagacgcactaaaattaatattgtacagttacatccatatgttttgtactgtgtctaaggctgtgttattcccccatctttttcaactcaccttcttcatttccatgtgcacgtttttcaaattgctaactggtgtgtttttttaaaaaaggtttacgtaagaaagttgttttaaaaatcatattaatcaattttttttaaaaaaataataaattacttaattaatcataagaaaatgtgttgctttattttgcgtgcgggaaaggtgagttcccaatctcacctcctaaacacaccctaagaaggaccgtcaagttgacccaaattaatattctagacactgatggatcaagaagaaaataacgaggggtttcagtaaacttgagaaagctatatatatctcttcttcgtatgtatattctgtatgtgcatgtgataaaaagttttattggggattttatggtggtcctattgtcagccgtggaggcttgagctttcgtcgccctcattctagatttgcccctgctaggcagcgataggtttgtagtgtaaactagctgcatgatggcattataaattgttagtgaagtagtagatgccaaatcggatggtaataaatatgatttgggagtcgccacaaatagtcgatcaattgtcaacctcatggagaataaagctgatgagcggtaattgtcgacccggacgagccaaatcatgggcgtcatgaatgcacgccgagtacactgctacagctcgtctcgcctatagaatgagaatcactatgatgggcaagcagcatcagcagcaacagaagatggagccagtacttacagttgttgcactagcaagagggctccacttctacgaaaatcatctttcgtggcggtcagtttgggttttcgctggcggaatttggagccgccacaaagcaaaggctagtgaaaaatcaagattttcgctagcggttattggcccgcaaagattaatttttgctggcggctggcttaagacgaccgccagcgaaaatgtagtttcgctagtgggttacactgagccagccacaagagaaaatactagccattcataataaattcaacagattcattcacaaatcacaaattaacatatccattcacaaatcacaataaaataccaaaaaaaaacattccatccattgttctctcaaaaaaatccatccgcctcaccaccgcccagtccgtcgctgcgccagatctgagagagggagagggcaaggggaggagcgggggagtgggggagagagacctgggaccttgccgtcgccagatcagccgcccacacgcctcctcgtcgccacccacgcctgagctcgccgctcctcctcggcctccccgccgccgtcgccgaccgagcagcaccgatgtgtgagccccatcgccaagcatcaccgccgctggcggctccttctgccatcgccatcgcagtcttcgtcgtcgatgccgtgcccccggacgaccgcctcctttaccgcagccagccgttgccccttccccgctgctgccgtcgcccccagatctggccgccgtcgccctttgccgcagccggccaccacgggggagacgaagagcccgccgccggaccatcgcccgccaccgctgccagccgccgtccaccccaccgctgccatcgcccttccttgccactgccgtcgcccctagatctgccacagccagccgccgctggggagaggtgggagggagaaggctaggaggaggtgggagggaggttggggagaggtgggagggagaaagccggagaggagggggagccgaggagacggagcatggatttttaatagcgtggagcgttgggggggggggagaggcggtgcatttttaatagcggtgaaacatatattttttgtagtggtgctcttcctggtccgccacctaaaatcaggttttctgtggcggacacttaagaggtccactacgaaaaatagagtttcttttatgacggatctcttagtgtgcccgtcagcaaaaatcggttttcgttggcggtccgtaaccccccctcgttatatttttgttggcggtttgtacgtattgccgccagcgaaaattatagggtaacgctatgaaaaatcgttcttctagttgtcctcaatccaaaacaataacttctacttatccaacacaataaattcggtctacttatcggcaaatactactgtatatatgttggtaatttttttttgacaagaagacaatcatgactgggacacataaacaggctagccagctcaacctagctcaagatgagttttgatagattaaaccggctagcagggccgatttagatgaaacaggcggtaacactcgtctcatgggcgaacggaaagtgtacgggacaaaactacaaaaggatttcgcactctcacagtgaaggcggacgatttacagcacaaattgacaaagatggacgaacttggctaaaactaggcgaaaagtagatgcaatattgaaaaggtgattcaattggctaaattgtgctgagagtagattatacctccgattgaactgaccttgtccctaatataggggttggtctacttagagtccaactggtccccctctacataccttccggaacaaggaaacccaagacccgacaatatgtagtggagtcggggtcagactttgccggtctgaccgcccacacaccgtcggtcaaactggtccataagcagcggtctaacctgcttcgtgaacaatttaaaaataaaaaaatagcgtaattgtttgtaccttgtggtgtagctttaggttgtgttgggtaataagagttgggaactcaccccaagcatgcacaatggaacgatgaattagcacatgaccaattcaatattagtgaaaacatttacaaattgattaatatgaattttgaaaacaacttttcaatatatctattcacaaaaatgcatggtttactagttagggaacacatgcgcgtgaaaaagaagggagcataagttgggaaaatgtagtatgtgttaacaacaaaattttgctgccatcttttcacatcaacggtatgtaacattgccttaagcttaagatcgcccatagcaacatcttaatttaagtttatcttctaatataaagaattgtactataaatattaatttattgtttaaggttacctttacgaggaaagtgaagatgcacttaaagcgggtacattagtcctgcataaacgggctataaaagttaacacgtcatttctatactatgacagaggaaagagagtgctaggaaagagaaaaactcaccgccacaccttgagcacgttatgtgcaacccgtggcggcacccggagacgcgtcgtcgtagggagtggtagatgccgctattggtaattcttatggtcacagataaaatccgcaagcgcactgatataccaatgtagcacttcacctacggagtattccaagggtatcgaatcgaagggaacgtgtgtgattaattcttcctccggttcatctaaggacaccaagcaaagaataggctaggatagagaggatttaccagtgagaaacagtgtctaggaaaagcttaactttaatcgtaacgtgatacttgaggcactgggaacccgctatttccagatatcgctctactacatacctggacaggaaggacttaagtgctcttgagggctgtcaccacctctacctacctcaaacgtactgtgggatacgtaataattactggataataattacctaaacaccacgtctaagcaattaatatataccttagtgtttataactcaccaaagcaatcactatattttagttgattatagtgacaaaaatcccatatgctatttacgaactaaccaagagataattctcacaagataaatctaaaatactcaggaaaaataattctattaatatcagagttatgaatagaataaaagaaataagagaggattaccgacagctccggaattctcccgacttcttctactctactctcttcctaattctagtatacaaatagtacaatagagtctcttgtaattcaggtgaagctcggaagtgtctgaagaagtgaaggagtgaagctccttttatagagcaggtaatgacggttgtggatggggaattgtccgaagtgccctgcaaccgccattaggaatgcatctgggacgtccatgccaaaccataggatcgacggtggagatgtgagttcggctgaaccctggcctggcccaacaagcccaggatttggcctgtggacttcccctgacctgccttatccttttctgcaaatttcgggctgattctttggaagttaaaaagcctactcttgaatgaataagttccttctccaactttagtctgattttcctcccaacttctaggtttaccatctacatacaaatatatactaacacttgtagaaaatgtgagatttaacacctatcagtatgttggatgttttattatctggactttatgcagatgttggtggtatataatcggcatttaacagccgccaacaaaaccccccacacttagctttttactcatccctgagtaaatattggtgtagaatgaagttttccaagatataactcaagcatataaattattcaaaaccatacctatacctgtgaactttatcagtggctaacttaccatcttgggtaattggtaaatggaatggtcttgattccagtccttcttacttcatctatcaaactcttgggattttatgaagtttcgcaaaacaactcttttcctcttaatgactttttctctatcactcaagtatttttgactttgtggatcctcaccaaggcagattgtgccatattttatccctattttacaagctgatatgttgggctcggtagggataaattgtgacatacctgcatcatatatattgcaaagccaaatatacagactcaggaagattattagtcatacttctagatcaagggtctttatttgaggtggtaaaaagaaaagttaaatattttgtgtaatggtggaatagaaatggttctcctttttcctatactttcttctccacttttccttgcataaatatggaaggggcatggctactgttttttttcatcatgctcaatgttttgagggcaagctttatttctctctttttttatagccatgcctttccctcctttttttcattttctttcttttgccaaggttttttaggagaagaaagcatagtctgaataggagtttatttgaatgatttttttttgggaagccaacttccaatgtagaagcttagcttgattatatatatggaaatgaaaatgaaagtggaaatggcctcttgatcatgagagtatgaaggatatctaacacgagtcatataaatttgacaaagctgcaatcatatgcgtaataaggtttatcattgatatacttgcatatggccttgataggtataagatgaagtcaattagaggaatgagcattgaaaaagaatttttattttgaaaaacaaattcccaaaagtcatggcaaatgtagcaagattttctttcatctttaaccatctctcatataacaattacttagatgcataaggttccctaacatggatggttgttcacaagtaacaagtttagctaagaataaaatatatacaagattaatcataggaagaatttcattagttggaaattttatcttttcaattttgcttgaaccaaatattttctaaattcccagcccttgtactatgcaatggtggagatatataggcagtagacgtgctcacttgcttacctgtgaaaaatgagagtgattggggccagtgtgggttcggccgaacaactctagtgcccaatcactctgcaattttctgcagagtccagtgcacatcaggtgttcagatattcagtctcattttttgaatttgcatgtcaaaaagccgaggtatctcccccacttttatttgaaacctaaactttattaatcatgaaacaaaaacaacttggcaaacattggtgttaaaaccaatgagccacattatttgagaacaaaagaccaagcacctactactactttattcatgagaaaggagacatctatttagcaaaatacttattctccttctccatctctatgaatgcacgctttatctaagcgcacaaaccgcgactaagggtatctacattattcctaagctcagcaagctctacctctagctccgcgttgctgtccctaagctcaatattctccttgcgaagtttgttcacttgagcagcgagcttatggaccgagggctcctgcgattttacttcattatcttcgaattgcccgggcgccctcatgataggaggaggcatcgaatgacgcttcaccttcataggtggagggctacgggactctgctgccccctccttctccgatgtcgtcaaaggccagagtaagctattgccatacccaccgccgggacttcgcactccccaattgcaaaaacagtcccccttagtggtggatggagtggcggtgggtgtggtatacttgtggagcacctcatcccctaccttagtgtaaagagtgcccacataccgctcagcggaaggcggagcggccttctcgtcgtcttggaaaagacgtctcgccttcaaaagactgagctcgcccatcgtcggccatcgtgcaggcgaatcaccccgcacttttgtctttgtgacatggagggggggagagggagcgcactgccgaacggggggccaaacgaggccgtgatgggttcggccaaaccgagggagctcatcgacgggctccaaatttgctggggagcccggcaccgtcgcaaggggttgagcccagagtgcgttcactccttcgatcgtgtagtttttcaccaggatcaattgattcacccgtgttggctctcctttaaggttataggtgtagtttaaggtggagccaatgtatggcatgagagatttgccagctatgaatggcacaagttgatggatcaaaggattgggttgagaggagattgagcaaattggtggaaaaacttttgcaaaggaggaggaagaagaactaactctgatgcgtgatccgatcgttctacctctaaacgcgcatctaaacgaactaaaagtgagcgggggaaacgatcatttgaaaatgggaccaaacgggcgccgccgtggtttggccgaaccctggtgggtccggctggccgccaattttctcctgggcccagacaaacctaagctaagcacaaaaatgacaactatacaggaaattaagcatgttttagatgagatcatcatggttcataatcaattagttcaataatacccacttcatctaaagtttcattcggctcaagaaaaatctttaaacgttgaccgtttaccttaattatgttacctgagtcgtcgcggagtgtgattgcttcgtgcgaagaggtgtcgatgacgtcgaacggtccttcccatttgctttgtagttttctatggccgaatagcttaaccctggagttgaacatcagtaccttgtctcctggcttgaatttcttgttctttattcgtttatcatgccagcgctttgtccgctctttgtatatcttggagttgtgatatgctttttctctccattcttctagttcagctaactgcattttcctccattctcctactccctcaaaatccatgttccaatttctgatggcccagtaggctctgtgctcaagttctacggggagtcggcatgacttcccgtagacgatctgatagggagacattccaatgggtgtcttgtatgttgtccggtatgcccacagtgcgtccgacaatttctccttccatcccgttcccattttgttgaccgtcttctgcagaatgttcatgatttgtttgttcgatgtttctgcttgactgctggtctgtggatggtaaggtatagcaacattgtgtttggctcccatgtctcgtaggaggtctcggaaggttttgtcgatgaagtgtgatcctccgtcacttatgaccatccttggggtaccaaaccttgggaagatgatttctatgaacatcttcttagcatgattcgcatccgtggcactgcacggcatagcctcaacccacttggagacataatcaactgctaccaaaatatactcgcaattacgggatttgggaacaggtcccgtaaagtcaatactccatacatcgaatatctcaacttataggttgtatgtaagaggcattgcatcatgagcagtaattcctccttgccgctggcagcttgggtatcttctaacaaattcctttgaatcctcatacattgttggccagtagaaaccatattgccaattctctgcctggtgcggaatgcaccataatggccaccataaggcgaggcatgacatcgttctatgatcttaagtcgctcttcagttggcacgcatcttcttaataaaccttcagagcagaccctgtataggtatggctcatcctatatatgacggtagctctcggatttcagttttctttgattttctcccggtggtatgtactttgagaccatgtagtttactatgttggcataccacggagttggagtcgcgcaccgtcattagcatgtcatcttttagaaaatcatttatcggttgttcccgcatgttaataatttgcagcctagacaaatgatctgctactaaattttctacttcctttttatagttaatttctatgtcaaattattggagtagcaaaatccatcgcaagaggcgtggtttagcatctttcttagcgagcaggtattttagagcagcatgatcagtgtaaattatcacctttgctcccaccaagtaagatctaaacttatcgatagcaaaaacaaccgcgagcagctccatttcagtagttgcataattcaacagagctcaggttagagttttgctagcataacagattgcatgatgctttttatccttggtttggtccaaaaccgcaccaacagcaaagtcgcttgcatcacacataatcttgaagggtaatgtccaatcgagaggttggatgattggagcagagacgagtgcctttttgagtatttcaaaggattttaggcacgcatcgtcgaactcaaagggagcatccttagctagcaggttggtcagtgctcaggcaattgtagagaagtccttgatgaaccttctataaaagtcggcgtctcccaagaagttatggatcgccttgatgttcacagcaggaggaagttgatcaatcatatcgattttagcacgatcaacttcgattcctcgctaggacactcgatgaccaagaacaatcccttcacggaccataaagtgacacttttcccaattgagtaccaggtctttttcttggcatcgttgcaataccttgtccaaattctatagacaatgaccgaaggtctttccatagacagagaagtcatccatgaagacttccataatgtccttaatcatgtctgaaaaaatggacatcatacatctttgaaaagatgaaggagcgttgcacagtccgaaggacatcctacgataagcataggtgccgtatggacatgtgaacgtggtcttactctggtccttcgaatggatgggaatttgatggtacctagaatacccatcaaggaaacaaaataatgaacaatttgctaaccgttccaacatttcgtcaatgaagggtagcgaaaaatgatcctattttgtagccttgttgagcttcctgtagtctatgcacatcctccatccggttatggtttgttgcgggataagtttattttgagcatttgcaacgaccgtcattcgtcccatcttcggcccaacctggactgtgctgacccactcactgtatggaacggtataaataatcccggcatgcaggagttttaggacctctttctttacgacttctcgcattgcattattaagccgtcattgaggttccctggagggaatactctcaggcttaatagggatacgatgagtgcaaagtgcgggattaatccctctgagatcctggagggaatagccaagaatggcacgatgcttttctaacatagatagaagacgttgagtcttgtcttcagaaagcttgtcacttatgatgacaggagcttctttgtcgttgtggaggaaagcacagcgcatgccttgaggcagatatttaagctcaatcggaggtcgaggcggcggttccatgattggaagctcgagtctctttgggttccgcttcattttccagaagggtctcgggagactcgtgaggggcaactgccgtaacctcctccgcatactcattctctaggagtgagtcggtcaaggcgaaccttgctcgtgataatggaactggaaattcgttccctcccaaagttatcttgaggctatctgatcggggcatgtttatgatgagttgctcaatcggcagctcaatcagaatgtcaaagtcttggatttcaaagacatagaaatccaagactgcctccctatcttcaaagtagacagttatgtcttgtacaatcccgaatccttctacgaatggcttgaaaaatttccattcgggtgcttcaaattttgtttgtcggggttattgctttatcgcttaggtaagtgaatgcaaatgcgtcgaagacgagattaaccccgacagttgggctgtaaaggatactgacatcgttcccttctagatgacaaggaataactcggggagcggtatttatcagaattacttcggatgaaagctctgcctcccttagccattcgtcactcattatggatgtcagctcccggacagtttcccttaagaacccaagttccaaaggatcggtaggtggcaaaggaacgatcggcttctttttactgaaataattcagggtgttgccgtaatcttcatcaaaaccatccctgaacggaattgcggcacgatccggagtctgaatttctttattctcaacgaatggcggctcgggaacttcttcatcagtcgagtcggtcgatgtggaaggttcagggtgtgattcgactgttaaaggctcctctatcttagacacggatgcctctagtggaggttcatcgcatggcgtcataaaggaagtattttctataatgcggtccagaattacttttccttctgacggcgttttatgcatgaatgatcctccggcggttatgtccagatagaatgtagacaccttacctaaacccgtatgaaaatgttgtaaaagcacatactcaggtatagataaggttggtccagactaaactaaattgaagggctgtttttgtgtgtcttctgcttcggctgatggaaggccatatgcttgatagtgtggaactcctgttgcgcaaaaaacctggtccttttccttttgtctgtcttttttagtctttatgctgtctcttattgtctttcttctctgaaccttgtaagctactatggcctggtttagttcccaaaaatttttcaaaaaacatcacatcaaatctgtgtacacctgtatggagcattaaatatagattaaaaaaaataattgcacaattagaggggaaatcgtgagacgaatcttttaagcctaattagtctataattagccataagtgctacagtaacccaaatatgctaatgatggattaattaggcttaaaagattcgtctcgtgctttccatacgagttatgaaattagttttctctttcatgttcgagaaccccttccgacatccggtcaaacatctgatataacatctaaaaaattttcttttcgcgaactaacatgccctaagtttcatttctggtaatagaaataggggcaatcgcccttgctaaaaaaatatacaagatttatgtagtatcagatatgaaattcaaagtgtaaaatatatgttacgaaatctactattttgaaagaatatcactccagttttggtaggcccgtaaactgtatccgatatcgatcgttaattagttatgggcggtgaagatgcatggcacccacataccgcggtcacgcatattattcgcgcggtggtgtggacgggatgacatgcgcaggcttgggcgtgctcaagaattgcggtgaggaggaagcgcgcggtggcggtggcgcgccatcccgcagcatatgcttgcaggcgacgagccaacagtggcgcacggcagccaggaggttggagccattttttgggtcagggcaatattgatggacgtctgcctgcggaatgaattctctgccggtgatccgtcggcatctacggcgacgtcgccgtaggcacgcgagacgcgaccgttcatcattcccagtatttatcgtcgactgctgactttgcaactaccacatgctaattatttgcttttctttgaaactccatactacaagggcatacagattacgtactccatattatatacatgcacgcgagtgccattttattctcttcacacatactcgaataaatagagaatagagaaaccagtgagctctcaaaatttctgtttcaaagtatacgtgtaattattggcagcgttttaatacgcagccccgtacgaaacttcccgtttgcgactggaaggggatgatgatgattaccgtcgatactgttgcataaatgagcctgatatatatacgtggggactccaggcggcatcaatgcgggactatgaccgaatggactggtaactaattgattgtcagctgatatctgcggaatcaagacttctgtttttcatccgacttccgagcacatgcagcactcagacccggtttagatgggactgttttagttttaagtcccctatcacatcggatgtttgaacattaattataaatattaaacgtaaactattaataaaactcataattttggactaattcgcgagacgaatctattgagcctaattaattcatgattagcctatgtgatgctacaataaacattctctaattatagattaattaggcttaaaaaatttgtctcgcaaattagcttttatttatgtaattagttttataagtagtctatatttaatactctaaattagtgtctaaatacagagactaaagttaaatccctggatccaaacaccacctcaaattccacatctaagcacgccatgatatgaattctatttgtaaccaacatggccaagcccaagtaaccagtcaatccggtttgtctgcgctgctcaacaaaataaatgtactgtctgcttaactaatgtcctagagattaatgtacggtagtatcgaaaattgagtggtgttggttttcctttcctggtgaacgtgaagctgatgcaccactgctatggaaaacaaataaagacttgtcgcactaacaatgattatcgtaccggatgagttaggatatacaattccaattcgcaaaatgaaagccaatatctgtattcaagtaatatttttcgctaggatcagcgcttagggtagcatgatgagaagatgaatattcaaggtttgatggcaacactactaaaagaaaaaggctttatgcatgtgttgatgtaaaaacatgaggccttggagatctgcttaaatccagtgcaggtccaaaagcttgcctttaggtgtacgagcgtgccagttgatttgatcctgcaatcgacaagaaacaaagacaaagaaaccgcggttaaatccataaacgatagccgatcggctagttgccgatgacatatcatattatctttgagccgatgtcatatgtgagtcgatcggcaatcatgaataagtaaaaaagaactaaatctactcgatcggatgtagatattaacaatatataatccttatgtcgatatatacttaaatcaagtgattgggatagatcagtcgccatgccgagacagtataaatcacttggatcgaaatatatattaacaacaagactatatatgttcgtagcataaccgatcagatagatctagcatgtatcagctaatactccgatactactatatattaagatattaaagcaagtagaatataccaaaccgaagcctaatatatttaaatgcaacaagatcttaacataaagggcagatttaacatgtcaattaagcacacaagataaatattagttaaatcaggtaagattggctgaaaccccgatgctaccctaatcggcaaccaaaggcaggctagagattgagattctaatcacgcctcataagatcaaactcaactgatgcagctataaatatgaaaagaaagacaatatctacataatcaagctgttgaatgtttcatagagtggtagatatcttatataatataagtcaacgttaatatataacctaaccggctaccttctagtaacagacgctagccgattgaaggttagatagcaatattgccaaagattatgtaagatatatgataactcaatgaattacataaacaatattagagtatcataaaaatagaagcactaatcccgagaacgcaagccgccataacaaattttacctcttgttgaagatcgaaaccgatgcagctcaaccccaaagcaataactcgtcgaaacaaaacgaaagtaaaagggtggcgatgcgccgagattgtatagaacgtgtgttagattgattacatggggctcagggtctatttatacccgagattacaaaatatgtccatatcggacacgactcctatctctaacaaactttaagataccaaaagtctttgcggcagaattttgcccaaacatatctctaaggaaattacatgaaatatcctaattaatagatacaattgccttcctagtaccctaaccatgcgtggcatcctcaagaagtacatcaacccaacccgacaatgtatgtcgtgtcatattgtcagattcgaatcaatcggctaaccttgtcctactcggactatgccgatcctgattgcagccgattcggactccagccgatccttactctgtttccggaacgatctccatcttgaactccgtttcaattccttcttcatctccgatacttggattaccaaatttggtcattaacaatgtgccagttgtcaaccctagataggcagcaggcagcatctttgagttctctcaaaggtgttggtttagttttagtttaagaaccagcacctttgaggtcctaggaatgaaaataaaaggccggctcgatgtatcggctcgattcgagccaatgcatcgagtaactcctattcaccccaaccagattttgtcacattggtaattgcatattttgtaatctagggtataaatagattacttcggaagccaattaccaattactcgattcgagccaatgcatcgagtaactcctattcaccccaaccagattttgtcacattggtaattgcatattttttatattggtaattagcaaaatatttagcccggcggcgactccctccccttcgccagatctggtgggaggagaagcggcggcggcggcccagctgtgctctcccctcccgtccccttgcttgtgttgttgatgttcttgtatgcttaatactcttgcatatcttcttcttctgctggttacccctcctcgtagttgtggattcacggcttggtgttaggcagtcttgtgcctaggctgtgcgagggaaatccattgaggtggagtgctatctctgcagtaaaatgagacatctaagggcattcacagtgcgtcacacaagtctgaggagcctcacaatgccacatagaccaatgctacgagtctaaaatctagattcttcacagtgcaagtggctctatgagtggcttaattttatatttcagcccctaacacctttttttagttctattttttttttctatttgaatagagatacaaaatttacaccgaacaccctaaaatctagaaaaaaaaataaaccacccactccccctccccctctctcctctatcccttatcctctccctcacgagaaaccgtgcgtctccccccttctttgccaggcgcgcgtcccctcctcttcctccggccgtcgccacctcccctcctcctccagccaacgctgcctcccctcctcctactccggctgccgctcctttttcgtcatcggcagcgccgctcctttccccggcggtgggatcctgcggcggagcgtggccggcaagcttctgtcataggatggggtggcgcgtgtagggtgacgagctcggggggagatctcgtggcatcgactgtacccccacccccaccagcgtcccctccatgcaaatcgaggcggcaggccgacgtgctcccctgcggcggcgcaaatcgactgtagccggcacggagactatctcactctccagatccggccagacgtaaggtggtggcgatggcggtggcagccttgttggcaatgccttcctctctctttccgtggatgtgggattaatcggggtgagggcgtgagaggaagaagagcacgggaaaggaaaagatggtgttgggggtgttccctcgctgaagacacaccacacgaggctccgtcctccacaacgtggttgcacacattcctccatgcttcacaagccctcaggcgaggtgaagaacgagtgtctagttttggctcccagaacttcgtttggctccgcggattgttgatgtggcgccgaatattcggttttctgccgtggggtggaaccgcacgtccttacactatgaatgccctaagagaaagttaaattctctctctcgctttacctttatcggttccttatagctgcatgtgacgtcattaactcctctcctagcctagttagcggatcccaccttttcttgggggcttgtgtgcagcccagctgctaaatagtcactcgcttgtcctttctcttagagcaggtacaatagcaaggtattagccggctataaacatattttaatgagataaacaatgagagaggagaacagcaggctatagatctgtaccaagctgtagcacgaactccaagacacaatgtgtgtatgatatgtgggattatatattaatagtcccggttggtaacaccaaccgggactaaagatctatttgtagtcccggttgataacaccaaccgggaaaaaagatcgccatacgctttactcccagttggtgctaccaaccgggacaaaagatctatttatagacccggttggtaaaaccaactggggaaaaagattgacgaggggatcggagaggtgcgcgatcggatcgaggtatctcctcctctcctcaaccttatctccccctctcctttttaactcctctcctcaaccttatctattcttctccttatctttattcctctccttctcctctctactgccaggccggcacgaggacggtagggcgtggagggccggccgacgcggcggcgactggggctggcggccgcgcggcagcggggcacggtgggccggccggccggcagggcggcgtggcagagcgcagtgaggcggcggccggcggggcgcggagggccggccggcgtgggcggctggcggtgtcgcggcggcagggcgtggagggccagccggccggagcggtggcggcgcacgtctaggcagcggctttctttctttttcttttcttttttggagaatctgagattgttgtgggatgtatttgatttgtgtgtgatctgaatatgtgataaattttgtagaagttgtgatgtaatttttttaagattttgtgatgtatttgagtatttgagactatagatttgtggatttggaggcaatttgaggatgattgatttgggattttgggaacgggatggggtgaaatcaatatatttaaaaacaatgaagaaaagaaaagaataaagtggaactggaaagagcaaccggatctagcctgtttagtactaaccaggacttaaaaaatgctttatctttagtcccggttggtaacaccaaccgggacttaaaaatggatttttactcccgattttttttacccggaactaaagataatgatctttaggaaaagcgggactacaggggttacaaaccgggagtaaaatccccttctccaccaatggcaggcctttcagccctgtagcatgcaattggcccatagtatccaccagttggcatttatcaacttgcctgcttcataaggattaacgtgatacgctcaatcatcaagcatacgaatcgtccatattataataaaactatcttgttttttcatgtacatgcatattattttttttcttcaagcagtaataaaatgagcgtatagatatattacatatatggatggcagttttatttaggcttgcctaggccaaattcaagctccactcctacctcctctcaaacgtagccaaaaacccgtgagttattggacttgggggtggagcccaatggacaagggggttcccagctggcacctggctcaatttacgtttttactgtttaaccccatgttttgaccttatgggaacactctctaggcatctcttggaaacgctcttagtgtatcccttgcgagaaaaagaccaaggtgaggggggtgtcgaaacaagatttcggcaataataaaagggtgtggctattacgctggaaaagtggatgggtttagagacaaggaattttatacaggttcagaccttcttaataagaagtaatatcctactcctgtccgaggattgatccgccgagtgcattgttgatcgtatgatctgggagcaaaaatcgtaccccaaggggcacccggacccctccttatataggggaagaggtccatattacaaagtacaacccatatccctaacggaataggtagttacagaaaaaatataatcgtaaccgactagaatctcgggtatttccttggcatacaagtttggaatttaacccgagtccttttaaagatattctatctatacatggcctcccatacccagtcggatatacatgccgtgtaggtatggggtatccataatctctacaggggggtggccggcccaaatgctgaggcgcgtggtcaacgaggtagggcagcggctgcgtcgattggattgtcgattcctagctccccccacgacttatgaagcgttgcccgtcctgttccattctttccctttttccctcttcctcatcggaaccgcttgaatcactcgtgtcaatcgcctactgtggagattatgggtaccccatacccacacggcatggttatccgactagtcataggggatagtttatatctatggaatatgtaaccgatcatgacttgggtattacgtttccttttatattatggagcggcctaaagtcctgatttgataatattgtaaaatagatttaggaaaccgataccgtattggttaagatttctatcttgtaatcctgccccccatcctatataaggtgggaaggaggccctctagggggcatgacacaaactgatcgtcagatcaatatacacccggtggattcaaatccccaaacaggagtagggtattacttatcattgagagggcatgaacctgtctaaattatttgtctccgcatccatccatttttaggtctcgtgcgctacccccttttattattgccaaattcatgtttcgacagttggtgcgccaggtaggggtgcatcgagtttcccgtcgatgagtgcgatggaactaatctccggcgttgccagattcgtcaagcatgtccttttcgtctcggatttgttggaattaatgaatgggccttagcccactcgaagattaattctttggaaaatcacaaaagcccacctcatgggatggcatgcatgtggagttttgtaccaccttgcttattctaggagagggagacctccttaaaaggggggatgccctcctagccacttgaagcatgtgtggtggagagaagaggggaaatacacgcgcgcgctcgctcgcctcgcctggcctggcctggcagggcagggcagggcaggcggcgcgcgtgcacgacgtatgcgtcgaatggtccgaaaaattggctcctcacccttgcgcagatgcagcctccttttgcagttttgttttgctgcaaattcggattcgtttttgttttggaaacgttccgaaaaatccggtgcgtgcaaacggcgtggagtccggataagttacgcgcgacttatccggttcggttacgcgcagtagagatcgtgcgggcgccctgatcaagcgacccttctctatataaaccgaccgccgtcttcacgcaatatatgcgaaaatcaatctagggtttgcctcctagactactccatcccgctcgccggcgtgcatcagcgatcgggagagcaggtctccggaacctctgcctttgacgtcctgcaccgggagaaggcggcaataaggtttttgggaagcgcttcgcgcgactgctccctgttcgttcgcgacggctcgccttcctcttcgctcgcgtgtttcgttccttcgtagacacctgcgaaaagtttcgaccaagcagccggtcttttcgtcacctcggtacgtgttcaatatgttgcgcatttttgatctgttaatgttattctgcgtagtttacatgtgtagatctaatgatgcgttcatgctagttttcatctgtaatgtcatgatttatttatggaataaattaaatcattatatgctgcccataatctcaacaatccaaaaaccttattataggcactgtgattttactatggctggttttgccgatgcactgaggccggataaattcaccggtgtgcattttaagagatggcagatcagggtcactctgtggctgacagctatgaaatgcttctgggtgagtactggcaaacctgaaggagttcttactgctgaacagcagaagcaattcgaggaagccactactctctttgtgggatgcattcttagcattcttggcgatcgtctggtcgaggtgtatatgcatatgaccgacgctaaggagttgtgggatgcactgaatactaaattcggtgctactgatgctagcaatgatctgtatatcatggagcagtttcatgactacaaaatggctgacaaccgttctgtagttgaacaggctcatgagatacaaaccatggctaaggaactcgaactccttaagtgtgtcttacccgacaaatttgtggccgggtgcattattgcaaaactacctccatcttggaggagtttcggtactgcactcaaacacaagagacaggaatactccgttgaggggttgattgcgtctcttgatgttgaggagaaagctcgggaaaaagatgccgcgtctaagggcgatggtgggcagtccagtgccaatgttgtgcacaaggcccagaacaagagcaaggggaaatacaaagctcagcagaccaccaacttcaagaagcagaagaagaacaacaacaatcctaatcaggatgagaggacttgctttgtgtgtggccaagttggtcatctggctaggaagtgtccacagcgcaaggggatgaaggcacctgcagggcagacttctaagtctgctaatgtgaccattggcaacactggagatggaagcgggtatggtaatttacctactgttttttcagttaatcaatctactaattggtgggttgatactggggccaatgtacatgtttgtgctgacatctcattgttttcttcttatcaggtcgcacggggttccaccgtcctaatggggaatgggtcacatgcttctgttcatggtgttggcacggtagatctgaagtttacttcgggaaagatcgtgcagctgaagaacgtgcagcatgtcccttctatcgacaggaatcttgttagtggctcccgtctgactagagacggatttaagttggtttttgagtctaataaagtagtcgtgtctaaacatggatattttattggtaaaggttatgagtgcggaggcctgttccgcttttccctttctgatttctgcaataagtctgtgaaccatatttgtggcagtgtggatgatgaggctaatgtttggcattcacgtttatgtcatattaattttggcttgatgtctctgctttccagcatgtgtttaattcctaagttttccattgtcaaaggttctaagtgccatagttgtgtgcaatcgaagcaacctcgcaagcctcacaaggctgccgaggagagaaacttggcaccactagaactcctacattcagatctttgtgaaatgaatggggtgttgacgaagggtggaaaacgatatttcatgacattgattgatgatgctactagattttgctatgtgtacttgttgaaaacgaaagacgaggctctagactattttaaaatttataaggcagaagttgaaaatcaacttgacagaaagataaaaaggcttaggtctgatcgtggtggagagtttttctcgaacgagtttgacttattctgtgaggaacatggcatcatacatgagaggacgcctccctattctcccgagtctaatgggattgctgaaaggaagaaccgcacactgactgacttggtgaatgccatgttggacaccgcgggactgcctaaggcatggtggggggaggcattgttgacctcaaatcatgtgttaaacagagttcctaacagaaacaaggacaaaacaccatatgagatatagattggtagaaaaccatcactttcttatttgcgcacatgggggtgcttggcgaaagtcaatgtaccaataacgaagaagcgcaaacttggacctaagactgtggactgtgtttttctgggatatgctcatcatagcattgcctatagatttttaatagttaaatccgaggtaccggacatgcatgttggtacaattatggagtctcgtgatgctaccttctttgagagctttttcccaatgaaggatacacatagtggtttgaaccaaccctctgaaataattcccagttcaatcacaccaccagaacaaactgaacatacacatgaacttgtctctgaggaggatgtcagtgaagctcctcgaaggagtaagagacaaaggacggctaagtcttttggtgatgatttcactgtgtacctcgtggatgacactcctaagtcaatttcagaagcatatgcatctcctgatgcagactactggaaggaggctgtccgtagtgaaatggattccattatcgctaacgggacttgggaggtgacagagcgaccctatgggtgtaaacctgtggggtgcaagtgggtgttcaagaagaagcttaggcctgacggtactattgaaaagtacaaggctcggcttgttgctaagggctatactcagaaagaaggcgaagatttctttgacacttactcacctgttgctagattgaccacaattcgtgtgctactttccctagcagcctcacatggtcttctcattcatcaaatggacgttaagacagcttttcttaatggagagctggatgaggagatctatatggatcaacctgatgggtttgtacttgaaggtcaagaaggcaaagtgtgcaaattgttgaagtctttgtatggtctgaaacaagctcctaagcaatggcatgagaaatttgacaaaacattgacatctgcaggctttgcagtcaatgaggcagataaatgtgtgtactatcgccatggtgggggtgagggagttattttgtgcttgtatgttgacgacatactgatatttgggacaaaccttgaggtgataaatgaggttaaatcattcttgtttcaaaattttgatatgaaagatttgggagtagctgatgttatcttaaacattaagctaattagaggtgagaatgggattacactcttgcagtcccattatgtggagaagatcttgaatcgctttggctacattgatagtaagccttctccaacaccttatgatcctagcttgttgcttcgcaagaacaagagaattgctaggaatcaactggaatactcccaaatcattggctcgttgatgtacctggctagtgcaactaggcctgatatctcctttgctgtgagcaagttgagccgatttacctctaatccgggagatgatcactggcgtgcgcttgagcgagtaatgcgctatctgaaaggtactgtagaattggggcttcactatactaggtatcctgcggtactggagggttatagtgattctaactggatctctgatgtggatgagatcaaagccactagtggatatgttttcacactgggtggtggtgctgtttcatggaggtcttgcaaacagacaattttgacgaggtcaaccatggaagcagagctaacggcactggatactgctactgttgaggcagaatggttgcgtgatctattaatggatctgcctgttgttgaaaaaccggtgccggctatccttatgaactgtgacaatcaaacggtaattgtcaaagtgaatagttctaaggataatatgaaatcgtctagacatgtgaaaagacgattgaagtctgtcaggaaattaagaaactccggagttataacgttggattacatccaaacagcgagaaacctggcagatcccttcacgaagggactatcacgaaatgtgatacacaatgcatcgaaggagatgggtttgagacccatgtgagttatactatggtggtaacccagtctatgtgatcggagatcccgtgaattagatcctgggaagaacaaaccattaataaactagaggagagtaccaatatatataccctctccaagtgaagatgcatatactctcgtgagctgcaaggcaggttggctatgccttaatgagttctgttggctttaattagcaaagatgttgtcctgcagagcattcttgaaggaactcacctttgtgagcttgactgttggtcgcagtccatgaagattttgggtgaatcttctaggaagcttactaaagacctaggagtatgacttatacgctccacccgaggggtagtctacagacggtctagtaccagataagactttgagtgaaacttgcttgcacaagatttgcaattcaaggcgtttgttcaagttgtgagtaagtgtagcttggagttctaggtggatgttcaaccttaattggtctccatcgaaccgctggtatataaacagtacattggaaaaggcaaatctcagtgggattttgagatttggtgggggattgttggaattaatgaatgggccttagcccactcgaagattaattctttggaaaatcacaaaagcccacctcatgggatggcatgcatgtggagtttagtaccaccttgcttattctaggagagggggacctccttaaaagggaggatgccctcctagccacttgaagcatgtgtggtggagagaagaggggaaacacacgcgcgcgctcgctcgcctcgcctggcctggcagggcaggcggcgcgcgtgcacgacgtacgcgtctaatggtccgaaaaattggctcctcacccttgcgcagatgcagcctccttttgcagttttgttttgctgcaaattcggattcgtttttgttttggaaacgttccgaaaaatccggtgcgtgcaaacggcgtggagtccggataagttacgcgcgacttatccggttcggttacgcgcagtagagatcgtgcgggcgccctgatcaagcgacccttctctatataaaccgaccgccgtcttcacgcaatatatgcgaaaatcaatctagggtttgcctcctactctgtactgcgccgtcgctcgtagactactccatcccgctcgccggcgtgcaccagcgatcgggagagcaggtctccggaacctctgcctttgacgtcctgcaccgggagaaggcggcaataaggtttttgggaagcgcttcgcgcgactgctccctgttcgttcgcgacggctcgccttcctcttcgttcgcgtgtttcgtgccttcgtagacacctgcgaaaagtttcgaccaagcagccggtcttttcgtcacctcggtacgtgttcaatatgttgcgcatttttgatctgttcatgttattctgcgtagtttacatgtgtagatctaatgatgcgttcatgctagttttcatctgtaatgtcatgatttatttatggaataaattaaatcattatatgctgcccataatctcaacaggattcagtccagccaaagggattagtctcggcgatttcatcgatttaatctttaatatcactggctttgccgtttcagtagtcagattgttttctaacggcagattaatttcctgttattctcttgattttgcatgccgactgagatcaagatcaatggctgtcatctcggtgtgtctgcccaacacctcgggatccccaatgcaccatgtacagatgccgatgtaatccgacacgggagtggcgcggaacaataggcagtgcttacagctcgcacacgattgagatcgccagccaccagatccacatgcatgtgttgaccaatcaacatgcaaattttgatcatccaggacacctcgccggaatcatgcatcaattaattcatcaagcatgctttttatgttccagatatacacacgcgggcttatatatatatatatatatatatatatatatatatatatatatatatatatatatatatatatatatatatatatatttatttatttatttatttatgcttgtggtactaatcagattaatctattaattgatctattttgcatgtatctggaccggttgattcggctgctgccgactggtgttcccgcctacacggttggttggttggtcgcaccaacgtggttaggcattcatgtcttcaccaactggctggacttcgccaccgccgactggtgtttccgcttgcacggccggcttattatgccgccgttgtcgggtgtctacgacttcaccgccggcctgccttcgtcgccgccgactggtgccctcacccaaacggttggttggtcacaccaccgttcatgggcgtccacgtcttcaccgaccggctggcctttgccgccgccgactggtgtttccgcctgcacggctggcctattatgccgccgttgtcgggtgtctacgacttcaccgccggcctgcctccgtcgccgccgactggtgccctcgcctaaacggttggttggtcacaccaccgttcatgggcgtccacgtcttcaccgactggctggccttcgccgccgccgactggtgttttcgcctgcatggctggcctattatgctgctgttgttgggcgtctacgacttcaccgccggcctgcctccgtcgccgccgactggtgtccttgcctatacggttggttggtcacaccactgttcatgggcgtccacgtcttcaccgaccggctggccttcgccgccgtcgactagtgtttccgcctgcacggctagcctattatgccaccgctgttgggcgtctacgacttcaccgccggcttgcttctgccgccactaactggtgttttcgcctatacggttggcggactccgccgccgttaatgggcttcatcatctacaccactggcttggttccactagcgccgactggtgtttttgtcaccattgatggactgcttcattcccacatcggctactcctgctgtcaccgagggaatactacaaagctaagttgtcgcgtcccaaaacgactctaaaatacatcctcaaaattatgcatagaataagtaaaatccatgtgaaagcctccaacaattaaaatgtgcaaagttaaaagtcaaataaggcttagaggatttttgtatatttcctaaaagcctaaaatgcgtaaataaattttagtggaattttcagagcacaaataataattattaagaaataaacaaagttaaaaaggttttataaaaagaaaaaccctaaaaagtccttttttccccctcatccggcctctctctccccctcccgaccctatataaacgctccccgtgcctccctccaccgtttccgccactcgccgctctctctccccgtcggaatcgagctcgcgccgtcgcccctctctctccgccgtcgccgccgagctccggtccgccgccgtcgtcgccccggaccttctcccgcttcggcgtcgccttcttcgggttcgccgcaacctcgccgacctcgtccacctctccgtttcggtcgccgaccgccggaacgccgccgtcctcgtctacccgagccgcgccgccgccttcctccgctccggtcgccgtttccgccgtcgccatcgaaccggggtgagccgtggaccgcccatttcgtttccccctcccctcccctctctcggccgccgctccgccgtgcctatggccgccgccggcgaccatagaggcgcgggcgcgccgcctcccgtcggctgtgccggcgaggccgccttcgggcgcgccccgcggctgccatgtgggacccggccgtcagccgcccgagccctcgggtgcggctgacgcgtgggacccacggcgccggccggtgtgagccgcgtgcacccggtccaccgtggaccgagaggctgccgcgtgggccccactcccgtggacccggtccgcgcgctcctcccctcggctgacgcaataaatccgattttaaattaaaatttaaatgaagaaattcgcaaatatccatttaaagagcatataaacttcaaatggccataacatggccatttgaactcggaattggaccgttcaagtctctaatttttccttaagaagtcaagaacccatttttgtactttgtttctgcttgttatatggagtttattagagtaaaagccttttcttttccgttggtcgtgtagacgctgcagcttcggaagatccgctcttcatggaagttgaagccggtgtttgggaaagcgagcaaggcaagtcacatcatctttgaacatattgaatcccagtttataaaattatgttgatttaaattattgcattatcgctttatttaaattcccgtgttatcactgttttatttagccatgcctatttacctttgttacgaccttattattattgttattgttattatttccttgttcaccctagaataaacaaaaccccaactagtggacactctactcatggtatcactagtatgattttaggtagatgcttcgcttttaattaggtaacattaggcggttttacaactctagactttgggaatgttcgtatcacctggacactatggaatggtttggttattgtgaaattggcttcacaccgctccttctattcaaaatccccaaaatggttttaggctgggctcggggtgcatggttttgatagtagcacctcggccatataaggaccggtcttcgggcctctgttgcaaagcactaccgtacttccacatgtctagtgggtaaggcttagtttgtggcttagtctagttataaacaaaagtacacggatggagatggaagaagtcgggggtcgatggacatctctaggacaaatgaaggctacacgagctgcggcccggtagtcgagatgtcatggcacagggccggtgtcctgctgctaggggctcagtcctgcctgcctgtcccaggggttccggccgtaggtgggattgggtcagtactcttgtctatggctaggatgggttggaaactatgtcacgtctttcgtctatataccgtggtggtatgtggcacgtggttacacgtgaggaagatgtgtcttgtgggtaaagatgtacacctctgatcagagtataatctattcgaatagccgcgccctcggttatgggcaagccgagcaatgtacccaagttagtgttttaattcttaaaacctgcttaacaactaaaatgtggaatggttggcctgggttggcttgggacgagctgggacccagggtcgggttgccagttcggtctgaatcatcgtaggccttgggttaaggcaggttcatgtgggttcacggccttgattaataattgtatagttctagaatcgtgtttacaaaatagctttgagcaactaatgtctttaaatgctgtttactgcaaccctaaccctttatagtataactcctttgtactcccttgcatttattctgcacttgtgggtgtgtcttgttgagtacggtggttgtactcagtcttgctcaatttttcccaaacccagaagaggggttcctggaggatgaaggctttggtgtctagctcgtgcctgccgtcaagtgcctgtggtcgtcgccctagtcttccgttgtttctcgtttgtctttgtgtgtgctgggccttcgctgcccatgtaataaattaactatttacgcttccgcttgttaaactctgaattgtatcaacttttggtgtaccttgcctcctgggacaaggattaatgcacgcacgtaaggaacgcccgttgggttatttccggtcgtgacaagttggtatcagagcccccttgaccctaggacaagccgtagatcccaagccttagcagtattttcgaaataaaaatcctctgttatttgtgaaaaccctctagtctttctctgtcttgctgcttcatttatctccaaaatctgacctttttaaagtgttgcttttctttttgtttgtagatggccggcagcgtcacccgtcgtggtttggacatgactggtttcgtcttggagctgcggggcatgtgcgttgtcctggggtatccacatggggtggactaccagggcaggccgcttccggagcaggagggtgacgatgcagagccccacgctgcttgggaggtcactgcagtgatcctcgctggctctcccgagcggacttcgttggcagtcaccgcgggtggagattctttccccgccacttgccagagcgccgctctcctcgccatcggcactcttcaccagcgctacccggacgagttgcagcactcgcccttccgctaccaccctcgccgcggaggagcccgcgactacgccaccttccgggatgctagctcggaggatgacgctaccatcatgcacctggcgcgcatggtggaggcgtacgacgcggctcgtatcgacttccatcagatggtgcgccgtgggatggtcgagaacaacatgaagatcctggagctgcgtcaggagaacctgcagctcaagaaggacctagacgcggtggaggcgcagctgcatcagctcaagatcgcccagggagaggtctgccgccccaagcgtcgccgcgtctgccgcagccagaagatcaccgcccgcaagagcacctccaggcccgagcttgttcgtcagtccctagcgtggacttgcttcgtcgagacccctcgtgccgagcccgcgcccgtggttccccaggagggggaagcctccggcgttggtagcacggaggatgcgctgttgctcaccttccgtcctggcccgtcgcagcggtagacgagcagttagtaggcttgcgcgtgtgttctttctcgtttgtcttcttgttggagttgtgtggggcatggttatgccggtgtgtggcataactgtgtcggagcctgtctttattttatttgactaagcaacttgaactttaatgaaccaatttaatagcagtaataaattcaagaattatggtagtcgtgggtggttagctttaattgtcagctctctctgtttgctggttctgtgtggggttttcagatggtgacgaccaggagaagtgctgccaccggtgatggcaaccaacccgaaggcagcaaccaccaccaccagggcagcccacctccacctcctcctccgcctccaccaccaccaccagacaccaacgccattctcagccaaatcctcgcccagcaggccaacatgatgactgctttcctccaccacctccaaaatccgccacaacataatgctccaccaccacctccccaacactctaaactcgccgagttcctccgcatccgcccacctaccttctctagctccaacaaccccgtggatgcgttggattggttgcatgccgtggggaaaaagctagacactgtgcagtgcagcgatgaggagaaagtcatcttcgccgcccaccagctgcaggggcccgcatctttatggtgggaccatttccaggctacgcagccagaggggcaacctattacttgggctcgcttcactgccgctttccggagaacccatgtgcccgccggagtcatggcccttaagaaaagggaattccgagagttgaagcaaggcaaccgctccgtgatggagtatttgcatgagttcaacaacctggcccgttacgccccggaggatgtgcgggaagatgaggagaagcaagagaagttcttggcaggaatggaccctgagctgtccgtccgtctagtctccggggactatccggatttccaacgtctggtggacaagagcatccgcttggaagccaagcacaaggaactggagtcgcacaagtgccgcttggcgaatttccgcaatcaacagggtgctaaccaaagggtccgctacaccaatccctatccagggggatcctcctcgcagcagcaacaacagcagcagcaacctcgctccgcgcctcgacctcaattcgtggtgcgcgtcccacagccgcagcagcagcagaatcaacaagggactcgtgcgccccgtcctcctacgccaactgtgcagcctggtcaaggccgcagggacgctcaaggtccgcagcgtctgtgcttcaactgcttcgagcccgggcactttgcggataaatgcccaaagccgaggcgtcagcaaggccaagcgcctccccgctccaacaacggtgggaaggatgtcattcggggtcgggtgaaccacgtgacggccgaggacgtgctgacaactccagacgtcatcgttggtacgttcctcattcattccatccctgctaccattctgttcgactctggagcttcccactcgtttatatctgtgccattcgtggggagaaatcagttgggggtagaaaggcttaggaaccctgtgctcatcaccacccctggaggggttatgacagcaaagtattatagccctgccgtccccatagaaattcaggggattccttttccctcggatctgattctgctagacaccaagaacttggatgtgatccttgggatgaattggttggctcaattccaaggagtagtggattgtgcgagacgcactgtcactctgtaccgagggccggaacaaccggttgttttctttgcacccccaacctctgtcagtagttccgaacttcatcagataggactgtcagaaatccccatcgtcagagagttcggagacgtgtttccggaagaactacccggtatgccgcccaaacgagagattaagttccggatagatcttgctccaggaaccactcctctgtacaagcgaccctaccgtatggcagcaaatgaactggctgaagttaacaaacagttagaagagttgtaagaaaaggggtatatacgtccgagtacttccccctggggtgctcctgtgatttttgtggagaagaaagacaagacgaagaggatgtgcgttgactacagagctctcaatgaagtcaccatcaaaaacaagtaccctcttccccggatcgatgatctgttcgatcagcttaaaggtgccactgtattctccaagatcgatcttcgttccggatatcaccaattacgtattcgtgatgaagatattccgaagaccgcattcaccacgcgatacggactgtatgaattcacggtgatgtcgttcggtttaaccaatgcacctgcctttttcatgaacttaatgaacaaagtgttcatggaatacttggataaatttgttgtggttttcattgatgacattctggtatattcataatcagaggaagaccatcagcaccatctccgtctggtattgggaaagttgcgggaacatcaattgtatgccaaacttagcaagtgtgagttctggttgtccgaagtcaaattcttagggcacgtgatatctgctaaaggagttgctgtggaccccgaaacagtgaccgccgtcactgattggaagcaacccaagacagtcactcaagtccgcagtttcttaggtttggcaggatactaccggaggttcatcgagaacttctccaaaatcgctcgacccatgacacagttgttgaagaaagaagagaaatttgtgtggagcccgcaatgcgagaaggcgttcaaaactctcaaagaaaggctggtttcctcgccagtgttaatcttgccggatactcgcaaggacttcatggtgtattgtgacgcttcgcgccaaggattggggtgcgtgctcatgcaggatggtcatgtggtggcctatgcctcacgccagctacggcctcatgaaggcaactaccctacccatgatttggagttagctgcggtggttcatgctctaaaaatctggtggcactatctcattgggaatcgctgtgaaatatatactgatcataagagtttgaaatacatcttcactcagtcggacctgaatcttcggcaaaggagatggttagaactcatcaaggattacgatgtgggaattcactatcatcctggtaaggccaacgtggtcgctgacgccctaagtcgaaagagccattgcaacactcttaacgtccgcggcattccacccgaacttaatcaacagatggaagccctgaacctaagcatagttggtcgcggattcttggctgcgttggaagccaagcttaccttgctcgatcgaatccgcgaggctcagaagaacgatccggacatgcatggactcctcaagaatatgaaacagggtaaagccgttggtttcacagaggatgaacacggaaccctatggaacggaaatcgagtatgcgttccagataacagagaacttaaacagctgatatttcaggaagcccacgaaagtccttattccatccaccctggcagtacgaagatgtacttagacttgaaggagaaatactggtgggttagtatgaagcgggaaattgcagagttcgtggccctttgtgatgtgtgccagcgtgtcaaggcagagcaccaacgaccggccggacttctccaacctctccaagtacctgaatggaaatgggatgaaattgggatggattttatcaccggacttccaaagacccaaggtggatatgattctatatgggtagtggtggatcgattaaccaaggtagctcgattcattcctgtgaagaccacctatggagggaacaaactagccgagctctacttcgctaggatcgtgagtctccatggcgttcccaagaaaatcgtatctgataggggaagccaattcacctctcacttttggaagaagctccaagaagagctgggtacccgattaaacttcagcaccgcataccacccgcagacagatgggcagaccgagcgtctaaatcagatccaagaagatatgcttcgcgcatgtgtcctggatttcgggaagacctgggataagagtctcccctatgccgagttctcctacaataacagctatcaagccagcatacaaatggcaccttatgaagcgttgtatgggcgcaaatgccggacaccgctcttgtgggatcaagttggggaaagccaagtattcgggactgatatcctgagagaagctgaagctaaagtcagaaccattcgggataatctaaaggtggcacagtcccggcagaaagttatgcagataaccgacgccgtaacctggaattcgcagtggacgattttgtgtaccttcgggtcacgccattgcggggtgtacacaggtttcagacaaaagggaagctcgcacctcggtatgtgggtcctttccgtatcgttgcccgacgcggagaagtcgcttaccaattggagctgcccgcctccttgggcaacatgcatgatgtgttccatgtgtcgcaactcaagaaatgccttcgagtgccatccgagcaggccgactcagagcaaattgaagttcgcgaagacttgacctacgtggagaggccagtgaaaatcctggacaccatggagcgcaggaccaggaaccgggtaatccgtttttgcaaggtccagtggagcaaccacgccgaagaagaagctacctgggagcgtgaagacgagctgaaggcagcccatcctgatctcttcgccagttcttccgaatcttggggtcgagattccgtttaaggggggtaggtttgtcgcgtcccaaaacgactcgaaaatacatcctcaaaattatgcatagaataagtaaaatccatgtgaaagcctccaacaattaaaatgtgcaaagttaaaagtcaaataaggcttggaggatttttgtatatttcctaaaagcctaaaatgcgtaaataaattttagtggaattttcagagcacaaataataattattaagaaataaacaaagttaaaaaggttttataaaaagaaaaaccctaaaaagtccttttttccccctcatccggcctctctctccccctcccgaccctatacaaacgctacccgtgcctccctccaccgtttccgacactcgccactctctct

SEQ ID NO: 5858 - DNA, 90562 bp, Oryza sativa
ctcctaaatagccctccggatctaaacagggcggtaggtcaacacattgtcattagattggtcggccggttgtctcatccacggtttatgctccaaaagtattttttatttgccggatgaacggattaaattagtaactaagttggatcaacgcatcggtcggtttaagtttcacgcactttttgaaattcaatacagctggatttatattcttgacgaagttttgcttccaccatctgttgaagtcgtactccaaattttgctatcaagagttgtatcttacaactcgttttaaccatttttcagttaaattaaatatctctattcagaacaattacagttgcagttaggtcaataccgttatcgatcaaatttaaatgcttctgcatttttttttacccagatgatgttgtgtaaattgtgcattttttttacaaaattaacacaacatcatattgatatcgctcttacatgtgttggttcccaatgagggtattcctacttgtgagaattttgaatattttagaatataatattttttgtaaaagtattcctaactttgtttaaaattcaatattctcccaaattaattaagttatgctgaaatttaattactgtactttgaaaattttcaaactacaacctcaaaacttcaagttagaactttcaaattttgaatttctattcctcgcataagaaaattttcgaattgctattttataatttcagaataacaacaaattatttgaaaacaatgcagtctgatagtttcatataattaaatatattcttaagttcatttggatgcatgccgtcggtccatagtgtgatatttttctcctgcgaccttaatgcaaaccacattccaactaccctactggtcaccattaaacttatgaatagttctcggacaacagggctataatgtatttcgcctagttgtgggcttgtggcatgattaatttacttgtcagaacgtttggctttgtagccaatcctgtaataaaccttttagagcaccttaggctctgtttagatggaactaaaaaactttttagttcctatcacatcggatgtttagacactaattataaatattaaatttaaactattgataaaacccattctataatcctggactaattcgcgagacgaatctattaagtctaactaattcatgattagcctatgtgatgctacagtaaacatgcgctaattatggattaattaggcttaaaaaatttgtcacgcgaattagctctcatttatataattagttttataagtagtctatatttaatactccaaattcatctgatatgacagggactaaagtttagtccccggatccaaacacccccttagtaaatgaacactaaaatgcagtaatagagtgtcattactcattgaattcctataaaatcaaaggaaggttacataattatagtttggataacacataaatttgtgtcaacgaaagagaaaattaaacatgaggtagaacctcatgtccaaaattcatatgaaatagcccatttcacaggaatttcaaagaaatttgagagagagattcctttgctccaaaggatcatatagtaaaaaagaaattcataggtatcaaatcatcaaaaattcatctagttttcctttgttgcaaagaatctcttagcatagaagtgtattataatagttgcgtacattaatgaagaacataaaaatattatggcgtgcatatgaaaagatttatcgcgaaaagatgttataaatttttagtacataagaagtaaaaattcatcactgagtttatcctggttcaatgatttgccattgacattgtcaatttccgtaatatactacgactttactaaattgttctacaatatgccattgtattgcatttctttcaaaaatacctaaaatacccttataagaaggtttgaaaaaaatatgcctttttatacattatctttatactacatggaagtttgtgtataagtttttgtgtgcttttgttttttaatgtaaactagctaaatgcatgtgctttgctacagataaaatttatttttcatgaaatgttccacctgtcgtgttgctatggaaaacatttaccttaatttgattctatgcatcgatatccttagattgattgttattaatataaagaagctcagggggtgatttctaaaatttacaataggagtagctataaggtgacaaattcactattcccccactagatcctcttaaagtagcatagatcatctttcatatggtaaaaaaaatatttttgtgttgttatcttttgtgtaagcaatttcactatcataagccaaaaaaatttaaataaaaaataccaagaaaacttgaaagttatatacaaacttccaggttgtgtaagaaggctacactaaaatacgtagtttttcaaacttctactgagataaatcgattgttgacgtggtacatttttaagggtattttgggtgtctttgaaaatagtcagtccaatggtatattggagaccaattgatgaagccgtcggtatattatagaaaacatcaatatctatggcaaattattgaactgagacaaactcagtgacatggagtagattatccctaaaaattattatatgtctacaattaaaataatgttcattatatgatttgccacgatgatgtcattgaactacactaggattaaaaaaaataatggaaaggacttggtagctataaatgatacacactgctatggaacacatcttttacgtgaccaggcactccacctgtgactaaaggctttgaaaaatcgacgatcttcccagataggtcacaaaagttgatttttatagttacagcaggctatggttaagcggactacgtgagaaaattattttttacaggcaactatatgaagccaaccgactggaaaaaatattttcaacaaaaaaaaaacaatgtatgcagctgccttatgaatgacagttgccaaacccatatccatagatcaagacacaaattagagagagaacaattcacatgattggaaaatgaaacaaatcaagttgttccataataatttgtattcacaaatccaacccagattcacaagcatacataaacatcagaagcaggccagatcgggttcgaacatatttattctccccacacggatgaaggcacttgtagcagcagcagcagccctccttgctcacctcctcacagcagctggtcatcgtcgcagctaccattgccaccagttagcacagccctcgcatcgggcctggagtggcgcaaggccagcattgtcaccgccaaccaagggcttccccgcggccgctagttacgttcctcctcttcgtcgtgtcaccactagctcaggcagtatgaggctactcctccccttcaccatcactgacacccctacccttctccttcgccgcagtcgccttcaccaagccctccgccgaggctcgccctcgagcttcaaaggtgacctcattgtcgctgccctcttctgaaatcagttatgcctagatgtggttcgttgacagaggataacttagatgtggatatataagagaattgtggtggtaaaatttcctagtgggttgagtgaagggtggtcgagccaaaccataactttggtaagaaaaggtcaccaaaagtgcaattcactcattagtcattttaaaaccgccctctatgtgtcatcatacatcctagattagcctaactgcaatcggctacgaacaagacaacttgcaattttttttagaagcgtcatgcaagaataaaaaaaattaaagggtccatctgaagaaagatgagcaacaaacatacaagttctttacaattattacatattcggtcattccaaaatataacatactttgatttctaacgataccgtataattacaatatcagattgttttgtgttacatggttagcaaatcaggattgtagttatgtcttttttttctttgtccgtatattttttttactggattaatcattgattaagattaagtcagaacagaatgagtttattaccgtataaaaaataaccatgctatatgttgtatatatgacttcaatatttgttatcatacagcttctaagttgggcattaaagagctattgccagcttacaaagatcaggaccttgaactaaatgacctacttactggtgtggcctttgcctcaggaggcagtggatatgatcccctcacttctatatcggtatagttttgttattagctcaaaactctcagaaaatacttcgaaacaaatttatatttcctcataatgcaccataaaaaaagacatttcgttaattgtgaaataccaattgatgtatacatgtgcatatgtaatattttgttatgatcatgcagactgccatatcgagttcaggacaactcaatttattcagtgactacaagcagaagcttacatctttgatcggagaggaggcaatgacacgtattctctcagaagcagttttctttactgtcatgggagcaaatgacttgctcaacaattattttacgcttcctgtgaggcggcatcaatatgacattcctggctacgtggactttgttgtctctaacgcagttaactttactctggtaaatagttattctatttttcatccatattatttttaagccattttgattacatggaaaattaccatttatttcagttgtaatgtaagcactgcaacgtttaaatatcccatatatttctgtgatcagcagaatgtgtaagaatatcttcatctccctctgcttttaataattcgtatagttgactattacttgaatccttcaaatggattaaaaaggcccaataattctttcctcgtatttacgaaaaatacatcacacaattctataatgtagcattatttgtatatgttgttattaatttattgctaaaaaagagtaggcaaagtttaaaaccggaaagtccaataacatctctttgagagtggaggtggtatttcgtattttctatccctagcaaataaacattgttgtgttattacttccatgagtgatataaactcattttcagttaaaaagaacgagtgatatacacgcgtttttattacttgttctcgagttggtgttattagaattacttgacatgttatatttcaaccatctcgttgtcactaggttttcatcttattaatagaaacaatttaatttagcaagttaacaaatggaaattctcaccattaggaaattactttagttcgtcgttttcaacatgttttacaaacttgcaagctagctagattgggctacttgtcaccagatcattgtatgcattgagttatttaaaaaaaataatgccatcattttataaaataatatcgttataggtacatattttagataataaatattggcatttttacattgtagattatttcatgggatgatccatttattttcattctttcacactaaacctatctcttgtacagacaatgaatgagatgggtgctaagatgattgggttcgttggtgttccaccacttggttgttgtccctcacagagaactggtccatcaagagaatgcgaaccattacgaaatcaagcatcagaattatttaatactagaatgaagcaggaaatcgatcgactaaatgtcgaacataatattgatggtttaagggttgtttattttgacatatactacaatttgctcgacctgatccacaatcctggttattatggtaagtttgtaaattctctttagttattcttttcattttagataaacaatgagatctaaaaaaacatactactacaactatattagacacgataacgataagcgcaacactttccaaaaatagaaataccgcgtcttctccctcacacgtaacttgtgcatccacctgttagcaccatgcagtttatatgctacatcgtctagcactattgcactagtatttttaaaaccttttatggcttatatctttataactgtatatttttttaatcttattgagccatcgtactctatttaaaatatatgtgacgaacgagtacaatattaaatatattcagattatttaaaatttatttttgattttaactcttttagcagtgtttttacttcgaataccacgatgagttacttgcctctagcaacatagttacctttagtagcatgaagggttagtttcttctagcagtgtagtcacttttaataccatgaagagttacattaatttttagttaagttacttccctccagcagtgcagttccttctgacacagtgcaaaaagttacttcgaatatcaatagttacttctaatactgtgaatagttacatctattttctaaagaatcacttcctagatgaaataaattgcttttatcgaaaaacaaaaatctccctctctctctatatatatggcttacctcgaataaaaaatattatgtatttacttgtgaatctacacattacatacgaagatctttctgttaacacatatatgtaattacttataatgctataaaaagttacttccattttagaattcagttacttctagcatttaagtaaattacttctaaatattttaaaatatttaatattatactcatttcgtcatatattttgagtggagttcaacggatctgaaatatataagttaggtatataagttaggtaatatatggtttgaaatatataagttaggtatatttccactgaactctcgcaccaaaagtatgcattcatacaccacgcgtacatgatagcattaatcggacaacttcggcaggcgtcgcaccataagactaatctatgcacgcacacaaattagattttgcatactatatttataataatatacacatatactagatgtgtaattaacctactatataaccgccgattaaaaaaaatctaatcatgaccgaccaaatgtattgatcaaaacgagtgtatacttggcacatatgtatgattaagagcatgtatacaaaagacttttactccatttatatactatcaccgtacaaccctgacctcttaatatataggcatgtctacgaaaataaacatattttcacgtatagatctgcaaaatagattttcacatacgactctttactctttactggacatcgtccaaatccttttacatacaagttttcttttagcccacctgaaaaaaaaggggctatctaaaaaagtgttttttaagtagtgaacactaacttcgaagatatgttcaactcaacttgcataaattggcaaagactcgcagcttgcacaagcaagcatgattaaatttaaaccactagagacagttttttgtgtatacgtagcttgcatgtgatagagcaactagactttggtaatgggttttctgtgagtcaaatatatttaattacactgaacatcatgatgattttttatgcaggtttcaaggatacatctgatggatgctgcggcaacacagtgctaaatgctgctatattcattaaatatcacagtgcatgtccaaatgtttatgattatattttctgggatagcttccatcctaccgaaaaggcatacgacatagtggttgataagcttatccaggaaaataagcagtatctgatgtaaatgaaatatattatcttatatattacatgtgcttaaacggaatatacaacgactataaatgtattctataagtgatttcaaattaatcataactcttatttaggaaaaaataacatatatgctggtgagctagcgtgtgaaattctagaaaatcaatatatattgaaaataacttagctgatattaataatgtgtaaagtatattgagccttctctgtaagaaatgttgtagggtagcccctatactcgagtatttataagatttggagtaaatgtaagaatatatatatttatacacccaagaattttccatttagagatttaactattccatgaaaattattttcaataacagagggtggacctacttgttattttgatagaggaaaggaactatgataagagggaatatatagtgcaaacctaaaaatatcatagggtcttaaccataaatgtcgtccacataaacatgattaaaacttttacctcgagtaaacctctattcgtagttaaatctaggagtaaaatttgaacattcattttctttaatttatggtagttttagtttttattgtgcactagcaaaaatgcttgtgtgttgtaataggtgaatgcaattgtcacgattgataaactcttgcagtttaaatgataaactgaaacacaacaaacaaaataatagcaaaaacaagtcaatccagttgcgcccacttcatgcgccatcacagaagaattcttatgtacaactttccatatcatcaagcatcagtattttgctatatattgttaaaaagatactctcatcgaccaaagatagaaatgttgattattcaattagtgaaagttttttttcactctagatggaatgaacttaaacattgataatttcaaaactaatatatttataaggagataaattaggaagaaaaaaaggtggaaacaagagaaaaaggggagaaatgaggagaacggaaggggagggagaggatcatgatgattaggaggaaggaaacggaggtaaaaatatttagtggtaagagttggtgaatatttatatacaggtgaattatggacgaaaagcgatgaaataacctccggccaattagacgtgagtacacggattggaagacccacaaattagtgcaaaattgacacaactaaagtctattcaccgtacactgccataggggtctacctgccagtctcatagcgaagtacggtggccagatgtggtggatatggttcgaccgaaccaccaactgcactcctaaccatcagcttccatgtggcaactccccatctgtccccaatgacggttaagggtgttaactgccttaaccactaacctacaactgtcgttagcctctataaaatgaggagaagctctcactctcaataaacaaaacaagtggagtacaactcactaacacatttaggctactctctagcagagttagaatataagaagagtgtcaagggaagctccaaaaggagtgccccaaatatcggatttcacttcaggatgttctggagatatttgcctatctttgggagagtcctagaggagcgccgtagttgtcgtattcatgatcttgtacctcgatggatacttcttttacataagtatttgtaatctcctttggtatttacttgtagattgtagtgatcgacaataatacttatggggtgcacaataataacatgtggattatactggttaaggcccttaaggagaggtaataccctagtccaattgtaagatctttacccttccaaagaaaatgcctacgagccctatctatattatcaatgacaacataagaaaataacaaagagcacttgtattatcaatgacaacataagaaaataacaaagagcacttgtagtaagtatgcatagtataagagtcaatttatccccatgggaaagtgaagtgaaagtggcaaccatattctcctttcaatttggtctgtgagaggagagaaatcaatcacttttggctttgaagcactgagagggatgcctaagtatgtgaatggaagagagatcagagaacaaccataagttgaggccaacaaaagagaacaaccataagttgaggccaacaaaagagcattatgttcatctagattgagtggaatcataccagactttgcaaaattcacctttaacgttgtggatgaagaaactgtctgaacaagagctttgagagctattaggtgaggggctgaggcttgcataaacagtgaagtgtcatcaacatactgctttatgggaaaatagtttttggttttctcattttaattaatcctgcaattggtagttgttgatttaagattatttagggtgctcttgaaactcaattaaaaattgagggaccaatttagagcatgcagaacttaattaaaatacttcaatctcaattagattttttcttggacgtattttagtatttgaatttcttttagacttttactattttttattataacttttagaaagtgatttttaacttgggatggatttatcaggccgtgacatgcttatatgtagggttgaaagtgattcagataattttcgtccaaccggaccttttttcggattcggatagtttcggtcggatatatccggaaattttcgaattcggatatttttttgggatatgaaaacgaatatgactagtagagtgcccgtgcgttgcaacgggtaaaaaataaaataacaataaccattagttcatctttcaattttcatgatttaaagaagcatttattcacttagagccaaaaaaagatgggatttcaccaccagaaggaaatattttttttctttggctttaaagagtgaagataaaaccactaaaatttctattaaactgagaaaaacgctacccatagtgttatggaccatgcaagcttctatgcagacgagaatgttaacacaagcttctatgtaaactgagaaaaatgttgccgcataatttgcatataaatagttctgatcaatgtcaaatttccatcaagaaatctctgctacaatttcacttctaatgaacctgctaatctctctccatgtctccagctcgtgccataagctcccactcccatacccccacataatccatcaactccttttcctggcaagtggctagtacaccaaggccacacgctagagtgatctaaagcctgccaaaatgaaatgagatgagaagccacatgaagaactttggaagcacgatagccaaaataaccaaaatttgtcaccttaaagcaattattggaacatttaaataaaaatgaatgtattgtgcaggcctatgttttgacaaacacatgaatttgaaaattttgcagtttgatagtttggagctaaaacttgggcttgtgcaggcctgcgttttgagataaattaagctagtaatgtgtgatgtcatgcataaatcattctgaactttaatagtctgaaacttgcacatgtattgattatgaaatctgaacatgggcatgcatttttttgtcaacctatctgcacagatagctcccatccactttgaaggaagatctgacaatgacatactacagtgcacagatgaacacagcactgcatattttggtccaaatataagaatgcttattacacaaacaccataagatggcacaatccagttcatgaaaggaaaacactgaattttcttcctttgaaaaacaaaaggtgcaattaaagaataaaaagcaacaaattttacctggaagcgcaaatgtgtcgaagcactcagcacccttcccctgccctcgcccttgatatgttggcaggttcttcactgcactgaattgaactttgcattcacctgtcaacttagcacttacagacagaaatatcccgaataggataatatgtcatttatgaattgtgccgctgcaataatccagctattgaaaggagaaagtgtaaaatatggttatcaaatcaagaagactgtcaagttaaatgagaagcgggaaaaattcatactcattagtcaactgaatagcgatttgagtaggaagcatatcatcctcctaggggaagaaacgtgcaaacatcagaaaaaccgtttcgcatcaaagtaaaaaactcatagatacactaccaggacaggcttaacagcatatgaagctaacaattaacagatacaaaatcctggaggtgtaatacactttctcattaggcatatattcaaacttcaactattctcaatgctcacaaatattgccttaaattacaaaattaggtgagaggaataaaaaaaccaaaccaaaatccatttagataggtcatgcctaactaaatgcaaaatccattgtttattagccaaaaagtaggtgatttttttagaagaataagcctctcagattaatccctctgtcaattgagacataaggctttcatttactacttaaaaaaaatcgtagtggcggtagtgactccaatcctgacagacacacgtaatatggatagtttgatcgccaaatccaatggttcggataacaggcaaacatgtgctttctctttgcatctacgcccatcacaatgcaaagcaactccccctctcgcttcctggtttttctccgcatctgctgccaccaccatcaccgcaagtctgcaacctagccatggcattgacagcctcccacaacgccttgccgccccttcctgccctcccccattgctccaagacaccacatccccgcccaagccgcttggccgaagcccgtgctgcgccgccactgccctccccctgttctccacgtcacctctccgcccaactcaaatcctccatgccatccccgcaacacaccgcttcgctgtggatgtttgagaaagcacatcttaaattaacagcatcccagaaattattagtagcagagtgtaaaattcactgtcgttcccctctatcaatgtcacaccctgaaaattgttaaattataaattgttgtgaaaaaggaatttttagaatttatttaataattaaagcaagtgtgtgaataaaatctatgaaaaaattgaacataaacttgatctagataaaattttattgaatactttgtatgcccaagtattctctggatttttttcagaattatttgagtattggaattatttttaataaatgaaagatcatttcagcaattatttaaattaaaaagttaattaaattctcttcctcagtctgggctgaatcctgcccactcctctctctcccttctcccttccgcagcccgtgcctctcccttggccgaagtctgcattagctccctcctccttctttctctctgacccctggggcccactaggctacagtgccatcttcctcctccagcatctctcccgtcccgtgaccgtgaagccgacgccgcatcctccgctcgatccggtgcatcccgtgctccgtttccaaaattggttgcaaaaacggattcccctcaatctcctctatcttatccctaagaaacccctttaaataccgttgtatattgcgtgaattcgacgcggtttcgagctccgtttttccggcgaatcctaactaatccgtcgccgattccatccgttcccgagccgacctctccctcttccggctataaatagcagcccctcgacctcctcttccgtttcctcctttttcccgaatttttccctaaccccttcttctccaccagtgttcgccgtaaagccgccgtcacagtcgtcccgatctcgccgccgctcgaagctcgtcgccggctgccgttcgtcgcccatcatcatgcaactgtgggtaaggactgtcttgttctcctcttcgctttagtgctctcgctttccaccgttgtgtcatcatttgtcgtcgccggccatctcccgttgccgtttttcgtcgccgtcaccattggtgagttcgtcgtcgcgtcttctctctcccggagctgtccccttatcgtcggagcgtcgccgttcagtcctcgttgctatccagagccatccgccggtgatgatgttatcgctgacatccacatcatctcaagccattgcaaaatcaatataaattttgttatctcttttcaatgacatattattcctttttaatatatgttacctacgatctaatctattttcggaggatgttttaatcttttgtctcagctataaatcatctgtaaattgtttaatcaatttggattagtcttttctttaataggtttaattggaattaaatcttgtaaaattcatatctaactcatacgaactcggaatgaggtcgttcaagtcccataattcatctaaattcaagctctacctatttatgaactttaattgtactgttcatttggtttttattagtgttataggtttagttttccgttgtttcggaggatcgttcgttcgttggagaagttcctgaagacgaattgaagacgctttttcgcaaggcaagcatgttgaatccgtttaaagctaatgttttatttcaagttatgcattattttagaatgtcatcgggtggtgaacctttctcatttaattatggccgaagatggctttattttcctatgggttataatttgactagcatcgaccttatatatcggattggttcagctagatgttatttatagttgcttagccgtgcttagaaacattagctcattaatgggataaattatgcttcactattacttatggttatatttaatggtagctcacgatggttaatcgtgttatgataattaattgataattaaaatatgatatatggtgggttgtgagcacatggttttgaaggtcgtgctcatgacaattaaggaccggttcgcgagctactgttgtaaaatattaaccgtgccaacaacatgccagcgtgggcaacagctttaccttttgtatagcctggttcattacggggtgccagactgagaagcggcgagaggtccgtgggggtcgctggggaatccatgcctctggtttttgagggggtgattatgatccaggaatggtgcactgtggtgagttgtgttgggcaaagggtattgtcacgatttccccatttgcagtgccgtggtggtacttcggggcatggcaacatgtgtggaatcgtgtcttgtgggtacagtggtacatctctggccagagtaaaactattcgaatagccgtgcccgcggttatgggcgggtctaacaatgtttttcgtgattagtcccacactactcattaatgataacaatgtgataattaatttgactcctggtttagaatggataattcctggtttggaggtttgatctgtacgaccggggttggttgttcaggtttggttgggcctgagcagcatgggtgtgctgttcagtgttgattaatattgatgattaattactctactgttttacaaatttttaaatctttgctaaatactgctttcgcaaatgaaccctatattatgccatcctttggtatccttgtgcacttgcatacttgctgtgtggcttgcggagtattccatgtactcaccttgcaataatcatcaaacctcagttgaagaaaaaggatccagaaggagaagacctttggtttagatcccagttgagctgcctgtgggagtggagctgaagcttcgctaggttttatttttccgctgcagttttcttcatggtaaggactaagtgcctcttatgtaagtatttatttgctttagttattttgatgaatctgtatattaaattgtcagtttgtgtacctcggttaagtcctggacgagggtcttaatgcacaaattagttcggaaattacttatgaatttctgggcgtgacaatcaactatccttctctcccatagtacccaaccttagaatcgtttccatgaccctgaaggctgaagcaatagaataaacacggagctactttgcattatcatttcggtttaactttgtaacatggtaaatcataaaggttacctatgggatgacaaatcccacatcatttccctggtggtctgcattacgattctgaattctaatacctcaaatttcctctacatagaaatgacaacaatatattagtcgagttctgcataatcagccgcactggtttaggcctcagatcaagattgttttcagttgcatggattgatccgaacagcaagtactgcaccaagagagggaacacttacgctagttgaggtcatcgaatttctgtgaaaggtcgtcgtacctctcaccttggcttaatggtgtaggaggatacgtggggcaaccagtattgcatgaataatgtctcgcggcgctaggtaggaatgagctcgcactccagaacggcctcgtggacctgccggacggtggccttgaggagaagatgggcaacggctaggagcggggtctcagggggtggatgcacgtcggtgagtgctgcggcgccgatggaatggaggtggcgtgagcaggtgcgtgggaaagcgcgaaggcagcggagaggagatggaggagaggacgatgggccaccggggagagctgtggcgccactcctccctccccttccaatctcagccaccgtcactcgagctcccgccaccttgtgaggccagatcgatggtgaagagagggttgttggcggcgttcctatcgatttgaggtcggcggcgcttgcatcgggagggacttgagatggcagtgcgacagtgatatgtgattgatgaaacttgaggcaactgcgaggcgaaggtggctatgagaggggagggagacggagcggtggccggcggcaaagactgaaggcctgcgaggtggcggtggctatgcagatcggcgagggcggaagaggcgatgcgcaacggaggtgaaggggaaagagcgcaaagaaggtgggggaggggtcgaggtgcgagtggcggagggggaggcgatccgtaaccgaggggatacgcgacgtaatctggaccgtttgatcctgtgatccaacaaccctgtgggttggggtgggggagcgggcggaggaggaggagagcgaagggatcgatctggccgttggatctggtgattgtacggatagaatggtgcgtgtccgtcagggttggagtcactgtcaccactacggaattttaaagtagtagagatataggtgatatccatcggaaatcagatatccgtcagatattatcgggtattttccatcggatatccgacttacacataaggcccataatacagcccaacccaaagaagaggcaaatcaaacttcttggcaaaaatgaatttcgatttgaattttatgatactaaatgaactcatatgaaaaagttgtcaaaaacaaagttgtagaactcatttctccatccgagtttgattgaactatataaaatttgaattttaaaatataagaaattcaaataatatttttgggtagtaactgatttcaaatggaaaaattgtcaaaaacaaagttgtattcttatcaagatctataacttttattttgatcatttttctatatgactttgtttgaacagtttgaatttaaatttaaaagtatgacaacttcaaacaatattttcaaatactaaatcatttcaactgaaaaagtcatcaacttcaagttgtataactcaacaagatctataacttttattttgatcatttcttcatccggtaaagtgatagtaatattgttcataaaatttgcatatctctcatttgcatatctctcatttggttttataaaatataagagagagatgtaaattttatgaacaatgttactatcactttgtcggattaagaaatgatcaaaataaaagttgtatgtcttgatgagttgtacaacttttatgttcatgacttttcagctgaaattatttactgcttcaaaatattatttgaagttttaaaattcaaatttttaattgataaaacaaagtcataagaaaaaatggccaaaataatagcagtaaaaacataataacatgatagagcataatttagaaacacaatagcaaaaatcgtttgttagtagtgaggggtttttatattctgattaatataatattcgtcaccgtattcgtttcgcttcgtattcgctccgtatttgtattcgataatattcgattccgttttcatatccagatttctgattccgatttcgatttcgaaaaaattatgaaaacgaatatgacagagcagtttccgatcgtattcgatccgcttttatccctatttatatgtagtggggtggactgctcacttgtacttccattgccatctattaattactcaactttttgttatgtgtggcagggagatggaaagctgaacgtatgggcgatagtcagatagggatcggaaagattcgaccaggatttagtttgattgtgaaaaaatcgggtccatctgctcaaaatctgacggttaatacatatatagtgatgatgtggggtgagctgtggaacaagctatgcctatgggtaccaaatattgaaagaaaggatatcgagagttttctcaccgtttcttgtatgcgacacgcgagggatgcaaacaaagcaaccgcatcctactatttgcgacacgcgtgcgtgacacagctgcatgcacgtcgcagcacgtccaagtaactaagcgtgttggctatacctatactccctccgtcccaaaatatagctatttttagcaagtgtcttgttccaaaatgaactatttcttcacctacctcctcctctcaaccaatcacaaccattcttcttcacctactttctcttttcaaccaatcacacacttcctccaatcattctcacctactttcttaatacccgtgccaacctcaaaaatggcttcattttgggacggaggaagtactatatatagtccctccatttcaaaatatttgacaccgttgactttttagtacgtgtttgaccattcgtcttattcaaaaaatttaagtaattatttattcttttcatatcatttgattcattgttaaatatattttcatgtacacatatagttttacatatttcataaattttttttaataagatgaataattaaatatatgctaaaaaatcaacggtgtcaaacattttaaaacgaagggagtactatatatatcatatatatctagtgcgcatcgatccctagtggagtggtagcacatgccccagagaggcgcacacaccagtgcagcaatgagaggctaaccgatcagatcatcaagctcaagcaagctaaaatcaatgatcgatgacgtgcctaagcaacagtcgccatggatgctgcctttttgttcgaccgatgctggtgctggtgatggtgctggagctgacgatattgattccgccggctagctgtcttgcaagtccggttcggaacatctcggccatcttcatcttcggcgactcgaccgtcgatccaggcaacaacaacaaccgcctgacgccgtccaaggccaacttcccgccgtacggccaggacttccccggcggcgtggccacaggcaggttttccaacgggaaggccatgagggacatgataggtatgtgaaagtacttaattcggtggcacaaacaatctgtgagattaatatatacctctgtgcgtgtttttgttgtgtttgttttttctgttgtagtattgtcacctatatataaattaagtcttaatgaaaaagatacgcagcggctcatcgctcgagcgtattaataaatgattaagcatcctagctgactttagttcttctctagggcttgttcccttattcccttccgaaagggaattggagataatttagggcgaatatttccctcatgctcatatggtgactcgttgatcgatcaaatatggaattgtcctatgttagcatagaaaattatggtgaaattagggcgctttttttgcatataggttgtgggtgatcagctgcacgcaaaaccagaaatacgattaacatatgattagtttaatattaattattaaaaatttagaaaatagattttttgatttttttttcacgattaataacttattttttatgaaacacaccgtttagaaaatagaaaacgaggagtatctaattaagttcagttagctcttaagaacgttaccctagttggatacgctagttaattctcatccaaaatctcaagcccatgatatctatatggatttatatagcattttcttaggggaaaaaaacgtgagagagaattcattaaatcctattatcattaaatggactctgtagtttttattttattttaattcaagacatcaaaccgagtgtaactgaacttataacttctaaatttcacaattattgaattaagtaattgaaatgcactactataaaaagacacatagagacgacatcatagataccggaacagctaaaaccgacacttaaaatacttttcccacccacacaaaaaaccacaggggcacgcaccagccgcaaaaaccggcacctatcttccttgtcagagaaatgtacgctcacttcccattgtcaataaattccatgaataaacacacaagtatgtatacacaaaaaaatttaagaacaacgatcagatgcctactctattggtggagaaaacacctaggtagattgagcaggtcgggcggccacccagtgctacagagcactttttttcaagcaaatttgccaccgttttttcaattttgcaaggatgccactcgaatgataattccagtggtatttttgcattttttagtggcagttttacaataacgattcaaagcaatggtaaatttgtaattgacccttttttcaaacggccgaagtcagtctgcagccactagccagacgactgctcaatcgcctggagcatggtgtatgtggaaatctatattttgcccttacgggtataacaaccccatgtgaagaagtattttgcacgcgggcacgtaaagccgccatcctatgaaatgtttttggcgaaaaaaattaaaattcaaaaacacaaaatttccaaaaaccctagctcgatttgatcccatcaccaccggtagtcggtgaatctgccgtctttgctgtagttctccatctttgtagccaccgtcatcggatcctacgttcccatcaccggggccaccagatccgtccacgggggagacagagaagcaatggagggaagagggccccgccacatcaggttaagcccctcgcatcgccgccgccaccggatccgtgcaagagaactaggagaagtcatgttgtggagaggttgccactacctctgggtccgcccctcctgatggaagatggcggagaagcgatggacgggagaggctatcaccggacacgccctagctagggctgtagccgttggatctgtcgtctctaggctagccactgatggatccgctgtgcctcgcccctcatgtcatagccattggagagggagtgtcatggccgacctctgccgttgccactaaccaccactcaagccaccattgccgcccacctctgcgccggccgccatctccgccaccttccatcgctgaccaccgcatcggagagaacgggagggagtgagtgagaactagaggctaagaggaaaggagcatcgcagcaaagctccgacccagccgccgtcacctcagagttatgtagctaaccactacaccagacagaacgagagggagtgagtgagaacgagagataagataagatagcatgagatagtgaggagaagctcttaagaaaggccaatatgaaggaaggtggcggagatggtggcatgtctagaaaaatcaatttttatagctggacttttatggaacacaccggctaaaactttttttgtatgggtcatattttacgattttcgcatacgggcgtttaccgacaccgctaaactttttaaatatgggtcttattttaggctgtttgtaaaaataaaggagtgatgtatgtacaaaccataattatgcatacgtgctgtgataactcaaactcctccatccacacaataacataatttgacccatcatgccttgtccttgccatctgccaccatgctctatataaaattactgtaccaattttgtttctggtatctccatttacttgggcataatggtaaggtttacatgatgttttaatttttcttaaagtcaaatttctctaggtttgactaagtttataaaaaaaatattatcaaaatatatccaatgttagattcaatggtattaaattggtgttatagatattactgttttttctataaacttattagtcaatttgacttaaaaaaaagtcaaaaatgacttatagtatgagacagagggaatagttgagaccaatctttgttatgtttttatcaaacatgtatactgtacttgcaaacactaatctaatgtaagaagatttggaactctcagagagagtagtttgcaacccgaacaagaatttgtatttgtgtatcaagaattctattaggatttcaaaaacagttcactttgggatatgtaaatttgtgtatcttgtccattttaccatgaaaaatcaagttttgatgagttttttttatctgaacttatttactgatattattaattgattgaataacatggtaactccgtatgaatatctggtttattataattaagattatttcgaacagcttcaaaattgggtgttaaggagctaattcctccttatctcggcgatggtcttcaacttgatgatctactcagtggggtagcatttgcttctgggggcagtggatatgaccctctcacttctaaaataacggtacaattttacttcttagaacttatgtctcaatacaaactgctctctaattattatccagtttcaatttgcactgtaaagtaagattacagtgtaagacacacacacacacacgcatatacagctaatattacttcagacgtattttctgattttcagaccgcgatatcaagtagtcagcagcttcaattattcgaggaatataaggagaaactaaaatcattggttggagaagaggatatgacacaagttgtcgcagaagccgtctactttacctcaatggggggaaatgaccttgcaaacaattacttcttaattccttttaaacagcatcagtatgaccttggttcttatgtggacttccttgtatctttagcagtcaacttcacattggtaagaagtatggtcccatgaaatgcatgattttttaagacaatttacatatattgaatatttgaacgtttccaagataaatcacgctttgtgtacatctgattggaatttcttggttgtagttgctgatttagatttacagtgaatactccattagtcctaaaatttaagaagttgtggagttaggcgtaggaaagtaggtgggtaggtcactgtattccaagacagtgaatgctaaaaaatgatatattttgggatggattgagtagtccttttccattctaaattgttttatgcatctgagtttgaatatgtaatgtaacattatacttgtttgcatattatacagcaactgaatcaaatgggtgctaagaggattggattttttggaattcctccagttggttgtagcccttcacaaataatcctcggaggacatccttcagaaaaatgtgatccagaacgaaaccatgcgtcagagctatttaattctaaaatgaaaatggagatagctcgactaaatgcagaactgaacatttatgggctcaaattggcttatatggatttctaccgctatctgctagaacttgcccaaaaaccagctctttatggtacgttaaattacatattaaaataagagagagattaactgtttcgcacaaaaacaaataattacatacataattattatggagtgttaaaatattacatgttgagcaaccggaaaagtatgtggtgaatggatatgatataaatttccgaatgataattgatgatctgcatgagcgtgtcgcattcaactactaattattaattctgggaggtggtctgtacgaacatttttatactgacgccgatctgaaattttccattatacaggtttcaaggttgcagctgtgggatgctgtggtagtaccttgctcgatgctagcatatttattgcatatcacactgcatgcccaaatgtccttgattatatttactgggatggcttccatcccactgaaaaggcctatagcattgtggttgataatatgatgagggtaattaaagagcatttgatgtgaaggggataatactatcatatattgttagtgatatgtcctagaggcaatcatagagatgattgtatcacatactatgttttcatatttatccgacattcactggtggagaaaccatctttcgtcggtcggccgaattccacaatagtcccggatgcaataaaaaccggggctaaagatgatctttagtccccggttaaaaagagttacgggcatatttgatctttagtcccggttggtgatctttagtcccggttcaaatgctgtcagggcttgtcagcccccccggatctttagtcctggctagtaacaccaaccgggactaaagatcgtaactttagtctcggttggtgttactaaccggggctaaagtccggttagtaacaccaaccgggactaaagtcccacctctctatatatatgtcttcttcctcctccagctgcccgagcaagcttcaaaatttcttcaaaaaagaggggaggtcatgccaaaatttctagtgaatttattttggtgattacatacaaatcggaggtgcctaaaaggtttgcaaattcatcctccaatgtttttttttgtcatattacatttggagctatgttttgcacacttttttgtctccaaaatttagttgtaagttgatgagagagaaaatttgtgtggggaagaaagaatatatagaaatttagtttatttgctaaagaaggttttataaaatagttgagaaggaaaatatagtgaaagttaatcttaaataatagaaacaaactaaaatgaaaattaaaagaagtaaaacacattaaaattagtttaaaactttagaaatagtaaataagtaaaacacgttgcggatgatcttggttagatgttgcaggacaccaagaaggactgcgaaagtgaaaaggagccccataaattgaacaagatgttagaggaccacagaacattgttgtacccaggttgcgagcaggggcataaaaagttggataccactctggagttcttgcaatggaaggcaaaaaatggggttagtgacaaggcatttggcgatttattgaaactcgtcaagaacattcttctggagggaaacaaattgcccgagacaacgtacgaggctaagaagatagtctgccctctaggattggaagttcagaagattcacgcatgtccgaatgattgtatcctatatcacggtgaggagtacgagaacctagaagcatgccctgtttgcaatgcactacgatacaagattagacgagacgatccaggagaagttgacgggcagctaacaagcaagagaattcctgctaaggtgatgtggtatttccctataataccatggctaaggcgtttgttcaagaacaaggggaatgctacaatgatgcgatggcacgctgaagagcgtcaacaggacgggatgccgagacaccccgccgatggttcgcagtgacgaaacatcgacagaaaatttaaagactttggaaaggacgcacgaaacatacagtttggtttgagtacggatggcatgaatccttttggagagatgagtagcggccatagcacttggcccgttacgatgtgtatcttcaacctcccccctggctatgcatgaagaggaagtacataatgatgccgattattattcaaggccccaagcaacctggtaatgacatcgatgtgtacctaagaccactggtcgaagatcttaaactgttgtggaagaaggaaggtgtccccgtgtgggacgaggacaaacaggaggagtttaacctacgagcgctgttgttcataaccatcaacgattggcctgcacttagcaacctatccggacagtccaacaaggggtacaaggcttgcactcactgtatggatgaaagagaaagtacgtatcttaagcactgtaggaaggttgtatacatgggtcatcgtcgattccttgcagcaaaccacccggtatggaagaaaggcaagcacttcgaacataaggctgacaatcgtaggaagcctaaacatcgcagcgggaaaacagtgtttgctatggttaaagatcttaaagtagtgttcggaaaggggcctggaagccagcctatagagagcaaagatggtcacgcggcgatgtggaaaaagaactctatattttgggagttaccctattgggaattcttggacgtccgccacgcaatcgacgtgatgcacctcactaagaacctttgcgtaaacctccttggcttcctaggtgtatacggaaagtcaaaagatacattggaagcacgtaatgatctaaagcatatggaacaacgcggcgaccttcacccggaaccaaaggagaaatgaagccattacttgagtccagccagctacactcttagcaaggcagagaaggaaagtatgtttgaatgcttggagagcataaaggtaccgtctggatactccacgaatatcaagcgaattataagcacgaaggagaagaagttcacaaacctaaagtctcatgactgtcacgtgttgatgacacaactgctaccagttgtaataaggggtatccttccagacaatgtccgggcaacaataacaaagctatgtgcattcatgaacgcaatttcgcggaaggtcatcgatccggatagattagaagcccttcagaatgatgtacttcaatgtctcgttagttttgagttgatatttccaccttcatttttcaatataatgacgcatctgctttgtcaccttgtgaaagagatcagtattctcgggcctgtgtacctacacaacatgtttcctttcgagaggtacatgggcgttctgaagaagtatgttcgtaaccgtgctcgtccagaagcaagcatcgccaagggttatggaacagaggagatcatcgaattttgcatagaatttattgaagaccttcgcccaatcgggatacctgaatcacgccatgaagggagactacggggaaagggaactctcggaaggaaagcaataatgacggtagacaacaatttattccgtaaagcccatttcacggttctgcaacaatcttcattggtagctccttacatcgaggagcacttggctctagttcgcgccaagaacatcggtaagtccgatgcatggattacacggcatcacattgatactttccccgcgtggctacgacaatatctcatgggtaacgagtcgatcaaccaacaacttgccttcctggcgaggggaccgtctgggtcgatcgcgacattctagggatatgagatcaatgggtacacattctacacgagagcccaagacatgaagagcacgaaccaaaacaacgctgttcgtgtcgatgccatgggacacgatgtaacaactgacacgtattacggtgccatcgaggacatatgggaacttgactatggtcctctcaaggttcctctgttccggtgccaatgggttaggttgactggtggaggcgtaatgattgatgacagtgggatgacaacggttgaccttaacaaggttggatactcggacgaaccttttgtccttgccaatgatgtaacgcaagtcttttacgtgaaggacatgtctagcaaaggaaagaagggcagagggcctgacgagcctaagcgtcacgtggttctcccaggcaaaagaaaaattgtcggagttgaggacaagactgacgaggattacgatgagttggatgggcaaccccctttcacggtgacgattgaccctagcatcctcctatcaaatgaagacaccccttactcatgtagcgatcacaaggagggaacgatagtgaggagaaagtacgtgcggtcaaccgtcaccgccgatgtattgccgtaattattgtgtacatgatgtaaactattttggatgtattgattatccatataaatcaattgttgtatggcatatgttaattacgcacgactattagaggttttaacaagtttaaatcatgtatatgctagttatatgcgataattacaatttttaaaagttttaaatcacgcaggtggcattttcatatgttaattagagtttttaacaattaatttaatatcattcatatgctaattatatatgactattcgaatttttaaaaggtttaaatcatgcatgtggcatttacatatgttaattagagtttttaacaattaatttactatcattcatatgctaattatatatgactatttgaatttttaaaagttttaaatcatgcatgtggcatttacatatgttgattagagtttttaacaattaatttaatgtcattcatatgctaattatatatgactattcgaatttttaaaatttttaaatcatgcatgtggcatttacatatgttaattagagtttttaacaattaatttaatattattcatatgctaattctatatgattatccaaatttttattaattttaaataatgccgtatgtatatacatatgttaattagagtttttaacaatttaatatcattaatatgctaagtatatatgattattagaatttttatttattttaaatcatatatttgcttattacgttttatcaacttaatttattacagacaacaataatttttcgaagtaattgtcattaatttttgtattttaaataattttagtgcattattttctattttagaaacacatatgtaatggaaatttatattcagtgcgcttatcagtagtcccggttcttatccctaaccgggtttaaaaagaatttggaaatagcgggaaaatatctttagtcccggttgatgagaacaactggctcccggttgttctcatcaaacgggaataaagatctaggggaccaacacttagaagtttttgcctgatcaatctctctcggcttctccttcgccgccactgcctagggcatccccgcaccgacaccgccgtcgtttctcgccgtcgtctcgcgctcgttgtcgtcgccgcctccgcctcctcctccgccgccgcatctctggggtgagagccgccgccgcctccctctcagctctctctctccgatctcgatctctctctctccctctcggttgacgccggccgcctcgttgccgacgccgacgccgacgtcgtcacgacacgacaccgcgccacgacaccgcggcggcatgaaacgccgagacgccacgacgccgccgcggcacatcactggcgccgcgccgccacgccgccgcgcaccgccgccgccgcgccgtgtcgtaggctctccggaccttccattataattgagagatgaagtgaataattcaaatcatcaaacaagcataatgaaatatccgacgcctcgagagaggaatattggagatattgctaggcctttagcctgccagtcaacttcagcctgagatgtgcccgtcaaaccactcgaaggcggcaaccagatgtgttacacattcaggagacttgacaaaaatggctaaagttctacaacatctcaaatattcctaactcatactcatgtgaatctagttcccaggatgtgcactagattcacactttcatctcaagcatgattagacatagcaaacacaaataagatgaaagcgattgtaaactacatctactttagttacattggccgactggccaaaaaaaaatatatatatatagaacagcggaagcttgtctacccaatccacaagcacaccgactaggggtttaccccattaagttcaagtcctagaagaagcagtcgatcacccgcatcactcaaaggctaagtctaaatcctgcaagcaaaagttaattcaacagcaagagtcagtacattattagaaataatgtactggctagcaccaagacaagcctaagaccctacttgcaaggcatataatcaaggaaggcataatatggttctttttagcataaagcaagttttatttgcataaaacacattcaaaacggatttgctttcaaataaaatttcagcaagctagtacttagcatatgggcatcaaagtaggcattaatcatgtataaatattcacctcattgccatccatggcagcaaggagatcattctcaaatctcatcacaatttgaaggtaaatttcagcatttaggagaataaacacaagtctatactcaatacatatccacacgccgctcatgaccgcgagcacggctaatcgattagttttaactctgcagagtttgtacactttacccacatgatgcgaaataataatcatgcaagagcatggcacgcgatacataagtacccgatttattacccacaacaaagtttttccaaaattcatgatttagccttacaccagcacgatacgtgttcctccatcctagtcatactagaaatatgacctagaaccgttaagtggcgggcccatgccttgaacttaacgccgtggtggcggacacaacgggaacccacccacgtggcacaataccgttgtattggacagacttagtcacctaaactaccacgtcggggtaaataggaagttcctctgagttatccgaactcatacacaccggcctaccagaatgtaaggctaaaccataaataatttactaagcttgggctatcccatactagcacatgtggttgtactgtatacgaaatgaactgacattgagtgaagtccttaggtcggtttgggcgcactctccccctatcggtatacaactaatcaccatatgtacaccacttgaggcccaaacctaaaatccatgttttccactattttatttatcaaaatcacaagttttaaagttctgtccagattaattaaaaatcaattttcatgtttgaaatgagcccataatgacaaggaagaccattctaagcatggctaagctttatagtaacctagtgtcaccaaaactcatatataaagtggtatagccatattgttcctaaggttaggaatgaggaatatggatatatgtggagttaaggtgataatgcaaataataggagtttatctaacaagtttaacaaaattttaatttattagtgtacaatcgacatgcaagatttgcaaacattttcaataacctccaaaagataggttcaaagtgatcaaagagagggagatgggacttgccttgaatcaggaaaatgtcagcacctaaatcacttcttcaccgattaagcaatcatctatacaaagtacacgttatgcaattaaacaccgaaatatgcgaaaaatccaaaatgttctaaaatgcgtgatttgtgcacagagaataggtactggtataaaatgaatttaggtgaaagaatttctattttatctcattttatttgggagttatgaattttagaagtttcgtcggtatagtgtaggatttacttagttactattgtgaaatgctgttgtaaggtgattcttattaagtttatgtttgctggggtgaatatatttgttttctaagactaacacatttggtttcataatttttagagttaatatgaattatttatgtattttacaagttttaacgtgttctaggcatatattccctatgtgtaaatggctttggagatttaggtccagaacttgctctaacttgctagtgttgtataaaatgtgtattttagttaactaatctaatcttagtttataaaatttagtgttcaaattactttacttcacattttataagctaggggatgttctatgttagaaacttaacatatcaatctggagattattatatgagttaaggatactaagttttggtggaaggggatggatctatgccttcactggttcaacaagttttatttggatttatttggagctaccatgcatatatatactttttcatatgtattgtttaaccactactatgtgtttagttcctattctaccaaattaaggttcagagccatggtctgtaaagagggtgctataattcactctactaagttgaagtatatcacttgctggttctatagaaaatttggttcacttcattttgactatagatgaattttctacaaatgttacaatttaaggtatgctccatgttgcttattccttacttaaatacttaggggttttcgttatactgtaagtatgtctttttattttataacattgaagtgcacaaccctatgattctactgaatttgggtttactcaaaaaggatctaagatgaattttatataaacttctaaagttcagcttatgcaaaactagtcattttaaaggtaatagttttagaggcattcgatgtatagtatgtatactatttcattttgctttataggagaacataagttggtggatctgtagaaactgagtttgctccaaaatgagttgaaatgaattttgtatgcattttataaatttgtgcatgctttatgtgtgatttaacttggataaattttagaggctaaatttgtactgtgagtgcaagtttttattccataacactaaagttcacaatttggtgagttgacagaaatttgtatcatcttaaaatgagctatatttaattttatatggattttacaagttttaggtactttccttttataatttcagatttttgtttccaaggggtccactgtcagtgaaagatcaatatacaaaaagatccctgaggtttctaagaatcaacccgcagacctagcctcatatgtcagtgagttgaaaagttgcacattaatccttatagttgtttaaattctcgaaacaaggtccctgacttcttttctcatgcacagaggcagaacagccatggctgagctcgatctcgagctcaccggcgacaaacgatggctcgtttgggggtgcaaccaaaatacaaaatgaagatcatgttattgcgattccattcctctacttttctcggtcagtggacatcggagtaacgccggcggcgagtccgaaaggaggatgttttcgggtggtgatgcatgtgcttctacaatcatgtattggttaattgggtgcatgcatgtatgttctataggctgaagggtgctcaccgagatgctagacatggctggggtagctaggttgatgacggcggctcgtgtaacggctcggcggcggcaagaacctccgggtgaacggcgatggctcaatcagctccaagaactatcatgcatgtgtgtccatgaggttagagaggccccagggatgctactgatgcatggaattgggttggtactcaccggagggggtggattcggcaacggcgacggtgaccggaggtggagaagacggtggacgatctccacactcgtagcaccatccttcgagattcttgaggggaaatggagaggaggtcgaggcgaagacgctggcgcgacagcttggcccggcttggtccagataagcgggaacggcgatgatgtcactgcggcggtgcacagagcgcgctccagagctccggtgtgcacggcagcgttcccgtcgattggctgcaccagagaggatgaaatcaaaaggagaaatattcggcatggtgaggagagtatggaacgcaagagaagaggaaacgaccgcggctcatcaacgattgcggccatcatcttcttcgcggccggcgatggagaaccagtggagaagagcagcgaggatgctctccctcggatggatcggcactggaatggtgggtgaagagtggcgacgcgtctgggagaggcagaaatggagctcgtcgtttttagggtgtcgacacgtcgtggccacgcgtcgcgcggcgtctagagccggtcggcgctcgatctctccctctcagtgtttctcggtcagctagggaagttgcacagaggaagggcaagccagagggactgacaagggggcccaggtcgaagtaaactaggtggaagagagatgtgtaggcagaaacatgggtgagcttggtttttggacgaatttccggaattattttctcctctaattttgtagcttcaatacttaatgtgttgatcagattagctagtattgattttactggaggtaggtgtatgtacctagtttccattttctttggttgcactcaaaaattatggatagattactcacagaaattagaggaatatgggttctttggaaactagttcgaatttttaggagacctaaacagagaagataaattctgaaaaaattatttttattcatgataaatgacctagtatttgaataaattattttacttatacacttttatgcagttaaatgcacttttagacaaagtatggttttagccgattaagaactacagttaatctagtttttattagtttgactgatttatttgaggtaccaaatttagttattaaattataccaaaattacagtgagttgtatgtgttgagtagagcctacatgaattttcccatgattttatcttgcatgaattattttagataattcgcaggacttatgtcttatatgtgtttctctttcctaaatgcatgtaaatgtttataaaagttatatttggactctcattaacctgaggtgatgttgatatgttagaatcacagtttaccttacacatgtcataagctccttccctatttatgcataagtttactttagtattaaattaagagaatgcttatagagatgattaagatagaatataccctatatgatataatttatttgttcactttcatgttcatgacatgtcttcagatggatgtccaaattagttttgtgaggcttgacattagccatgttgatattttttttaaggtgtatggtttttatgtattattttccattagttaacactaggccctaatggtttagttgtttatctagatcttagttaatattcatgagacctattatgaaatgcaaatcgaaaatccaaatgcataagaaggactcaagtcaaaatatgatttatgcacgtatgcatgctttcacttgggttgcatccaagtcctaggttaaagatgaaaaagtttttaatttgttctcaaattttattcatgcaagagttgaatcaactccacctaggtttaaaatggaaatttttggtttacaaaattgaagaacttccctttcaactagttttgatggaaattccttaatcctaaaattcaggtatgttacacgccgccaccgcgcaacgccgccgccgtgccgcgcgcttcgccgccgccgcgaaacgccgccgccgtgccgcgcgtgtcgccaccgctgtgcaacgccgccaccgggccgcgcgccacgccgccaccgcgccgcgcgccgcacgccaatgctcgtgccgaccgccccgcccctgatccgctgccgccacaccgccgcttcgctgccgccacggcatcaaacgaattaacgtgaacgtgcacgaacgtgaacgaacgtgaactaacgaacgtaaacgtgaaatgcaatataggcaagtgaataaacgtgaacgaacgaacgtaggtgaatgaaacgtggccttaacgagaacgcgaacgtgaacgatcgtgaacgaaacgtgaacgtcaaatgcaatatatgttactttgcgtttatcctaatacatctttttgtatgttgcggaaaagacgttgtcggagtcgtccctcaagccggagtggtagctagccctcgaaggaattcacgcaggcaagtgacgatattatatcgcagaaggttatatttgtaatgcaattaagactattagatttaatatacgacacttagacttagttttaatataagattattatagttttaatacaagattattagatttgtaactagacttagcatataagattgtttagggttctaatatacgacagttagactacgcatatatcactatttgagttttagtataagattattagatttgtaattagacttagcatataagattgtgtagggttctaatttacgacatttacacttagcatatatgactatttgagttttagtataagattatttgagttttaatataagattattagatttgtaattagacttagtatataatttattgactagctagggtcctataatatacgtcacctagacttagcatttatcactatttaagttttagtataagattattagatttgtaattagacttagcatataagattgtgtagggttctaatatacgacagttacacttagcatacatgactatttgagttttagtataagattatttgagttttaatataagattattatatttgtaattagacttagtatataattattgactagctagggtcctataatatacgtcacctagacttagcatatatcactatttgagttttagtataagattatcacttagcatatacgtcacctagacttagcatatgattgttagcatataagattgttaaaacataaatgtctcatgacttagcatctgtttcctgtatgaacagatggctgatcgcgatgatgaacagatattgtacgatacaatcgcggagggaagcagccagtactggaacgaagaaaaggggaacaaggatccaaaccagtatttgaatgaggaagggaacgtggagagggatgcggaggggaaccaggaggggcacgtggaaagggatgtggaggggaaccaggaggaggaggctagtggaagtcaaccctccgctggacagaagagggcacgcgggcaacgaggtgccgcgaagaagcttgagggtcagcacatcataacggaagtggacgaagacggccgacctagtgccccggcagaagccgccaagaactatgtacgtcatagcggttgggttgtgcaggataacgtgcctgtcagtacggtgtactggcgcagaacaagggcatgcggagatcatgagagctttgtcccagattcggagaaagagatgctgtggaccacaatgctcgagacattcacccttcccgcgggtacagaggacaaagtgaaaaggtggactctgaagaaaatggcagaacagtttcagagcttcaagggagatctataccagaaatatatcctgaaggggaagacaccgaacttcgacacattcccaaagctaagggatcactgggacgagttcgttgcatataagacaggtgaacaagggcaggcgatgatggaaagaaacaaagaaaatgccgccaagaagaagtaccatcaccacttggggtcaggcggctatagcgtcgcgatgccgaagtgggaggagatggaggctagcttgcttgagtggggtatcgaaccggccaccgctaattggccggaacgatcgaagttctggtactatgctcacggtggaacgctcaacccagcagatggctccctggtcttcggcgatcagatacgcgaggctgcgcgttgattaacagacgcagtggaaggctcttctcagggcacgttccgaccggacagagagaaggacgagctgtcactcgccctgcagactccagagcatccaggacgaacatgagggaaatgggtgattccttggaatattgggttcaaggaggacatccacacatacaggagtcggatgaggagcaagagagataccgaggcgaagattgcagatcttgagttcagggtatcgagctacgagctcagcatgcaagaggaggtggcaaggaaggttgatgaacgcatggccgcacatcggtccaatgatccccagccgaccattcctcctgcaatggtgagcccgtcaggaaatcgtagcagttgcgcctcaacagggcaggtaggatcacagagcatggacgccatgcaaacccaggacaaaaccacctgccccgttgatgacatcactcagcggacaccatgtgagctgcatatccccttcaagaacttatcaataaaggtaagctcgtagtttatagattttagatttggccattccgcttgttgctgcttatatatgttgattactaataaataacctctcaccacatgaaggtggcgtcgggcatggccatcccaacggacccttcaggtacttccactgcaagccgattccagcaggatactccaaggtcgaagttgagttggtcgaaggcgcgtactaggacttcgagctagattaccctggaggagacggtgaggcgcatctacgagacacaagccacgccattattctatggcgcaagcggtacatcatcctccctgggcgacaagcggcgtctcgtgcaccatctcctccggctcctgcaccgtctcctcctcatgctccagcaccgtctccacctcaggctcctgcaccgactcctcctcaggctcctgcaccaactcctcctcaggctcctacaccgactcctccgcaagctcctcttacggcaccttccaagtcaagggccccccaagctccaccgcctgcccccacaaaggcaacgaagaaggcgaaagttgacgccgccaagaacaaggacccggggtacgattgcacgcaagaggagcttgacgcttacgtggcatcagaagtcaggagacaattcaagcctcgaagtccagaaaagaagattcctatagacccgagtgtcaggaacttcttcaggggtatgtctgcacctgccaaggaggccataaagctatcggactatgagtgaacactcaagaaagcatgttctagaaagtccaaaccagtccctcagcttggagagcaaccaaaccaggagatcgagccgttagtgaccggtcaagattttggaatacaagactttattaatgacaccgggctaactacagatcaattgctaggagacgcaccaatcgaaaaggcggaagtgaaatacatgtacgaacttggtaaaccgcttgtcaagcctgagctgctgcagtccctacccacacaaatgtacaagttccatcaggtgtacatggagatgagcgccaccgatagagagatgatcggagcgaggattagggacacggacttcttgcaaggagatgacattctctggatcaatttcaaggcaatctacgaactataccagctggacgccctcggcgtctctattatgagttgctggattttgtaagtatatcgttcagttagatttcttactacgtctcctttaattaattaggtccttgtatataagtagactatatataatatatactcccttttatcgttgtagaatggagattcaaagagcccgacggcggggggttttcgatactggattcatcgaccctcgaaaagtaaacgtcgcaatgctcgaccaatatccgcaagccacagaggacaatctcgtccatctcctgaaggcgcagctttacaagacgttcatactgttgccgtacaacacagagttagtttaattttaactgtcttcctataccaaatttcattcccgtacgaacatgctaagtgtttcatatgtaatgcatcccacgcacattgcagattccactgggtgcttttactcttcgacctagaggcctgcaccgtcaacgtatatgactcaatggataaaaaagagtctacgtttgacaaggttttcgaacttatagacaggtactgtcataagttcctatgttaattaggaatcttgtaatagttaattgctactgcgaatcatagctttaaactccatgtagggattggtatcggttccgtcatttggtccgcggcaaatggagagaaacacttaggcggaagttcaaatctcctgtgagtacacatgctctacatttatatttctccgattcaaatacataaaagtgttatattaattagatctctcgtcgttcgtcatttatttatagtgcggaaagcaaaagcagggaactaacttgtgcggctactacgtgtgcgagtattgccactgccttgcagaccaaatcatcaccacaagagagctcgatgtacgtacaaataaattcaaaatttcattatgtatcgatttgttgtttaattactaatcaatttcatacattcatatagtttattcgcatgagggataacctgatcacacacaaggaatttatcgcggcggttcaagaacaactcatgggattcatcaacgaacaaatccttgatcccaagggtgaattctactacgacggaaaaacaattcataggtccttagcttctgagatagcgactactactacgtcgaaatcgtagctagctaggacatataaaggattgtaattaatacatgactatgtttctatatgcatgtgtagacattttctataatgtaaatatatattttggtcaaatatatatatatatatatatatatatatatatatatatatatatatatatatatatatatatatatataaaccatgcagcaaatgggccatgcaaaaaaaaaggtcagctcgatctttagtcccggttatttcacccgggactaaagatagcgatctttagtcccagattggtagtcccggtttggaaaccgggactaaagggggttacaaaccgggactacaaacgctttctccaccagtgattgttccttgaaatagataactccttattggttaatgaatatgtgattctttcatgagactctttatgttgtttgttactatttctaaaggatccctgatcaaatatcatatgtggaacaaatatgtttatatgatcagcacatgtattaattgatgatcatgtctcatggatcatggtatagagataccaaattaataatgcggacacatgttggtgatggcgtgtggataccggtagaggcgccgctggtttgaggtgctgatcggcgtgggagtacggcgaggagaacgcacgaggaggagaaggtcgagccagtgcgatttactacttcctctacatcaacgtgcgctacttcgtgagagttccttcgacttctcagtgtcttcttccgctgcacagcgtatcgagtggtaacgatctatgatctaatacttgcatggttcctggtttacgcgatagaaaattttgatttatgctatcgtagcctacgcgtatcccaatagtggtatcaaagccgccatgtatagtttatgatctagatcaatgcatattgttgatgtgcgggtgtagtagatgagatctattatgttgtatatgagttcttaggtgatcggaacatgagatgaaccgatagccgatgggttgatgagatcaatcggtatgtgtgttggtgacttcactggaatgtctagtactcaccaaggccgagcgcgatagtccgatgtccactggaaccgcacgccaatgagaaaaacgagccaatgagattgactcggtttcggcataatttgattacaccgttaaggttttcacatggcgaatcgtagatgagatctatgtaccccgtgaccttttcagggagctgccctgaaacccgcggggggtggctcccccctcgaccccccgcccgctaaccggcgtgtgcgttgccccttagatttcgcttggggtttttatatctatcttactttattgctgttatatatttgatatgacatggtaggatagattacctcagaaaaattaagtgtaatttatgctcttccaataattgcacctattatggttgtgatcatatgtgatgggtttgccatagcaaagtgtcactttttatcatgataaaataggatagatgtcgaacatctatatgcggaaattattggtttacttgacaaggttatcaaaacagttttggaccttggggcataggttgggttggacatggagatgtcaccccaacagcacaagagtcacatatgatgtgattagctaggtgttgcttacctattttgatagttgtctagctgtgatgccaaagctcactagacactaataaaatgaggatcttgactcactatgttagtagagggaattttgtttcacaatacatagtgggagtatcttttgttaaattgtttaattaaaggttaaatgtaaacatggtgctgattttgcatacatatatttctattgtagatcatggcagctcctgcaccatccagttttaacttgcggtctattcttgagatagagaagttgactggaacaaacttcatggactggtatcgcaacctgagaatttttctcaggcaagagcacaaagagtttgtgcttatagagccttttccagctaacttgcccaacaatgctcctgctgctcaacgtagggagcatgaaaagcgatgcaatgattatcttgatataagctgtctcatgcttgctactatgtcccctgagcttcaaaggcaatatgaggcattggatgctcatacgataatcacgggactacgtaacatgtttgaggaccaagcaagagctgagaggtttaatacctcaaagtccttgtttgcgtgcaggcttgcagaaggtaatccagtgagcccacatgtgatcaaaatgattggttacaccgagagtctggataagcttggctttcctcttagccgagagttggctactgatttgattctccagtcgctctctcctagctttgagccgttcataatgaatttcaacatgaacaacctgaacaggaccttggcagaattgcatgggatgctaaagactgccgaggaaagcattaagaaaaactccaaccatgtgatggttatgcataagcacaagcccaacaacaagaagagtgatcaaaagagaaagctaaactctgatgagatcacgagtactagcaactctaagaccaaggttcaaaagacagggcccgctaaggatgcagagtgcttcttttgcaaggagacaggtcattggaagagaaactgtaagaaatatctagagcagctcaagcagaagcagcaggatggaaagagttccacctcaggtattaatgttatagaaattaatcttgctacttcctctactgattcttgggtatttgatactgggtcagttgctcacatatgcaaatcgttgcaggggctgaaaagaagtaggagcttagcaagaggcgaagtggacattcgcgtgggcaatggagcaagagttgctgctgttgcagtcggcactatgccattatctttatcgtcaggataagttttggagttaaataattgttattgcattacagctttgtgtaagaacgttatctctgcttcttgtttgcaagcagagggttatggttttagatctatggagaatggttgttcagtctattataatgacattttctattttcatgcacccatgatgaatggcttatacattgtgaatcttgatggatgttcagtctataacattaatgcaaaaaggcaacgtcctaatggtttgaatcccacttttatttagcattgtcgcttgggtcatataaatgagaaacacatggagaagcttcatagagatggacttctacactcgtttgattttgaatcatttgagacatgtgaatcttgtttacttggcaaaatgacaaagtcacctttcacgggtcaaagtgaaagggcaagtgaactattgggactagtacatactgatgtatgtggaccaatgagttcaactgccagaggtggttttgggtactttattacctttaccgatgactttagtagatatggttatgtctacttaatgaggcataagtctgagtcatttgaaaagtttaaggaatttcagaatgaggtacaaaatcatttgggcaagacaatcaagtatctacgatctgatcgtggtgtagagtacttgagccttgaatttggcaatcatctaaaggagtgtggaattgttccacaactcaatccgccaggaacgcctcagtggaatgcggtgtctgaacggaggaatcgtacattgttggacatggtgcgatcaatgatgagccaaactgatctatcgctaagcttttggggttacgctctagagacagctgcgttcacactaaacagggttccatcaaaatcagtggataagacaccatatgagatatggactgggaagcgtcccagtttgtctttcctaaagatttggggctgtgaggtctatgtaaaacgtttgcaatcggacaaactcacacctaaatcagataaatgcttctttgtggggtaccctaagaaaacgaaaggatattatttttataatcggaaagagggcaaagtgtttgtcactcgacacggtgttttcttggaaaagagtttatttcaagaaaggatagtgggagcatggtgcgacttgaagaaattcaggaaacaccggaaaacgcttcaacgtccacacaaccacaagctgagcaagatgttgttcaacaggttgaacaagttgttgttgaaccagttgtggaagcaccggcttcacgaaggtccgataggatacgacgtacacctgcgaggtatacgttgttaactacaggacaacgtgatatattgttgttagagaatgatgaacctactacctatgaggaagcattggtgggaccagactctgagaaatggcttggagccatgaaatccgaaatataatctatgcatgtcaatcaagtttggaacttggttgatccacctgatggtgtaaaagccattgagtgcaaatggatctttaagaaaaagacagatgtagatggaaatgttcacatctacaaggcacgattggtggtgaaaggtttcagacaaattcaaggtgttgattatgatgaaactttctcaccagttgccatgctaaaatctattcggattgtttaacgattgctgcctatttcaattatgagatatggcaaatggatgtcaaaacagctatcctcaatggaaatctcgatgaggatgtgtacatgacagaacccaagggatttgttgatccacaattagctaaaaagatatgcaaattgcagaaatccatttatgggttgaagcaagcatctcggagttggaatattcgttttgacgaagtagtcaaggcgttgggctttgtcaaaaacgaagaggagccttgtgtatacaagaagattagtgggagcgcactggtgtttctaatcctatatgtagatgacatattattgattgggaacgatattcctatgcttgaatccgttaagacatcgttgaaaaatagtttttcaatgaaggacttaggggaagcagcatatattctgggcataaggatctatagagatagatcaaagaggctaattggattaagccagagtacatacattgacaaggtgttgaagaggttcaatatgcaagattccaagaaaggtttcttaccgatgtcacatggcattaatcttggcaagaaccacgatgtcacatggcattaatcttggcaagaaccagtgtcctcaaacgattgatgagcgaaacaagatgagtgtgattccatatgcctcggcaatcggatccatcatgtatgctatgctatgtacacgtccagatgtttcatatgcacttagtgcaacaagccgataccaatcagatccaggtgagagtcactggatagctgtaaagaatatcctgaagtacttgagaagaactaaggatatgttcctagtctatggaggacaggaagagctcgttgtaaatggttacattgaagcaagcttccaaactgacaaagatgattttagatcgcaatctggatttctgttctgcctgaatggaggcgctgtgagttggaagagttccaagcaagatacagtggctgattctacaacagaagccgaatatattgccgcttttaaagcagcaaaggaggctgtttggataaaaaaattcgtttctcaactaggtgtgatgactagtgcttctagccctatggacctctattgcgataatagtggtgccattgcacaagcccaggagcctagatcgcatcaaaagtccaaacacattttacggcggtatcaccacattcgcgagatagtgggtagaggagatgtgaagatatgcaaaatacatatggatttgaatgttgcagatccgttgacaaagccactccctcagcctaagcatgaggcacacactagggcaatgggtataagatacatttatgattaactctagtgcaattggtagactgttagtgatatgcccaagaggcaatcatagagatgattgtatcacatactatgtttacatatttatccgacattgttccttgaaatagataactccttataggttaatgaatatgtgattctttcatgagactctttatgttgtttgttactatttctaaaggatccctgatcaaatatcatatgtggaacaaatatgtttatatgatcagcacatgtattaattgatgatcatgtctcatggatcatggtatagagataccaaattaataatgtggacacatgttggtgaacatgtcgttggatagacccaacatgagacactgcaagagccatatgtgttgtgtcatcagttatctcatttagtgttggtgttgaatccttagacctgagattatcatggttctcaacatatgtagtagcttacttagggactgctaaacgctactccgtaaatgtgtagctataaaaatagttttcgggtatgctatgaaacatgtagtgcgatatgaataatcaagatgggatttgcccctcctatggagagatatctcttggcccctcaatgttgtagattatggaagtgcatggccatgccaaaggtgattgaggagtcaatcacaagttatataatctatcaacaggttcgagtgaatgattgagctattagaggatggcacatatctagccttgagcttaatcgatattgtgaggcaatttggttcatacaagtatacactagacgttcagccgatatgatctttatgtatgcccggtgggtcaatacgttctgctaggggccgctgttgacgcgtggaccgaaaaggagttttcgggttacagccaagtatatatgaacctacagggtcgcacgcttaatgggccggaataaggggattggatggagatccaatatgagcttacttcggataagggatccgaataggaatcctacaggccttggaggcccgagtgatggatcctatatattcgtgaggggtgtgaccggcggaggcattgcatcatgtgagaaaccctagccgtcacttccctccccgagcaaaaccctagccgcgcgcgggtgctagcacatctacgtgtggcgtttcgtccctgtacgtgttgataccggtagaggcgccgctggtttgcagtgctgatcggcgtgggagtacggcgaggagaacgcatgaggaggagaaggtcgagccggtgcgatcgactacttcctctacatcgacgcgcgctacttcgcgagagttccttcgacttctcagcgccttcttccgctgcacagcgcatcgagtggtaacgatcaatgatctaatacttgcatggttcctgatttacgcgatagaaaattttgatttatgctatcatagcctacgcgtatcccaacatatatatccccttattcatgaatttcccttccactatgaagtattttgtgtagcgtagtatatgctttagaatgttagttggactgctcttatttttatttatctctgtgttagaatgatgggccggtctcagttatcttaatatttatcaataaattggataggccaaagagcttgttgtaaaattgatctctaaaatttaaaaccttgtaaacgatacacatggttgaatgtactatttggcactttggaatttaaatttctactcttgcattcaaaacaatatccttatcagaattttcatggaaatcctagagctgataaattcttagatatatggtaaattttcaagcaaaccatagtactccacacattgataataacaacgtaggcaaattttactacagtagaccatcatttcatggttttagctcctggatatggtagaagtcaatctttaagagaaaaaaaacttttgaaatatggttatttgctgctggacaacatgctcattacaatatttattttcagtttaatagaaaagagaaacagtatgcaaacacaacattcccttggccccaattgtcatattctccgattggtatcgacggaagcaaatctacgcgtggatacatcggagttggcgatggagtcggtgaccagctagacagacaggaacaacttcaatcggtgtagcgccttccaccatgtgctcgctaaccatcttctccctctcgatcaccataatggctttggcctcacccacgcacgccgaccatggacaacctcgcctcatgcatgatgacgctttgttgtccctctgttccttccactgtggtctcccagggcaggagtattgagtaggcaggaagataaacggtatgacaagtagggtcaagactatttttttgactttttatactatttatctcttctatttagccagaaataaaaagttttatttatacagtgtacaacagtaaacaaccatattttttaagttttttcttcttaaaatttaactatagatatattcacaaactaaaaccgcgaggtaacaatgtccttgggcaaaattttccaaccatccctgttaaatttcttagtacggtatagcgaagcctgatgctgattgtaaatcaatcctttctcaaatctcaagccggcaggtttgccaattgatgattggtccacgtgtcattattcacttggcagataaatcagcatctaagagtaaaaaaaaatactgagacgagcagctggcgtactgtaaggaaatgaaaaataacagggttaccgcatgcagtgttctgctgctgtgttgcagctccgcatgcagacaacagaaaaatcaggatcaatcgagcggaaggagcccacatggctcacccttacattggttaaattactcatcatatagagagcgcgccattttcaaccttaccaaattttgataaggttgctaaaaaaagtaactacatttagtttgctgtcaaattttagtaactatataagaaatcctgccaaaattttggcaagtggcatagttggtaagctttttttttgcaacaaaggacttgttcactttgatgccatttttaaccttaccaaattttgttaagttgctaaaagtggctatatttagtttgctaccaaattttggtaactatataagaaatcctgctaaaattttggcaagttactaaaattttggcaactataccaaaatggtaaggttttttttggcatcaaagtaaacggtccagagttttggtttcaatgagcgtaataattgtaccctgcatttgcaataaaattgttgaaacaataatgcatctcatatatatttacacacttatctatactaatataaaaaacactagttcatcaaacacctctctttctaccgttagatctatttatccaaaggcttatatggaaagttaaatcaacctttaattagcgatcccacgtcgtgataagcagcagttgtagcgatcggtcaaaacgaaaaaataatttgtgttgccggccctagcccgtcggcgccgacgcctcctcctcgacgtcccctccattgctggcggcggagatgcagaaggtggtgagcctgacgagagggggagggggggagtgtcgtcgtcgcgggcggcgtcgatgtggtggagcacggacaacggggtgctcttgcggtcgagggcgtcgtcgaggggggaggaggacgacgacgacgaggaggcgctgcggtggacggcgctcgagaagttgcccacgtacgaccgggtgcgccgcgccgtcctgccggtggtggacgagggcggcggcggcggagggggatgggaggcggggaagaaggtggtggacgtgctcagcctcgacccgtaggagcggcgggcgctgctcgagcggctcgtgcgcgtcgccgaggacgacaacgagcgcttccttctcaagctcaaggagcgcatcgaccggtgcgtacagtacttgcacatttcgtcacgatgtcgccgtggcggtggtcgaggttgcgggttgcctgcagggtgtttgatgaattgcgcgtggtaatttgatgtgcagggtggggattgatattccgacgatcgaggtgcggttcgagcacctggaggcggaggtcgcgtcggcaacagcggcctccccaccgtcctcaactccataaccaacaacctcgaggagccgagaatgcgctggggattctacccaacaagaagcagaccatgcccatcctccacgtcgtcagtggcagcgtcaagcaccgcaggtgaaagaaagaaacataagcatcacattttcataatcgcttctgctttacataacgttacgtttgtgctgctctcatggtttatttgggaaattttgaaagattgtaaggtatttgcttgaacatatttttgtatgggatgccggttccaccggaaacgaaatgctttttccattagacatgtccctgcaaactgtaaagtttatttgtcttttgttggagcctagattaaccaagaacatttggaattcaatttctatgcttctcctataaaacacgcacctttgattatgcaggatgactctactgttaggaccgcccaggtctggcaagaccaccttgctacttgctttggctggaaggctcggcaaagacatcaaggtttcaaacaaattttctttacatattttgcaataactgcgatataacgatgcgtttgggcgtttggcaaaccagtccgtattcccacagatgtgtgcacttcatcttgaatatagtatatggttagccaaaatacagagaacatacttttgtatgtatatttgtgtattgcttgaaaatattcctaggagcaatagcgattgttgcgtgctttgccaatcagttaggtacatggacctatgttgaatgggagacgtagataatcttggcatcaaaacataatcttgaacttaccttttcagttacccattatagaatattaaaattgctaatatatactgttaataagtgaacatcaaatattccaatatattactattaaatcattcgggagcacagtgcttaggttgcttccgaattttctatattagtacacaggtcctcattctgaagcatttttcaggcaaaaaccaactgtacaggtttcacaattgaagagagaatctcatttgaaacaaaccttttttgtcaaaggctttgtggatacttgcataaaacagcacccaaatgatgctgcttttcttgaagaaacaacaattgttgagcattatgtgagattgttttgttctgttctgaactgtaaaccgcatctaattgtgtgtccctggcgcacttttgttttgttcatgtatgtatttgtatgtggtgtggatgcctatgcgctgaataggatcccccgtgttggtgcagatgtttgaactttgtggtggttcttacagacctgagtagcttggatccacttgtgatgtagtctatggcttttcataacattgtttgcactgacactatgacactatgcaactacttactgcagttgctttgtatatatatctcgacgaagtatgaaacgcaatatataccgacatggatgtatatcatattaacatttacattgttaaggttttttaccacggaaatacattcattgattatttaacatgatttcatcctatgtgattttttctcgttgcaacgcatgggcacctaactagttcctgtaaaaatacatgagcatctccaagaactgaacaatatattttaaaattgattaaataatcacactcaccagcaacacatatttcacctaccactagaaaaaaaataaataaatcgcaaatacaagcacacgtaccaaatttatgatttaaatctaggtggttaagttttaccacaagaaacaccatctaacacatatgtagcctatcgctggaaaatactaaactataaatacaaacgcactaaataagtcttgacttaaaactggttgcttgggttccacaacgaggaacataaacaactaagtattgttatgaatgatgaacattggaactcctcacaaaacaaaaatgtgaacactttattttttctaaaaaaaatatcaagacctaattttcattagtagataatttaattataattttagacaaatcaaggaaccatggaatagcatgggcgaaaaaatagataatttaagaattttctgaacaataagctctagtatattaaatagtaactcgaaatctcattcaacaatttatttcaatgtatgttttttcataagtttccagaaaatgaaattgattcctatggatttttgtgattgcactactcaataataggtacgggccataaagcgagcgcgccaattgacccgctgaatttctagtatttcctaagcctatcagcaggctatcagcctgcaaataacttttgcatcctgacggaggccgctatctcttgcacacaaagatgccaagtcatgtaatgtaccacgtagcgcttagcattttttaaaaaggaaaacaaaaggtagcctaagcctaatgcttaagtgtgctcagtagacgtaacccttttatgataaaataaaaaaataaataacagacttaaaagttttgcattttgatttgaattttttaatttaagttgaaagttttgagttttgagatgaacgttttgaaactttcaactcaattttgacaacttttaacataaacttcaaaactttcaacacaattagaatcttttaattcacttttgagaattttcaactcaaatttcaaaacattcaagccaatttatgaatctttcaattcaattttgaaaactcaaatttccaaaacattcaaataaaattttaaaatttcagccctatttttgaagcttccagttcaattttgaaaactttctggttaaattttaaatttttaactcaactgtgaactttcaacttaattttcaaattttaagttgaaaatttaaaaaaattgaattgaaagttttaaatttggagttgaaagttctaaaatttgggttgaaaatttaaaattttggatgatttttttttaattttgagttgggaagttttaaatttttttacgatggtgaaggcgtacaacgcgtcatacgcgtgccacgattgtatgtgtgatatggtgatgctcacgtctgctcccatgtgggccgacagtgtgccccttacgtggcaatgggtcggcgtgggactacgtatcggcgtatccatgtggcaaggaattctggagcctagcactgtttggtccatcacccacctaaagtgacatagcctacctccaagcacagtgcaataacaatacctaagactagagataggcccacattgcttgtctttttacaattccctccatcctagaaagcatgcactttcattgttcaaaatatatcccacaaaagttatcattttaaatcttgttaacaacccttcgctcctattcaaacaacaaccatatatgtttcaacactccagtattttggtggaacaaagaaggaaaaggggatacaagttgctagcaaacaggtgggacgagaaggaggaagagaaggagaatgagaagggttgccaccggcatccaagtcatcgccgccaccgccgcgagcctcagctcgccaattgatcaaacctccctttttcgatgctactcctgctgcttatatagtgctctccctttgcttgcttgggcatggctttgagagtggtgacagcccattggcagcacaattgggttcctaacaatctcctcttcttaaaattcgacttgtttgcaagacgatggcaagtaaaattctgaaagtgccaaccgcctaggtcccatggcacttgtagctcttggcagatcaaaatgctcaagtcatccttatcattattgctcttccttataaagaaaattttcctctgcaacttagtatctttgcttcctccatagtgctcatatttccacaagcttaactaatttgcctctaactttcagctttccagacataattgcctaattggtgtagcaacaggacatagcaaacaattggtaacatttgatttgtaattttgtagaattgcttgtcaatttccaagaatgatttgatggttggaatgaaaacattcttccatgctgaaattatattcttgattgcacttggcttgatcccttgcattctccacttcttttagtataatttgaattccatccttgcagccccaagtatcttgaaaaatgttgatatccaagctgttcccaacactaacaggcctttgctcaatagtctcaaagtattgtgccatcatataggagatgaatggatgtttagctgactgcaacaagtcatttttcttatcatcacttggatcttgagttattaacaccaacaagacaatctctaattcatgcatcaccacatatgatttgcttgcccgccttcagctcaaacaatttaaattgaaacagagagcgataacaatgaccaagctccatgcaggttctttatggttggcatcataatccattcactaatgtactgcatatgaccccaacaaattaacatcttcatctttgtctcagtggaacacaccctccctaatcgaagttgttgccttatcttgtaaattgagaaccccagcagtacataaaatccaaagtgcctaatagggggaaacgtgcactacaagtacctcattgatgtgtgtgagggtgtcccgatctttcaatgagagggataagtcaattgggggagcgacgttggcgatccgactacaactatccagggatgttgcgccttagcaatcgttacaccaactccagaggcggtcgtgaatctcgacagatgcacgatcagcccaaccacgagggtatttgttcctgcaagcaatcgagaaccagcaagaacaagatgaacaagcaactcaatttgcgaatcaaagatattagattgaatcaacagaagtaacaagtagggttcagtaacaagcaatccggcgaagtagcgatgttatactttgatctaaacaaaacccgagtgttcttggcggcggccataggtataagaagaggggacgaacgaccacagggtcgtgctccaaccctaggacgtgcccctaataggcccaacttgatacacagcccattgggctaaaagaggtgacgcagcaccacggacagaaaacaatcgggagtaaaatacaattgcggccgctccagaatagatatggacatgtggttggatccatttgaaagtagatttgataagctttccataaagtacttgcatgcccaaatcgaagttcgcatgaagtcgtggcggccgtcagaagttggcgttgtcctacagtccgaatccaccccgcgcgaatcctctccccttcggatcctctccatcgttcctgagtaaaataagagtgcacgcatctccggggtataaagaagagaaacatgaactcaagaaagaactcacctaatagttgagttgacgtgcacgtgtgcggataataggaccatgaagttatacttgtggggtgtggatgtatcgatggtgttgatgtcctcatcactcatgggccaatatccaatattagcattttgcattcaacacaaagaatcttttcctggtagcaagctcatgcattctagaaattccaaagatggtgcaggtcacgtaactaaccaaatcctgttgttccttccaaacaaatagagtaatagccactctaatttcccaggacttgcattgctcaagtcgaatcggtggtggccatggtgacatcaaacctacacttgtccaaaaagaatcgagtacataccatggaatgtgccatacctcccctctctaaccacacaacctaaccagggaggtggccaagggtttctcttgggatgccccaccagcaacttgttgttacctttgaggcatttcatcaaacactcactgggcatcaacttgataaggtccatttcagcaatcaaccatagcgaggagacttcggatgatgcatcaggtactagaacacccttagaaacacccatcatggtctggcacgtaaccctggcgtggtctgcaccaccctttgacatcaaggccaaccgtcaaacagttggtgagcatcgccttggtactatcaaggatgttgatgttggtgccgccaatggtgccatcagtagataacaactccattgatgacacggtagaggtgacacaagtaaccacgatagccacagtgtgatcggacttggcatcgtagctggaacatatcatcgaagagttggtgggcgtgaccttggggaggtccatggtgacaaatgtaggtagcttggtgcttgtcctctctgtcttctagctctcaggcagctgttggagcaagtacctcaccaatgtgacttgaatttgccactacccaagtgatgttgttgttgaagcattcctgtcataggctctccagacctcccattatatttgagagatgaagtgaatgattcaagtcatcaaacaaacataatgaaacatccgacgcttcgagagaagaatattggagacattgctgggcctttagcctgccagtcaacttcagcctgagatgcctgtcaaaccactcgaaggcggcgaccagatgtgttacacatgcaggagacttgacaaaaatggctaaagatctacaacatctcaaatattcttaactcatactcatgtgaatctagttcccaggatatgcactagattcacactttcatcctaagcatgaaaatacatagcaaaatacacttaagacggaaatgatctaaatcacaactacttcatagttacataggccgaccggccaaataaatataagagaacagcggaagcttgactatccaatcctcaagcacaccgactaggggtttaccccatcaagttcaagtcttggaagaagcagtcgattacccgcatcactcaaacactaaatctaaaacctgcaagcaaaaggttaattcaacagcaagagtcagtacattattagaaataatgtactgacaagcaccaagacaagcctaacaccctacttgcaaggcatataatcaagaaaggcataatatggttctttttagcataaagcaagttttatttgcataaaacacattcaaatcagatttgatttcaaataaatttcagcaagctagtacttagcatatgggcatcaaagtaggcatttatcatgtataattattcacctaattgccatccatggcagcaaggagatcattctcaaatctcaacataatttgaaggtaaattcagcatttagaagaataaacacaagtctatactcaacacatatccacatgccgatcataaacgcgagcacggctaatcgattagtttttagactctacagagtttgtacagctttacccacatgatgtgaatcgctctagttcgtccggtacccgtcagtaccaccatactctacacattgagtacggtctagaggtcacaatgaggcttttacattaagtattgtctaaccttgcatgagcacgatacgtgttcctccatcctagaccatacttgatatatgatctagaaccgttaagtggcgggcccatgccttaaacttaacgccgtggtgacggatacaacgggaacccaccacgtggcacaatatcgttgtattggatagacttagacgcccatgccgtgaggcggaacagtacactcgtcccctcacggaaatcacacatgtatggaatttatcatcctacgatcacacgcttaggaacagtacactcgtcctaagattcaacacacacatgggtagttcctttaggtagcccacagtacactgatggcctctacctatactagaacggcctcccgaacgcaaggtcagacaagtgcttaacttaataggccaaggttccccataaaaacacatgtggatgtacggtaaatataatgaacagacattgagtgaaatccttagatcggtttaggcacactctccccctatcggtacacaactaattaccatatgtgcaccacttgaggcccaaacctaaaatccatgttttccatcattttatttgtcaaatacttcatttattcatccctgtccagaatcttaataaaatcatttttcatgttaatatgagcccaagtgataagtaaaaccattctaagcatggctaagcagtatagtcaactagtgacaatgtaactcatattccaagtagtattaggatatgattcctaaggttaggaatgaggatatggatatatgtggggttaaggagataatgaaaataataggagtttgtctaacaagtttaacaaaattttaatttattagtatacaattgacatgcaagatttgcaaacatttttaataaccaccaaaacataggttcaaagtgatcaaagagagggaggtgggacttgccttgcaactggaaaatgttagcacctaaatcacttcttcatcggttaagcaatcatctatacaaagtacacgttatgcaattaaatactgaaatatgcgaaaaatccaaaatgctctaaaatgcatgatttgtgaacagtggactggtattggtctaaaaagaatttaggtgaaataatttttattttatcactttttatttgggagttatgaattttagaagtttactcgatatagggtagtatttacctaggtagtgttataaaatatttttacaaagtgattcttattaactttgactccacagagatgtagggatgtgttttctaagactaacacatttggtttcacatttttttggagttacaatgattttcttatgaattttacaagttataacgtgttgtaggcatatagtgtcttgagagttttatgtccttgattgagttgagtaaaaggaataatttggttaactaatccaatttttagttcataagcttatggtcttattatcatggttcatatttttatagactaggggagctctagtctatgctagcagtatattatattaacctagaaattactatatgagctatgttcttctaagttttggtggatggggatggaactatggctccactggtcctaataaattttatttggatttatttggagcatatgtattgtataaccactattatgtgtttagtacctatactaccaaattaaggtttagagctatgatctgaacagagggtgccatatttcactctaataggttgaagtatattactttctagttttatagaatcttggttcactccatttggactaaatatgaattttctacaaattttacaaattgaaggctgcttaatgttggttattccttacttaaatatttagaggcttttattatacgataagtataaaattttattttataacttggaagtatatgttttggtgattctacagaatttgggtttactcaaaaaggatctaagatgaattttatacaaacctctaaagttcagcttatctaaaactagtaattttaaaggtaatagttttagaggcatttgatgtaaagtgtgtatatgttttatttcactttgtttttagagaacatgttggtggatctgtagaaactaagtttgctctaaaatgagttgaaatgaattctgtatgcattttatgagtttgtataaagcatgatttatcttagatgaattatagaggctaaatttgtactgtgagtgcaagtttttatttcataactttaaattttataatttggtgatcacagaaatttgaatcatctcaaaataagctatatttgattttatatggattttacaagttctaggtatctctcttgtatattctcagattttatctccagggggtccactgtcagtctcttaccgtcttgcaaagaagtccctatactttatgtgaacttcacttaggtccatgggtctacatgtcattggtttgtatgttttcatatttaaccctatgattgttcaaattttcaaaaaagtccctgccttcctctccagtcgggcagagacagggcaggccatggccgagctcgatctcaagcttgccagcggcaaacggtggctcgtttgtgggtgcgacctaaagacaaaatgaaggtcatgttattgcgattctattcctctactttcctcggttagtggacatcggagtaacgccggcggcgagtccgagcggaaaacgttttcgggtggtggtgcatgtcgtgctatagacttgatctacccaaagagatgcatgcatgtatgttttataggctgcaggattctcaccgagatgctagacaaggttggcgaagcttggtcgtccgtaatagctcgcgaacaggtccggcggcggcaaactccttcgggttgacggcgacagctcaaactactccaagatctagcgtgcatgtgtgtccatgaggttattgaggtcccagggatagtgtatacgcgaataatcggacaatggctcaccggagaagatggattcggcaaatggcgacggtgaccggtgttgaggaggacgacggccgatctccttcctcgatgcgccattcttcaggatttttgaggggaaatggagaggacgacgacgcgaagctggtggcgtggtggctcgctccggcttggtctaaatcgacggcaacggcgacgatgtcgctgcggcggcgcccggtgcacgcactggaacacccgtgggcacggcgacgtttccgtcaaagggtaaagtggtaggcatgaagtgaggaatacggaacgagaaagagttggtgatgacaatgtctcgacgacgggttgcggcgtccttcttcttggcggccggcaacgaagagatggaagaggagagctggagctctccctctcggtttcttcggcttagaggtggaaaatgatgtgtggaaatgcagctgggaggaggtgaagcctcggctcggtgctgccacgtcgacgccgtccagagtgcgctcggcttcggcttctctttctccctctcgttctctctggtcggttgggggtgttgcatagggttggagctagtcaagacactgtcaactgggcccagaacgaagtacactaggctggagtgtgggggatgggtagaaaactgtgtgaaagagatttttggacgaattttcagattattttctcttccctaacttgttaattcatagattaatttgtgttgcatatgagttcatgtggattttattggaggtagatgaatgtacctagtttccattttctttgattgtactcatagtttagattactcacaaaaattaggagaagatgggctctttagaaactagtttgaatttctagaagacctaaacagtgaggataaatcctggaaaaattatatttattcatgataaattacctagtatttgaataaattatttcactcatacacttttatacagtctaatgcatattttggtgagggtaggttttagccgattagaaattataattagtgtactatttgactggtttgactgatttattcgaggtatcaaaatttagttattaaattgcaccaaaaatatagtgagttgtatgtgttgagtagagcctacttgaatttttcccatgattttatcttgcacaagttattttagataattagcaagactaatctcttaaatgtgtttccctttcctaaatgcatgtaaatgtttataaaagttatattcggactcttcttaacctgaggtgatgttgatatgttagaattacagtttaccttacacatgtcataagcttcttatctatttatgtataagtttactttagtattaaattaagagaatgcttatagagacgattaagatagaatttaccctatatgagttaatttatttgttcactttcatgttcatgacttgtcttcagatgagtggaaaaattagttttgtgaggcttgacattggccttgttgatatattttaaggtgtattatggttcctatgtattttttttccattagttagcactaggttctaatggtttagttgtttgtctagattttagttattattcatgagacctattatgaaatgcaaatcgaaaatccaaatgcacatgaaggactcaagtcaaaacacgtcatatgcaagtatacatgcttacacttgtgtttgcatttttttcctaggttataaataaaaaagttttaatttgccctcaaattttatttagttgcatgagttagatcaacttcccctaggtttaaaatggaaatttttggttcacaaaattgaagaactttcctttcaactagttttgattgaaattccttaatcctagaattcgggtatgttacaattccgtcaaacacttgggggacactggaggagacgaggtcgggggtgttgaaaatgatgcagaattgaagtcagcggtggtcgccttgatggaggcactcatctccttgaagaacttgttcctattagcttatatctcgtccaacttctccaaaattcaatcaatcttctcttcacacgtacgcttggcctccatttgttcaaacttcttcaatatcagatctagagctttgtctagctatttccctctttgttcatgatggaattgatggggacgagttcagatatcctctaatcttccttggacatgtcaggctgactaggcattccatcgaataggttgtgggcgtaagtgtcatgggcaccacccttgcccaaatccaacaaccacttgcatggggtgttgctgcaatactcccccatcgactccatgctagaaatcccacgaaccaacagctctgataccaaattgttaacaacccttcgctccgattcaaacagcaaccatatatgtttcaacactttagtagttttggtgaaacaaagaaggagaaggggatatagattgctaacaaacaggtgggacgaggaggaggaagagaagaagatcgacgagggttgccaccgaccacccaagtcatcgccgccgtcgtcatgagcctcagctcgccaattgatcaaacctcccttttctggtgttgctcctgctgtttatatagtgctctccctttgcttgcttgggcctggctttaagagtggctgacagcccataggcagcccaattgggttcctaacaaatcttcaccaagaaattggggaccttctaggagttttcagtaggacttgttctagcattcattaatcaattaaatgtaagaaattcactaattaattaatcacgatttttgtttacatcaacaattgcataactaacttaaatgaacattacatatccgaataagcaacttgtactatatataaaatatccacaattccacgccacgttgaccatctcaatcaggacagagtatatacgtcaattgtacaagtttacaagacaactaggagatgcaaagcacgcaagacaggaggcagcttctggaaaggaaaacatccacgtgggtcggatatcatattgttaataacccttcgcttcgattcaaacaacaaccatatatgtttcaacactccagtattttggtgaaacaaaaaggaaaaaggggagacaagtcactagcaaataggtgggacgagaataggggtggacaagaaagctcgaaactcgtggctcggatcggctcgtagcaagctcagctcggatccattcgaaatcgtagtcttaatgagtcgagtcgagctagccttttagctcgtgagcttaacgaggtagctcgcgagctgctcgtttagctcgttagtataaaatatcaccatatcttaatgaacttagtgtttctttactagtgcttagtcttttagttacatcaaatctattcatatttagtgagtattatattagttagtgtttattattacgttaatacataataaaatgttaaatttgaaattattaatatgatattaatgagatatagctcattaacaagcctaacgagcttacgagccagctcgtgaaccgagccgagctagccttttagctcgctaacattaacgagcccggctcgttaacacaactaactcaactgagccaagccttaacaaaccgagttggctcgttaacacaatgagctcaaatgagccaagccacccctagacgagaaggagaaagagaagaagatcgacaagggttgctaccggtcacctaggtcgccgccaccgcctccgtgagcctcagcacgccaattgatcaaacatcccttttctggtgctgctcctgctgcttaatagtgctctccctttgcttgcttgggcctggctttgagagtagctgacagcccacaggccgttcaattgggttcctaacaaatcttcactaggaaagtggggggcacctaggagtttacagtaggacatgttctagcaatcattaatcaattacatgtaataaatgggaccacatatacatttgttgataaattttctcctaaaaatttaacagatgtaattatagtacaattatagtgtaattacactgtaacttgcatgtaactacagtgtaacttgtatgtaagtttcacgtaattttgaatcgttaaatctattactccctctattttataatataagtcattttagcattttccacatttatatttatattaatgaatctagacagagtttatacgtcaattgtacaactttacaagacaactaggagatgcaaagcacgcaagacaggaggcagctgctggaaaggaaaacatccacgtgggtcggtcttattaagccacgtgtaccgggaaaccgatcccgtgccgcgtcgacgggaacgtcgcgaacagcatggttccgacgagccctccggcgagcggcacgtcggtgagcacctgcctcgtgtcgtaggacatcaccgggtagaagcaggcgccgacgttgtgatcgaacatggcgacggacaggaagacgatcagggacagcacggcgtggaagaagtcgatgaacctgaggcggtaggtcgcggccacgtccggcggcggcggcgcggtgccgtcgatgacccacaggccggcgcgcgtggccaccacgtaccgcaccgtccctttcccgtcgtggaagctgtccgtgaagcagaggaagaagcacgccgcggcgcagagccccaccagccacgccgtcatgacgcggttaacgtcctggcacttgccgccgttggtgaacaccggggacagcacctcgaagacgagcaccgcgcccgtgggcaggtgcttggcgagctccgccgtgctccggaacgcccgcgtgatggtccgctccagccgcgttgtctcgtcgtcagagccgccatcgccgtcgccgcccgccagcagcagcagaggctccgtctctggctgcacgttgtggcggttggttatgccaactgaaacgggtacagccgagctagaagctggcggcgcggtggcagctgctgccgatgaaacgctggccgccggagatgacgtcgccggcttctgggactcgagatcaatttgcttgtttgatgccatggcagatcaattcgatcttgattgatggaagaatatgtgcctaattaaatggtaagggtggatttatggaaggctcactttgtggagtgcacgtacgaattgtttaaagcacaagtaagatgaagccggcaagaaagcttaattgtttaagacttatcactggcacaagataggtcatcagtaagcctcatagcctcatctgtatcgggatagcgtaccggcacgaataccaaaagtcactgttacgaaaaatcatatgtatcgagtcccttgccatcacggatgacagtcacggatgatataccatgaagatcatcataggcttatcgtcagatagttgtttgtgacaggaagcgatcaaaagatttacagattatatatggagatgagattttgaatcttcttgatatgtgcttatatatattctaactgcaacgactgaaacttttgggtttgtttttgtgctaatagcgggaatggaacgttaattagatggccaaccgtagtttttataattcgaatggtttgatcgtgtccaaccttggttaagcatagtctatatagacttgtagcttgactttggcaaaataaaatatggcctcgtacacagtactttaattttatccgtataaaattaaatgtggaagtagcttgatgaggcacataataatgttttacgatgttggcaagctgcaactatatattctaggattatcggggtattcacttgttctcagcttatgtcacaaagattactttttgaatgtatcctgaatacaggtctgaattttggtgatctaccgaaataatcctgtgagcgaagttgcgtagtaaggaaaatctcacattttatatggtctgagttatagaaaaccacatgtgtaaagacatatagcacaaaaccacatgttttaaatttatggtctaaatgattcacaaaaccccacgtttattaaaatctagattaatttcagcatatgttaaacaatattttaaagtagtgaagatttaaattatcagtccaagtcaagaacttaataattacaaaattcgtataaactctacgaattagaattttaaataaattcgtgctcaaatgcataaggatggggttggtgaaactttagaaccataatgcacgggataaagtgtcgcacgtcttcaacttttacctaaaaacatggggtttttgaattttactaaaaaaaagtgttagaaacaaagattgttgcaatggatgatgagaaactagggtccagatcttctgttatgtggaagtaattctcgatgtggcgaaaacttgacacatacgatttgatttccgatcaacatggtttgaaccccgtaatggcggcaccacgtctcttcaggttattaaccgtgcaattcccggttaatctcatcgcgaaggttaatccctgcatatgaatcgaagaacactagcgggaataatgtaaattgcaactgaatatgtgaatgataaggatatcaaagttggggttttataaactgaactaactagtagtgaaactgcaatgatagaaataatctaagtaaaacctaactctaaactatgatggctactggatatgtatacatacatacatacatatatacatacatacagaagttaaattgcaccggttctaatggttgggggtcgagatatttggtattgtggttgaggaatacaaattagatttgacgactaattaagggagtcgaagtgaacttattatgtgttctccacaccggacgatcgtatagttaagcccacaaacaaaataaaaatgctggaagcacattagtggtactaacggccgaatacttggggcaagtctgttaaccagcccagcactatatcagcaaatcaagacatggattggcacaaaatgatatctcattcaaagcccataaaagtcacttcaccaagccgattaacggttgcaaaattttagccaaaaaagggaaaatcatccatggaaaaataatacttgatacctcctttgatcaagaaagcatctacacagccacgttttgcaagcatgattaattttcggcaaaatttgttacaagatatacaaaaatggtgtaattagccaggggacactgtaagaacacgtatttgccgtaagacattgcaaaaaatggtaattagctaatagacactcgcaccattattttattattttcggaagaataggttagagaaacaaccattaaggacaagtttgcacttggctcaaatgaatccaacgtgggccccacatttaagcccctctccctctctttccatatgggagggcggaccagcgagacaaggccccttcggccggctgaaggtaggcggtggtggtggcatagccgtcggtggtgaccacgacaaaactctcataggtgccggtttttaatttgtcggcacatattaggttttttatagtgtttattgatatgaaaaaaaacgaagaggaagaaaacacgaaatactattggtccaattattaacagtgagatgaaaaagatgtatttgtattaaagaggtctactcgacaaattcttttggataaaactacgtgtttagggacggcgggagtaccttttatgccatatatatactagcatcaaataaataatgtcgcttaattgttacattgtcaataattaagaagtgtgatcctcctgttggaagcttgggataaccggtcaaagtggtccaccgagagcggacactgatggcccggtcttcgaaccatgcgtgcatcagtacgctgttgcctatctcgtcgcgactagcgacgttcttcccgcagcacatacagcacatacagagatgcggaccaggactgtaaatatatacaatgcaaatatgcaatagttttctggctggtcccatctcttactcaaaaacatatattcatccaacgctgatgcaatgccaatccggaattgctatacatatgacgccatatttctttcccgtttacagtcaattttttcactgtgcaattagttcagagattcgtgcatgtcgagactctaatgccatcgtaactactactattgctgatactatctcaaatctctaatcattacggagtaaaaaacaagattccatgcacagatggcatgcaaaaggacaagaaaaggagaagcgaagatagggagctcaccgtcaatgtctgtttttaattacactgcagttacagatataattacagtataattgtactatagttacatgtgtaattcctatgtaactatagtagttacacctctcttatataccacttacatatgtaattagtatgtaattttgggatttacatatgtaattttagttcttacatatgtaattttggggcttacattgtaaatacactaaaattatatatgtaatttagggacttacaatgtaaatacatgccgactattttttgataaaaaatatgacgccataaatatagctactccctgccaatctggcacgcatgtcgcaagcagtctctgccatcattctaaacgaactactaccatcaactcggtatcagaatataaaattttacgagcttaactcggtttttgaaaatagatataattaaatgagaaaaatttgtgattggataaaaaagagttaggtagatggagtgggaagagaattggtggacaaattattatattttggcaaaattggttacaggacacttaaaaaaacgtgtaattagccgtgagacaccacaaaaacatgaatcggctgtagaacattgcaaaaagtggtaattagctattagacaccggacatattattttattatttttagtggaaacggagagagaaacaatcgaaaaaagccagattgccctatgtaggccaaggatgtcagcccctctaatttcttgtcctcttcgtcccgacgatcctttacaacgaccggcgcggcgcgtagagcagtgcgtctgggtcaagctcgctcgccgtgttgaacatggcggcacgcgcgtccttgccgagcttgtcttggtagaaggagccgtgcagcatctcgttgttgacatcgtagtgccggaacttgccttgtaccgggtgagcaggacgttgatgcggctgctcacggcggcgaagagctcgtcggcgggaagcgccttcacccactgctgcactgcgttgtccacctcacagaagatgcagtggccgcgcacgcagatgccgtgttcagagcagagcgggaagctgttcgacatcagccgcagccgcacctccacgcgtcggccgccttcaccttcaccaccacatcgcgcttgcgcacctggatgacgtacagcatcacgcgcgacgccggcttggactcgacgcggaacgacccgccgatctcgtaccaccgctcgtccagcgccaggacctgcccgccattgagccactggctgtcgacggcgacggcgacgttgatgttctgcggcttgcggtggcggtggacttgccggtgcttcccgatgacgcggaggagtgcgtcggcgtggcggagcgcgctctgctcgcggtgggtgcgtcgccgccgctgccgccaacgtcgcaggtgggagcgaacggtacgacggcagcatgcgacgtgccattctgctactgccaggtgaggctgaggcagccggcatgcgcggcgctggcggggagggcgatgaggaggctggagagggagtgctcgcggccaggggtatttcagtacttttaaaactctttctctttccgtttctactaaaaataataaaataatgtctcgagtgtcctatagctaattatcactcttttgcaatatcctacagctaattcacgtttttacagagtcccacagctaattacactttctttagtgtccggttgcaaattttgccttatattttagaacaaattaaaaaactaaaactattatattttgagaaggagaagtaattatattagccggctaaacaagcgccagctagtctagactggccttctcacacatcggtaagttttgctactggtctccactacgtcctataaaaaaataaatctagtattagatgtaacacattttaggactacggatctggactaagatatgtccagattcgttttactataatatgtaatatttagttatatatttgtttttttggcacggaagaagtattatggatgcagaacctcgtaagtactgttgatacagtagtgtctaacatgtgagtccgaacctacatatcaaacatctcctgctaactatcaggactgcagacatttactttaacctctgatcttttatatctttcatatttccatatctactactttcccatttaaaaatacaagcatttttattttttagcaaaatattagggttaatgaaaatattccatgtaagtcctatcggtgatcaaattttgaattttgaattgtttagattcctctttctagcacctgattaattggctaaagttgtatggactttcttgtattggattgggtgtcctagaaatgcttatattgttgaaacgaagatactacatattttaagtcctataaatgcttaattcctacaaatgttcatattttaaacgaaagatattttgtagtaaaatatttttctataaagtaaaatacctaagtcaactttcgtgatcatctttattaagtgattagcaatcattattttcttgcttgcatgtctgttcaaattttgtgagaagacatgagttatgtttactatagtaattatatcttgttactatgattcagtagtaatattatcgtagaagtgcagtagcacgatacattactgtgaaatttataggtgttactgcacgtttttagtaacatcatgattaaattaacatatggtagtaacgctactagtataatactactgcttgtgcatagctaaatttttaaatctaaatcttgtgcaaaatacagtgctaaaaagtgcatgtgcatgatcacaagttgacacaagtgctaaaaatacttctctttattcatataaagatacatactagcaagccaattacaagtgaacttttagaattctaatctttaaataacaatatctctcacacctaatcggatcaccaacatcgctgcatccaatcgacttatcctctcatcgaaggatcgggataccctcgctcatatcaagtggagattgggaaagacggtggtggcatggaggggaggctgatgatggcggcagcctagaaaggacacggaccagagccacggcggcgacacaagggtgaggtacgcaatgccgacgctggcacggaggtggaggatgggggcgggggcggcgtgaaggggaggccgaagagggtgagtggacagggcctcgattgaggtgtccaaaacataaggatgatacgatggcctagatcgaagctaatcggacggctacgaacagttgtgtcactgttttactgtagcaacgggaggaggccacgtagcaactggaaaaataataggttttatatgatatttttatccagatatcttccaagatagaaatgttttatctctttgcaatcataaattgcatccattttttgtgaagaacaaatcaaagttcaaaacattactatgaaattgtacacttaatcattattttactattgccactttgcttaaaacgttctaagctagacatcataaaaaaatatccatggttcaaacccttacaaaataaaatcaatttgcatgctttgacaaaatataaaaagtactttggactatccaaaacaacgtgttcatttctttacaaaagggaggagtgacaggagtcatccatcactaacatactttgatagtagaagtcatcaattcacattttgttgctgctaaagggtgaaagtgtatctaggcctccaacttattgtggtaattaataaatgctggttagagaggactaatctggtttgttgagtttgtattagataattagtcctcgttattgatgaaatgaatggttcccagtagatccaagaaaaccgtttcctttgctattgcttttgagtcatatgaaaatctctactataaggccttattcggttaatctccgtaagagagggattagagagaatttattccacatatattatggtgttaaattatttccccttaatcttcttcaaaccgaacaagggctaaagggatgccatttttgaaacttaaggttggaagttggtgctcaaaacttttgcaaagtattttttattctctgtgatttctgaaaaaaaaaactaattgggaatttggacggtcgcatcggaatatctgaccgatcagaaaatccgatttgagcaaacttctgatccttgatttggtttgagaaacttattggaaattctgatcatgtcaccggaaattccatttcgtcgggaaatcagaaattttgaaagttctgagtcacggtttgattttgaagaaaatattggatattccgatcgtcagacggaaattccagtagtactggaatatcccaaattctgtttttaactcagtctgtgcaggcaaaaactatctgaatatcctatacgacatcctatacaatttgagtttggagtaattaactcaggtgaatcaatctcaagatgctgtccaggactgcagggtctccactcaggacattcacagtgcgtcactcgcatatgaggaacctcgttgtaccacgtattctagaactacaagtccaaaatccaaattcttcaaagtacaagtagctctactagtaaccttaattttatattgcagcccctagtactttttctttcagttcacatattttcgttaatttgtgtggaggtccaaaatttgcaatcaacacccttgaatccaacaaagaatataatatccccctttcgccctctctcccttatcctcacgcccacttcctcttcccctcacgccggtgcacccgccgcccgggcagcgcctcgatctcctcccctggctggtgccctggctagcgcccccggctggcgcctctcctcccctttctcggccgacacccctgggcggtgcctctcctccccactgccagccctcactccccacatcagcggcggcggaggaccccgaggcgagtctcggcgacggcgtctgtgtagtggcctcgcacggccatgcggatcgagcctagcgcggctagtaagctctcagcagcgtggatctaggccggcctcactagcgggcgcggctgactaccccaaccggcggtagtcctcgcggagccaggcggagcagcggcagcgctgtttggagtgacaactcgccgaatctccctttctctctgagttcgccggcgccaaatcgatcttcaccaccgccgacgctttccccattgagcctgtgagcttctccggcgaggacggcgtccggtcgccctcctccctgggcaacgcagcagtgtggagtatggggatgacgacacatccctctcatcttctctctttctcccttgctgcacggctcgctagtgtgggccacttatgcaaaaactgacgacgaaccggtggcaaacttgggctacgcggtcttggcaaagctccgctggtggaggaggtggcaccgaatattctgttcggcgtactcaggctaaatgccacatgggagcattgtgaatggcctcatgaaaccagaccttgaaagccacaagcccacaacaccctgcccctcaatgcacttcattcaccgcacccacgttttcaccaaaacacctgactagatcactgacaccctgcagggttcacgctctgtacgatggatcgaccactgtaaaaatcaatctgccaaacagcgatccggccagccacactggtggagaaacttttttactcccggttggtacccttgtagtcctgggtttccaaccgggagtagtaatccgggactaaagatggacatctttaatcccggttgaaatagccgagactaaagatccatctttagttcagattggtaacaacaaccgggttggttgttgttatcaaccgagactgaacaggagtagtgggcagtccagatgatccccttttcttttttttcttttttattttctcccgaatcgagtggcatgcacatccccaaatcaaaccccaaatccccaaatcaaaataacatcccaactccacatcacaaattttaaagttacttatactcacaaatcaaatacatcacaaatcctaaaaaaagtacaaagcaaatcaaatacatcacagattatacatctcagatccatacaaatgtccaatgaattacaaaattatacatcttaataatcacagattatatataaaaaaaaaagctggctgcctcctcccgccgctcgtcgccgcgaggcgcggccccgctagccgccgccgtgggccccccttcccccccctcccgcggccacaggccgcctgctcggcgccgcccacctgcccgccgctggatgggagggaaggagggggagtagaggggaggaggaggcttggatcggatgtgaggaaattggagagggacgatcttatctctaaatagctggatgggagggaaggagggggagtagaggggaggaggaggaaggggagaaaggagaggaggagaggggaggggatgaggaggcttagatcggatctgagggaattggagagggacgatcttatctctaaatatttagtctggaacttaaccgatcagagatgggagtaaatatatttactctaaccgggactaaagatagatttttagtcccggtttgtagtaccaatcgggaataaagatctaaataaactttacttccggttgttactaccaaccgggactaaagtgataatctttagtcccggttgatactaccaaccgggactaaagatcctcagccccctgacatggctctgacagagcataaaccgggactaaaatgatctttagttaccgggactaaagatcaaaatttttataaccgggactaaaaacaatttttagttccggtttttattagaaccgagactattgtagaaatcagccgaccgagcaaaagatcatttctccagtagtgccagaccagacgtttaacccttcatccgtttcacagccacgctcacgtatcagctaccccggatgactggtgatgaaattggtggtgcgcagcgaagcaaaaacgtccagaatccagagggatttagggtggattcaggtgtgggctccgatatcaccatcagccaagcgcaccgggaggggtcctcccctacccggcggcagcatgattgcgcagggcgaagtggccggcagggcagggcaggaggtgtgatggggcgttgatggatatgacctccccctcccgggggtcacgtcgttgcagcgatgcgacgggctcccgtcgccccttttggtttgggtttatttgtgtagcggtaaagcgtatttgcgttttttgcaatgccctcttgaattggtttcatctcttgttattaacagttcatcattaagtctagctgtcgtacagccgtagtagctttgctagaataggcctgactgatcagagtgttttgttcaattgttgcaatcatgggtggcggacgcacctgctcatgaaaatactatgttttaggggataagaataatgacataggagttatctgaaatactacatgatcccccccctctccccacccacacacacccttttttttaaccaggaaacaaacgttattttgtttttgaaagaaactgttggtcagtagcgacccgactcaaatagtgtcaagcataaaaatgtaatgtttaaataaaaaaatgagacatgttataatctatatggtgttatcattccacttttcttctcgttttcatcaaacaaaattttagtatattttctttctttggtaaaattactatttgataactagtcaacatctcgtatgttggtgccaaaagtataaatattaaaattttaatcatataccaaatacatcggttatatttagaatcatagtgacttaccctctatctcaaaaaaccttacgtttatatacatttcctattaattgcagttaactgatatccaagacaatatcagtcgattgcctcattcgtcggattattgtcatccgatggtccatgacatgtcttctgcctccagctgaatcaacttttatatctcattaactatgtgctgtcgatcaatcacccaaccactagagacgatgttaattgaagagggggagaaaaccgatgacttcctcgacgagccatatgccgccgacgcccacaccttcagcaagcttacttcatattaggccgagtttacataaaaactttttctttaaacttctaacttttctatcacattaatactttcctacacacacaaactttcaactttttcatcacatcgttccaattttaaccaaactttcaattttaccgtgaagtaaacacacccttagagttttggaattggaattggagatgcacaatttttattatggtgtccaatccaatctaaattctttgaaataaaggttcaaggatgattttactctacatatgtttagagtaaaagaagtagaaagacctatttggaaatcatgaataaacacaatgatgtagtagcattgtaaattatttccctttttctctttatatatatatatagagagagatagcagaactattctacaaccggggttctataccccctccctcccaaaagccaaacccaccacccatccctccttcccaaggtctaaaatccacctcccatatcagttaaagggtggtcaaaagcctcctcgcgctaatcagacctcggtcaatgcgcctactaacttcccccaccatgcatctcttctcagctctcgtcgtgcatgaacggtgcagtaacatgatggccattgtgcactaacactatgttttatatatagtaacaacgctaaaaaatagttaatatatagttatgacggatctacttttaataagtatttttttctagcatcatggtacaaacgtttttttaaaaaaatagtacaacacgtgagagattttattcttcaaagattcacttcattggaattcgactctccacaagcggtaataccatagcatagcattattatttctattgtctgttatgtattactgcaatcccatcacgacattactgcaatagtgcagtaaggactaagtttcaagtaacacaacatgttactgctatttcttgataatgttaccgtaagaacatatgttaacaaccaacactactacgtaaagcatttttccgtgtggtcaaaatgatttttccttgcggaggatttgtccgtctgcacccaaatgtctggaaaaatcaatttttttgcttacgggtggcccaaccgcatgggataatcattttcccgtgcggtccacttatcctgtgcggtcaaattataccgcccacatggaacaaaagaaaaccaaaaataaaaaaaaaacgaaaattgtgggcctgcacgcaaccggccaccgcaactcgtcggatctgggcggggcccgttcgtcgccgcctcgccggtcgctgcctcgccacgcccgcctggtcaccgttgtcgctgttgtgcccgtccgctgcgacagcgaaggtgaaggtggcgctgttgggccgctgcggggagtccgggcggcagagccagtggatgatggaggcggcctcgcggacgcggcggcgcaaaaggaggtgccctaggagcggcgcggcgaggggcagcggcaaggtgcggagtaggtggtggcggatggtggtgaggaggcggccggcggcggggacgttccccgcagagacaacgacgacggccgctgcctcgacgacgtccgccgccttgacgacgacaatgtccgctgccttgacgacgcccgcttgccgccttgacaacgcacgcaacgatagcgtcgtcgtcgatggagccgagcgacgacgtgcgcgacaaggacgacgaccaggaggaggtctcgccgccgccttcctgttcggcatctcatccggtcaccgcctcatccggtcaccgccgcgcccggccgccgccatcgtcggcccgatagaggggaaggggaggagttaaggtggggaaaggtgtggggatgccaggtgtgtggttgggaaaggagaataaaaggaagagataaagtagagagagagatgggagtggttgagggagaaaaacggaaaaaaggaagagagaggatgtgaaaattttgaagtgggttggagggaaaggagggaggtattttcctgtgtgtaccacttaaaaagcccacacacaaaaattgatttttccgtgcggtcctcttaagtcccgtgcggtcggattaggacgtctgtacgggaaaatcgattttcccgtgtgggcgaaagcctagcgcctgtccccttattgtcccatgcggttccacttacagaccgcatggaaacaaaagggggcggcgtccagaaaaatctatcctgtagtagtgcgaaccaccttgcttaatactagtcaaaacgaatccatcgtatccaatcttggtcaaatccctaagtggacgcaacattcgtttcgtgaaaattgtgcagtaacactagtgcttgaacatatgcattttgtagtaaccaagcgagttacgacagttccctgaaagcgttactgctaaaaggaagggggagtatgtagatggagggaggaggctggttttcttgaggggagggaggataattttctgggaagagagagatatatcgggaaaagatagagcagagggatcatgaggggcaaagagagattgggattatattttggtactacagtataattttgttactatatttatttcacgatgttaatataggtttggaataacacatagtacaactggtagtaacatgtgagagtaaatactataatttaggaatggtagttgtatggacaaaaaatcaatagtgtggcggtggcttctactcatgagaattaaatgatgatgtgtcttatgttactctagtaatctataattcacatggtgatgttgctgtagcagtgcattaatatttttgcgatagtgcaacaagacggtttcaagtgtacaataacaaccattacagtatcattactacatgtgccaatactatacggattagcacatgttagaagataaaattttactaaaaaaaaaattcatcacaagaaacatagtctactggttaatgatttgtggtgattaagttttttttgaccgggaactatcagagctttgcctagtagtgtattttcattaaaaagaataaagtatgtacaagttgtggtgattaagttgaagatcttacgttcatttccgattgaatgcaattttaatttatccaatagaaaacgaggacagagagaggaatcgagacttctctctcctcaaaagaagagaggcgtgagactgagtacggatcgggagggaagaagggagcgcgatagagagttacgtgaccacgactactacggatataaccgttgctcacatcatgtatgaacaagatgatatcaagatcaagtattccaagtgcgggaaaccgattcggccacctcctacactgctgactttaaatggctgtcgaatctgcatacaatctccgcttttgacccgagagtacttgatggaaagctctcagagtcctctttgcaacgcatccagcctcatcgccaaattccatcctagtcatctgcagatgaagaaacaatgtgctacgtcacctgtcatgggcctttgggcttgtaactttgtttgagacccggcccaagtggggcccatgtggggtgcatcccaaccaggggagcatgaccttaggcacccccaggtcctccttccctctcttgggccgaatccggcccatttccctccccctctctctcctctccctgcggcccactcggcctctccccgcgcgcgcgccactgacgggcgggcccgcccgccaccctcgctgacgggtggggcccacccatcatccccttcctcccgccgctccgcccgcgcctagcgccgccgccgccgccaaatccgccacgctccgccgctcccgttcaaaattgaatggggaaatatttcccccgattccctctccctttccccacattttcctctctctctctctctctatttcagatggaaaccccccctaatcccgccggcgccattaatggcggccggatctcccgcaccggtttccttccccgccggccgccctctctcactcccaaccctatataaaccctccccgcacctcccttgtctgtttccgccactcgccgccctttctccccgccggaatcgagctcgcaccgtcgccgttgacctccggccggccctatctgctcgccgggaccatcgcccgcctcggcgtcgtctcctccggcttcgccgcaccactgccgaccccgtccaccgccttgccgagctcgccgaccgccggaacgccaccgtccccgtcaacccgagccgcgccaccgcctccctccactctggccgcctcctccgtcgccgccgtcaacccggggtgagccgttgaccgccgcctctttcccccttcccttcccctctcttggccgccgcttcgccgtgcctatggccgctgccggcgaccataggggcatgggcgctgcctcccgccggccgcgccgacgtggccgcctccgagcgcgccgtgtggccgcctcgtggggcccggccgtcagccgcccatgctctcaggtgcggctgacgcgtggggcccacggcgccggctggtgagctgcgggtgctcccggtccaccgtggaccgagaggctgccgcgtggggcccaccacccctgtggacccggccgcgcgccccctcccctcggctgacgcaataaaccctatttttaattaaaatttaaatgaagaaattcacaaatattcacttaaagagcatataaacttcaaatggccataacttggccgtttgaactcgaaattggaccgttcaagtctctaatttttccttatgaagtcaagaacccatttttgtactttgtttcttcttgttatatggagtttattagagtaaaatcctttttcttttcattggtcgtgtagacgctgcagcttcggaagatccgctctacgtggaggttgaagccgacgttggggaaagcgagcaaggcaagtcacatcatccttgaacatattgaatcctaggttataaaattattttggtttaaattactgcattatcgctttatttaaattcccgcgttatcactgttttgtttagccatgcctatttatctttgttatgaccttattattattattgtcattgttattattaccttgttcacccttggacaaataaaaccccaactagtgggtactctattcatggttccactagtatgaacttaggtagatgcttcgcggattaattaggcaacattaggtggttttataaccttagactttgggaatgctcatatcatttggacactatagaatggttggactatgtggaaatggacacacaccttcccctctgttcaaaacccccaaaatggttttcgattgggctcgaggtgcgtggttttgatagaagcacctcggccactataaggaccggtcttcgggcctctgttgcaaagcactaccgtactttcacatgtctactgggtaaggcttagtttgtggcttagtctggttataaacaaaggtacacggatggagatggacgaagtcggggcttgatggacatctctaggacaaataaaggctacacgagctgcgcccggtagtcgagatgtcatggcacagggccggtgtcctgctgctaggggctcaatcctgcctacctgtcccgggggttccggccgtaggcggggttgggtcggtactcttgtttatggctaggatgggttgggaactatgtcacgtctttcgtccgtatgccgtggtggtatgtggcacgtggttacacgtgaggaagatgtgtcttgtgggtaaagatgtacacctctgatcagagtataatctattcgaatagtcgcgccctcggttatgggcaagcctagcaatgtacccaagttagtgttttaaattcttaaaacctgcttaacaactaaaatgtggaatggttggcctgggttggcttgggacgagctgggacctgggtttggttgccagttcggtctgaatcatcgtaggccttgggttaaggcaggttcgtgtaggttcacggccttgtttaataacattgtgtagctctaggatcgtgtttacaaaatggccctgagcaactaaaagtctttttaatgctgtttactgcaaaccctaacccctttattataactcccttgtactcctttgcatttattctgcattcgtgggtgtgtcttgttgagtacggtggttgtactcaatcttgctcaatttttccccaaacccagaagaggagttcctggaagatgaaggctttggtgtctagctcgtgcctgccgtcaagtgcccgtagtcgtcgccctagtcttctactgttttccgtttatctttgtgtgtgctgggccttcgtcgcccatgtaataaattaactatttacgcttccgcttgttaaactctgaattgtatcaacttttagtgtaccttgcctcctgggacaaggaataataaacgcacgtaaggaatgcccgttgggttaattccggtcgtgacatgattctagggttttgtttgattaaagtttaaccattgctacttgcctgcagcgggcgtgtcagctagacttcccgtctgcttgttcttcgaaaccccaacttatcatttgtattcaattcctatttgcaattcagattgcttttatcttttttgcttgtttttttgatttgcttgtaggaataaggttgatctgcaccggcaagatcaataacccacagagaggtgtatcgatcgcaaaggcacaacacaatgtctcgtacggttgtaatcgggtcatcaatgtttctcccaaatcgtatttatcatcaactcaccgaaagatcgggccaacaacagccttgggtgtctcgagtggagctcagggttcatcaagtggtatcagagctttcgttgctcggtatgtttttatctacatattaccagaaaatagccacaaaaaaatattgcatccattacctagccatctttgtgccactgcattgttcttttcagtttttgctttgttgagttttctgttgcattgtcgcgtcaagttgctggacttagcgtagtacgtttaggctttcgagttcttgtcatgtctattaccactgtcgtcgtcgtcgccctgtctttgttgtcgtcgggacctatgaaaacaaaatcatctttccgccagggttctatttttctagttttcaaaagtttatgtcggttagttttagagttgttgagttgcacctagggtttgtagatcctgccgtgtgtttgtttttgccgtgcatgtgtacgctagaagaaggaagggggagagatttttgtagattggattcggcttccataagtgaggacgaaggaaggtgaaagtcatttctttgattggatttggtttccacttgtgggggcccaggccgaaccttccactctgtcgactccctccctcccagccgacaactcccctacctcccactgtacctccacctcccaaccggttgtgccgagttgcaccttggtgaaattttttggagtgtcagattgaagatccgtttgcaaaaatggaacttatgcaatgagagcattacatttttgtatagttctaattttgggtttggacttttgcatttgagtccctataatttttgtatttacatttgagtccctgtaatcttgcattcaggtccttgagtcatttttgctaaaaaaagtgagaaaaagcagaaaggtgcttacaaaattgaaaaaaaaattccgcaccaaaaagaaaagaaaaaaaaaggaagaagaaaagaaagaagaaaaagaaataaagaaaaaatagaaaataagttgttatctttgagccgaatttgatatatcagagttgtgcttgaattatttctagtgctatcttgtggtaccgttcgtgtctaggctcgcgtctctagtccgttctagcctaggaccagcacggtactgactttgaacgattattcaactttgtattctctaatttgagcatctgttattcctttgctacatatttaagcctaccaagagctccacagatttgattgcagccgcacagcaagtgtttgccaaggcatcgatacatccaacctccattagggtgcttggttgagtcggtgtacgtcaccattccgctagctttggtaagaacttgtaagagcttggtaaaatgcttaagtgtgtgtgatattggagcttccactacctagtagttgataggagtgtgcatattcttgtgtatgtttcttgtttgctactaaccatattgattgggagctagcagtagacaatgaatttgacaaatatgatttttctaatgctcaaatgattaaggccgctagtaataagttcacctcttctacattatattggtggagttatgtgagtaacaaacctgaaaattgggatgaatgctaaaacatgatgagaaagtgttttgtgagtttatattacaaatgtactcttcatgataaactagaacatctgaaacaatgtgatagaactgttagagagtacatccatgaatctaaagtttgtatcatctacagtgatctaaaagagtgagatgaaaacataatgcgcagatttttcaaggggcttaattctgaagttcaggttatgcttactaatgtgacataatcatattgaacacctattcattcttgtttgtagcattgagagtcagatcatatcaaatgcgagtaagcatgaacaatgtgatttatctgctatttctgaatctcctatatccttatgcaaagatgatgtgcaaacattggaggaaaaatcttttgtctcccctgttactaacgttttgcagggagttcagcacattcaacaaaaggaggagaatggtgtacttgagaagaaagatgatgaagcacctgcgatatctaaagaaagtttgcaaggtaaattaaatggtgctgagataaatgaaggtgagtattctcaagctgagctacacaagtccacttttcatgctatagtagagcaaccattagtggaaccatttgctgagatgtctttgtcacaagttgatttacttgttgtttcttgtgataaagaagagttgtgtgataatgcttcacttatatccatgccacaactagtgaatgaacatgctattcctactgttaattcttattgcgctgattttaagcatgttgttcacattgctgatgaagtagaggaacgtgaattgacatcttctttaaatactttgagctatgtttagtttgatgattcttgtaagctcgataatttgaaggagaaattacttgctaaatctgatttcccatgtccaactaaagctattttttatatctttggcgaatatgatcatagaggattatatttggtgcatagaatttttatctgttcggatttagggagacatgttattgctaatcacactacttcgagtttctctagttttgatcggatgaaataggttgttttgtatggactatgtgaagagcaccatatggaaaaaccgaggatggttttccatgaagaaggggaggatgatgtgaccaaggctactacggataacatcatggatgaacaagatgatatcaagatcaagtactccaagtgctgaaatccgattcggccacctcctacactgttgacttcaaacggccgcaaataaagaaacaaggtgttgtgtcacctgcaacagatgaagcctcattgccaaattccatctcaatcatccgcagatgaagaaataaggtgttacgtcacctgtcatgggcctttgggcttgtaattttgtttggttcctcggcccaagtgggacccatatcaggtgtgccccaactagggggggcacgaccctaggcacccctaggttgtcctcccacctccataaatagctaggtaccccttaagggattcttgggttttgttagattaaagtttagccattgctacttgcttgcagcgcgcgtgtcggctagaccgcccgtctgcttgttctttggaaccccaacttattatttgtattcaattcctatttgcaattcatattgcttttaccttgttcttgcttgtttcttcgatttgcttgcaggaataaggttgatctgcaccggcaagatcaacaacctacggagaggtgtatcgatcacaaaggcgcatcacaacatctcgtacgtttatagtcgagtcatcaacgtttctcccaaatcgtagttatcattaactcaccgaaagatcggaccaacaacagccttgagtgtctccagtggagctcagggttcatcaaagagtggatcgagaggggattgagggcatgaaagagcgcgaggagagagtagagagaagaggaggaggaggataggcgcacatgaggggatgggagggaggagtgatggtgggacagaggtaaacaatagttattctaggggtcggcgtatagtcttgtccttaaaatatatatatactagcaaaaatacatatgtgttgcgacaggtggagataattttcacaattgataaaaattctaccaatttaaacggcaaactaaaacaagacaaacaaaacaatggtaaaacaaagtcagaaatcatactccctctatccaaaaatctaagacctatttctttttgcaccaagaccaaaaagcaattaattcattcaccatgtgataaaaccaatggacatgcaaccaataagtactaaaatgacttcttggattctgataaacaatttaatttagcacataatggcggttgtcgatttctaggaacagcaataaaatttatctggtggggaaaatcaaggagagatggtgacacagatgtttatactggtttaggccctcgatgtgagctaataccctagtccaattatatgtggattggatctatgtccggtatgaagtggagaatgcgtatgccgggttgtgatgaccggcttgccccagatctcgtgacccctaccccctcttatataggatgaggaggagggtttacaaggaaagtatctagctgattacaactagatctccctattctatctataaaagataggtatatttccaggatttatatcttatcccaagaatatctctttctttatttaaaggatagccgcatgggcctagggctcttggcccaccctatgccacatggcccaaaggcctctccttgggtacccaggtaccgtgtaactcatagtgactagctacaaataggacttagacttttcgaaaaaccaaagaatagaataagtctcagacttttggatggagagagtatatagtattgaacccggttgcgctcgcttcatacgtcatcacacgaagaatcccttatgtacacatttccatagcctcacaaatctattgggtgaatattccataagttgatgcatgtctattctgctatacgtcatttattaaagattgaagttttgattattcaagtagtgaaagtttttttttacttgtagatgaaaagcatttgcaaaataacaaacttgcgacatacacaccttaatggtaatttcaatagaaaaatatttgtgagtagagaaatttgaaacagaaaaaaaagagaaaaggaggaaaaagggaggagattggaaacggaaggagaggtcaggatgatcgggagaagagaaaaggagaaataggggaaaaaagagagaaaaagacactgattaggggaggggcgtgtggcgctgagtggaggcacgctggatggggcggtgggatggtgtgggctggctggttgggtgcactaggagagggagagggagagggaggcgttgggctaggaagggggtgtataatagttgttctagagtcacgtcgaaatggataccgtgatatagaaccaactcaaacacggatgacgtatcaaaattttggtagaaacatctataatttttataatgctagtagagatatatattaaaataattggggtaccatggggtcccggacctagcaatcaaattgagaatatacccaatcggactgaatctgaatttctttaaaaattactaacatgtttgaacaagtttgaattgaatttggatattttgttagattttgattctaggtatgtactatcaaaacatataattagttagatatgtataaatagattgtgaatttgagtaggaatcaaattcttatatataggtatatactccaaagtattttttaaaaaaaatcagatgtttgagtcaatttaagtattgcataccttggtgcctaggcaccatattgccccatctatatagagagcacagtaagagtgtctcctattgtttattgtaaaaaaaaggtggtacgaggggtaggggtggtgaggtgtggttttagagggatgtctagggtggtggaagaagggcggggtgctgatgatgatagcacggaaaccatggggatgggggtgggcggtgagccagtggcaaaggcggggttgcctcgccgctacttagagcaaggaggagtaaggggagtgagaagggagatcctagttggttgggtagggcttgccagcaacgttggcgactttcttgcaccggcgagccagggaggggggcgccccactgacggtagggagatgatggcacggggagatcgtgaactgtgagaaacttggaaggtgaggcatgatcggagaggttcattagcaactgtaagagcaccggaagaaagaaaagaaagaaccaaatcttgtggccggaggtggaagaagacctcaacaaccttagatgatgaccgatggaggagagaaagtcaactcacaaaacttaaaaaaaaaatcaatcgcctaactcataacaagcacaagcctactccttccgtcccatagaaaccaacctagtactagatatgacacatcctaatactattaatctgaacatatatttatttagattcattgtactagaatgtgtcgtatctaattctaaattcgtttatttttggaacggagcgagtagtttttgatcgacgggactacacaatgcgtgtgcactaattagttctaatcactatcatcctgtcaaatgaacttaccatgtataatagatgaactataatgttatctctatttttcttcttctctctatctctcaccttcttccttcaaggcttcttgaaagaaaaagaacgcttggaaattgaagtgcatcaatggctcggattaaaagttaattaacagggacaagacaaacgtcactagaggggaattttcgtccatgggaaagttcagcccatctccagccatgcccgtcctcaagagcgatggcgatcactgcatttggaggtcagtcgatatccagccgcctcatctatcgacgagacaagacgacgatcgatttgcgacggcagtttggctggcgatgccttcctccgtcaagcagcactggcccctcctctgctagccacgccgccgccgattcctccgccccgctcggccgctccttccgtctcgctgctaccgcgcgcgcgtgcccaaccgcctgtgaagcgggtccaaggtacgcaatgctaactgtgtcccctccctttgtccgccgcgatgccgccttcctccgctaatgaacactgaagctcgcttttcctcctctgatgaacaccggaagtctggaactcgcgtcagcagttcgctaatgacgccacactcattcacttccctatggacggaaatacccctcgataacttttaatctgagccggtgacatgctttaccctctgcgtgcgtttttttttggttgaggagcgtagaagcacacctctgtatgcatttaccaatcatttttatttttcaaattgtctgtactccatataagattatagttcattatagcctagttttaaacttgctctaacgatattttgcgcggctgataattagagccaaccaatagtccaatagtagtattgtactacgaatgtcatttactactggtgtctaaagattgaattggccgacatatattcattgatagcacctgcatcagactgtagaagcgagtgcacagcctgttgagaaatatgttgaaaggtgcataactctcagtcattatctaaagaaacatcacccagctcaagaaacatcacccagctctgttctttggcctcctttgaattttggcaaaggaattgaatttgaagttggtcttgtattttgtgtttcat

SEQ ID NO: 5859 - DNA, 47221 bp, Oryza sativa
cacgtagacaaaagtgacaaatagtttaagaaatcatctcttgccagtggtaaattattaagcgtgaatcaaataggggcatttggataattacaaaatctaaaagtggcaaatagttaaattccccttaaatttgggcttctgctgcttgcatcctctgccgctagtggtgcaactggaccgtatgcggtggtggatctcagccgtcagatgctgcattgacggttggattgagcagcggcggagccactccccttgcgggtcgggctccgcctctaccgtttcctccatccatcaacaatttataaaaattagttgatcatctgaaaatgctagtagtggctcgggcttaacaatgttgctcgcttcgctgctgctaggattgagtgacaaagtggatgttccgtcctcctgtggtcactggtcacgaacggtgagaagttcagtgtgtggttactcatagtactgagttgttgtatacatgcactggctagttttaaaaatatttaaactgaaatttattcggttattatgatacataagttacatgcacgagctaattcgcttgaagatattgagttacggagaaaaataaaatctattactcttactagctctgccaaacaggcttttagtaggaagtacagtggcatcgtgtttgatgcagagcagcagaggtcgagcttccaaaagacagaaaaaaattcaagtgaataaaattgaaatttctgatttgatctataaaatgtggagtagtagatacgacctttcaattcgggaaacatcaaattaaaattgctaagtttggagcattcgcatctacaatctttttacctttcatcattgagacacgaatcaactatagcaattccgatgtagacggccaagccacaacaaacaagaacacgctctaattcattgggggcgatagtgattagtcaaggttgtttcaacgattacgatgtgaaactttgaaagagaaaccccatttgttatcgcacacaccatactcaaaatagtactctctccatattttaatgtatgacgccgttgacttttttacaacgtttgaccattcgtcttattaaaaaaaattatgcaattatcactttattttattgtgacttgattcattatcaaatgttttttaaacatgacataaatattttcatattttacaaaaattttgaataaaacgaatggtcaaacgttgatcaaaaagtcaacagcgtcatacattaaaatacggaaagagtacaaggtttgtttcaacgattacgatggactacggatgcagtgccatgatcgataagaccactatataagagaaaaaaatagacgattaacgattaaaatgtaagagaaaaaaatagaataccatcctataatagacgattaacgatacgataagaccactatatataattaggcccatatcgatcgaataaagccgaaaacaaaagttattgatcacacgaagccgaaaacaagatgtcaaccaaatgaatccgaaaacaagagtaacacaaagataccttcctggtgatcaggagaacgacaaagagataccttgagaatgagaaagaccaaaaggataaactgaaatgttgccaaagcagcaaatcctacctagcaattagcaagatcggttgggttttgccagatgtgcattggccagaagggaacggaatggctttgctggctagtagtgaactcctacgccggaagatataaaccgagtatatatttgctacctctatcttaaaatataaacacttttaaagttagacacatgtattaagaaaacagatttaattaaatagataaatagggtgtgtggttataatttgttaagaagataatatagaaaataatttatatgaattgaatgtaatttaactggttaggtttcttatggtggaatcagtgtacttgggtttaatttctagatttaacacggtgtttatatttacgactaatttttctttcagtggtaggtttcaaattctatatttggtacgggtgctcgcatttacggctaattattcttttagtgatgagcgacgtatccatcgacagcgaaatacccgtgatgattttatcaatctcaaaaaaaatatcggctcggtcttcgaccctttttaccgaaggtgtttataggccctgtttagatcctccaaaacgttttgccattttgtagcactttttgccattttggatctaaacactagtagcaaaagttggcaatttggcatttgacatttgctagtccatagtagcaaattgtgccaaaaaatgttttgggaccactacctctctctttctctctgtcactttagtgctagaatggcaaaactttaacatacatctaaataccaactagtacttttgcaatgccaaaacttttaccaccaaaacttttgccatttgctatttgccatttcaaatagatctaaacagacccatagttgtaaggcgtgcgtgtgtacgtttctacagtttatcatattgtaaacacggaaaactagtgacatatgccgtcaccttttttttttttgggctgagctagagagagctctgtcgagtaggcgtgttgacaccatgttgccatcctctcctgcaccatgatgtggtcatcattgccgctcgtggctcgctgacgccccgggcccacgtctgggttcgcctttctgcctgcctgttggctgttgcgaccggccacctggggctcttccctcttcagtttgggcagccagtgacgcgtgtaactgcctgctggttttagtgagagttaggtacaccaacgtggtggttgttggctactgctgctgccagaggcaagggagcatgcatgtcatgtttggcctaagctctttagcttccaatggtcaatgatgtgtttgtatttatatatagtgaatatttggtctggctatagggccctgtttttgagtcatttctgttcttttttctgaattaatttaattagaggcttcttttcaatttgttacaggtcttgacttttaggctgctaacagcaaaattgtagaagtcttattcaaaaaatcgccacctccttctctaaatgttgacactagttaattcaaatttaagctaaccaatgttaaaaaaaatagagataatggagggagtacctttattatgtcagttatgtgtctttggcttttaagccgtcgaaaaaattttcttctaaacgtgttcttaatttatgtatgcatgtgcagctaataatcggtacaacctatacggtaagttattggaaaagcatgcaccaaaactattaagtacacgcataacttaatttatgagagcttagatattagtgtctaactacatgcacatttttatagaaactatttattttctgagtttatcctttggggtttctttgacattggacgtacacgtattcacaattatatgcgtgtcgtgtacatatatatataagtaatgagatatatgtctatgtaagaaaaatgagcattaattcctgcaaatatttttgatcgcgttatatatccaataatattgactgaaagtagtgaaaaataaacaagatggcgttgggacttcgcttgcatcgtaagtgcttggctgactaacaacaactaattaaactctacgagctgacatggtttgtcctcgctgaagaggttttacctaattaatcagctgttgtttttggaacaacatgacccttgtttgcaacaataattgccatggcgctactatatatatgtcatcttccaacttgtttggaagttgggatggtacagtactaaaataactaatatgatttcacctatccactgaaattaaaatatatatgtgggtggataatttcaagacctttaatttgtttggatttggattcccctaatatcgattaatttcaatccatacgtaccgtgctatactagctgtgcttaactaggagtataatattaatattctctcaacttggttggaccaaatggcaaccatccgaaatagaatatgcataaaggtattatgacgacatccgacaaagttattttcaactagctgaatgagcaagacacgctttcgtgaacttaaagatatttattacccgggtaaattaacttgtttggattactaacaaataatcgaaactttgtatatatcatagaaaaatatggaaaaaaattatattaggggaagctaaattgaacagggttttgcctctcctaaattcatcattgtccgcacgtttgtcaaatgctagatgggaaaaaggcacgcccatctcctctctcaattaaagtaagtttaattagttctaaaaaaattaaagtaattaagtttgagacagtgatgaatcccgtatgtaaattgagcgagtgctctagactaaacaaaatagagatatatcaccttaatatttttatatgagacctaaatacacatacgatcaaaagaaaatacattgctttctctattttgattttcaactatattaatatatctacacaaatctataggaacaaattcccaaatgggtatgatctacccagagagtagattggatacttgcagctttgagcgcccagcacttcacgtagcatgtggcatccttgccgtatgcatggccagtagagtcactagtactcgctccatttcgtgttataagtcgtttattttttcttctaatcaaacttctttaagtttactaaatttatagaaaaatacagtagtattttcagcacaaaacaaacatatatatattatcaaactatattcaatgctagatttaatgaaactaattttatattttagatattgttaaacttttttataaacttgatcaaatttaacaaagtttgactagaaaaaaaagttaaatggttcaaaatatgaaaaaaagagagtagagagtagtgaattataagctgaggttgaaggttgggcttgcgcaccaacaaaccccaccgatggatctgtcactggtttgagacaagttaaaactaactctttaaagcaggcttgttactccttccatttcttccttttagcatttaatttttttctcaaaatattttctttacgtaaaacagtaggagaggctcctactgcgctacattaaataatataatatagaagatttacaaggttacgagaatttacaaaagacaaattaattaaaaatgtctaaccatgattgtcacctaggtttgtccatctcttttgctctatgcatatgcaaggcaaactccctcagaaaatcagccttccatttatcaaaactgagagcaacattgttaaaaatgaggtcactccttctgcaccagatgtgccagcagccgattgtcaaaacttcaaagaagaaagtgtgctgaaaagagatctgagctgaagtgatcatgttcataaattccaaggccaaattccagtgaataccaatgtgttgccagacattgttgtgctaatggacaggagaaaaacaaatgtgccatgctttctgtggtcatggaggttcacatcaaacagtttgtgccatcttatatgttgaattgctttttatgtaacatttcctttgtgttgagtcgattcattagcatgagccaaagaaaaactttaagcttcattgtgcatttgcttttccagagtattgatagatgcctggcaacttgaagatgttcaaaaaacattgagtaaactttcttgggttggtattgatctgagttccataaacatgaccatttgtcaggctaattgttaatctgtaagctttgcaatctgtcatttaaataatgtcattagtatattccaaagcatttatagatatatctttcccttcctctattatgggaatttgaatgcttgttttgtgaaaaagataatcaggacttaattaatgagagtagcaatataatttgtcacactttctagtttagtgtgaaatttactgtaatgaaaagttaatttgaaatggtacctataatttaattttatttatatcctctagtcatcaattaggaacttaactaacatatatatactccgtacataacattaacttttagtgccttgggccaaaataaactacaacaatatttttttttatttgtattaccctatatttcctctcttttttgaaccagtacacattgctgcctcttacagtatatgaggaacactcctctttgagtctctagctcctcagcctcattgtctagcacttgagatatcactagttcttactgaaaagctgagccaaaccaaaccagggaaatcaattcatttttattcaaactgaataattttaattctaaaataataaaatgggaatgccagacaatttcgatatatccaagacatcctaaaagcgtctttttttcacacttcatatatttttcgacttggtttttattttttttaagaactttgggcttgtattctagaggatgatttatgtcctagggatggaaaaggaacccatgcatcctgacccttgtcactacatccaaacgacacactgatatttgtgtagactttatggatctctagcaagatgcgacgtgtatgttatagaaatactatacatgaataatgtggggaggtttaaatatatgtgaatttattatttgcaaaccgctagtggtgcaatctcataaaacctttgggaataaatttagctctatttgtatctggggactagtccctgtcacatcggatatttgaatactaattagaagtattaaacgtaggctaatgacaaaactcattccataacatggactaattcgcaagatgaatctattgagcctaattaatctatgattagcatatgtgatgctatagtaaacatgtactaattatggattaattatgtttaaaatttttctcacaaattagctctcatttatgtaattagttttattattagtatatgcttaatacttctaattagtgtctaaatatccgatgtgatagggattaaaatttaatccctgtatccaaacaccacctaagacttatcaacagggtgtccaacgactctccgtaactgtttggcacgtacttcggattcgtttttttcttgcttaaattatagccatttaaaacttcacatatcatcctccatcgttttaaagcttctatgcaaaattatatagtactctaaaatgcacggtacttactagttttttttttttgctaggccatcgaagagaagctggccaagaattgttaatattgtgcaaaaaattgtattatacactactgctgaaccagctatcactggcggttaaaaaccacactaccgctatcaccacataattaactcagcaacaaggtcaccagtattagtttcaaactctcaatcttgattttttttttcaaattgaaatttcactcaacaaaaccgaaccattctggccggtgttgaaagccggccaatgttcaggcgaaattcctgatccttacaagcaaatgaaatatcaatatggcaccgacgtttctggtgcttcaatcaacaacgtgcttgtgtggtgatgaatgctcaagaagctatcaatcatcagtgatcactaaattgtccacgtttatgtcctctttctgttgtctttactttggtcacatcaccattttgcaaacagtagatactgctcttccatatataagcttgtcagttgtcacacacgcacaataagaaagctgacatgagagaaagcaaattaggaaggaattaagacacatgtgaagaggcttatatatgagattaactgaattctaatttgaaaagagatatgctgcgctaactgttactctatgcattcatcaatataacgaattttgggtttcaattttatccacaaattataagaaattcgaaaatactattttacttaaatttcacatgagcttatctccaaccacctcccatttgatgagggggtatcctatttttttcccttcaatattaatcctcaaaaaatctagaatagattatatttatgaactgagagagtatatggtattttacttgctgtactaatataattttttataaaatataagtgaatcatcttatcaatttatatgcaccacttttttttaagatagtggatttaaaaccgggcctctaagtctaagcacggattttcacggtcagtgtaccacaatcttatatatgtactccctccgttttttaatagatgacaccgttgactttttctcacatgtttgaccattcgtcttattcaaaaaattttattcaaatgtataagatataaatcacacttaaagtaccatgagtgataaacaactcataacaaaataaattataattacgtaaattttttaataagacgaacggtcaaatatgtgagaaaaaatcaacggcgtcatctattgaaaaatggaggtagtattaatttatacgtaccacttcatatgttcatgagtgcatattttcatgggatactgtatatagcagcatgtcttttttttttactggcaagtgcagactttcatctgtagccagtgaaaaggatcaccgacatcaacacatgcatacaaccatatattgatatatacaattgagatcctctgcagtactgcatgctctgctcaatgcctgaatgcaactttcatttatagccagtgaataaggatgatgttgccatcttccacttgaactccatctagtctaggacgtctaggagtatataaactagctaggtgatgactaatccaatcaaggattctgcagcttccacatacatcagttcagatatatagcatcaaccaagtgtatccttggagcgtcttagccatccattttttattttccatatgaattgaactttttgcattggtgttcatcatgggctctgaagatttctgccgtgtttttagcattataaaagtgaaatggacatgatcggaatactgcagccttatctttctttttgttctgtgatgaagtctgcagctacaacgatgtaatatcagaatatatagatcttcagatattagtgtatctttatatgattgacccctgacaaagatggcacctgaatgcatggcgtgcttttctccctgtttcaaacagatttttgcgttctaaaaaaaagatttttgcatcaattattgaggcaaattgtttactcgattagcacgataaaatataagtaaactttacatctggcttacaataagtggtaaattaataatgcagtagatgatattgatttttagaaatcgtatttttaaaagcgtggagcaagtaatctatggcaaaaatctgaaaatgataaaagctaaaaggaagagggcaatatatacgatgtctgaactctgaagggttcattattagaaggatcatgttcatggtcctggagtcctggactcttgtactaccagtgatgaatagaaaggttgacaatgatctcctgtatttcctctgttgtcaacactctattgtattattagactcttgattggcataaacggcgatatttcaaggttagctgcaatgcgttcatactataaatagtggcttgctattggcattcattacgcgtgtgcaacactcaaattattggtcttgtattcatgcagacaataatctgtctggtactatacaggaattgggatgttttcgttgattgaacaccgaaatcttatctacaataaaacacggcttcgcattcttaataatatttatctcactactaaaaatccccatgttccctaccgtttaatattttcctactagtgtgtgtggagacaaggaaaataaaaatacccatatcgtaccattctaggaacatagggaaattttttgtttcatacagttttacagtattaagagggaacaaacaactgaaacgttcaccatgctggccggtcatgtttccctgcgatatgattaaaaacaaggtgattccccgcgctttaatgcgagaattactaagtaattattaatttttttgacagcaagttaggagtaaaaagaaaaaaataataatgaaacatcagggtttatcaatcaaataataccatgcttcaatgtgaaacatattgataagtatatgttaaatattgtaaaagtgatagatagatttgttaaaatatcgtgcaaatgatacgaggggtgatgattcaaggtttcaaacatgctgaacatgctgctacccagtcaagtgaaatgtccatgcatgtttggttttcaccttaatattgctatgttgtaggaagcaaacttatttagcaaactgtaagtttttattatactatgcaacaggtaggaaataataagaatacctggtgatcagagatcttgacaggcaccaggaagaagtcattgtccacctccatagcatcctttcccccagccaccacctctttccgcatcttggacaggcggggatcgtctttgtccctaatcttcgtctgcagcacaccatccttgaatagcttcacacaaagtagcgaaagagagagataatgccagaatagattgctagtgttgcccagcagaaaaaggaaagtctgtaaattcattctcacctaagatgaacaacagaggtctgcccccaattctgtgtgtctgcaaaaatcaaccaagaaacaatgaggataatgagcagcacaaccgaattagccaaggaggaagatttcctcttgttggctaaacgaaagaaaaaaaagggcaccaattaacctgcagcagtagagtgggcgagcttccaagagagaggaaccgatgatagcagcacgagcaacagaagcaaaggtgctgctgcccttgtccgtggccgccgtcgtcgtcactaccgccgccctcgaccgctgccaccgccctcatccgtgtccgccgccgccaccgtcgagtacagccgcctcgtcctcgtccactgccgccctcgaccgctgccgcctccctcttccgcgtccgccgcagccgccctcgtccgcgtccaattccgccgcgctcgtccccgaccgccgccaccgtcgctgtcaccatcgacagagtctgtcaccgccgtagtcgctgttgctgggggaggcgatacggtacaggaggcgatgcggtggggagcgaagggaccgagggcatgctccaaaacgcaatgaggaccactgagatgtaatccaacggtcgataattaaatgatgacgtggcttcaccaaatctcagctttgggtcttaactttatgaaagaagggattatatgggactaactctaaagaatttagctccagaaaaatttgcctgtcctcattttctttaaaaaaaattgcctgtccctgctagttttatagtttccctccagtccatacatctctgtcccacctcgtccacatagaaaagccctagccgcctccaccaaaatatttcccttcttcggtgaaatcagcggccatgctctagtgtcatgccattatctaaggtcattcttgcttcccgcaactctcctgcatcgaatccctaaactttccacccaaaaaacacgctttgtggccctaaatcctctattcgtcatcccccattacctttccatccattaaatgcgcatgaccaccttttaaaaaactgacaccttttaaaaactgagcagtgagcttatgagcggataaggggaggagagtgcgcggtgacaagcggataagaccgagagtctctctctctctctctcggcctcccctccgccagattcggtgggaggagaggcatcgatgatggtggtggcaggctccggatctcacgggcggtgggctccagatctcacgggcaagggcgtccatgggcgacggcggcctctccgtccgtctcccctcccctggcctgccttggcctctcctctccatccggccagcaacggtggccaacggtgtcctgctacttccggctccaatgagcacccatgtcgacttgaatcctctttctctctccatccatctcttcagccttcggtgagcaccaccatttctctttgccttaaccctatcttcatttctagatctagagcaagcttttctccggtggatgcagccaacagcgactttttatgatgcttgattctatgatgtgaacttatcgatgaacatttgatcgtgtgatccatgaacttgttgattgtctgatgtgtacttttatatatatatatttggatttatttttggtgactttgaagcactagcttagctcaaattgagctaagctggagtttttttttttttgcaaatcgtatacctctaatagacttcgtggtgtcagttgggaaatccggcacctatgaaagtttcccaaccaacaccaatagccttttctataatagtgatatagggtatgttcagcagtcagtcacatgctaccacaaccactttggttgaacctttctaaggtttggtggttaaaatctttgctacggcttaggagctgtttggatggggggattgatttttagcctctgtcacatcggatgtttggacactaattagaagtattaaacgtaaactaatgacaaaacccattccataaccctggactaattcgcgaaatgaatctattaagcctaattaatccatgattagcctatgtgatgctacagtaaacatgtgctaattatagattaattaggcttaaaaactttgtctcgcgaattagctctcatttatacaattagttttgtaagtagtctatgtttaatacttcatattaatgtccaaacatccgatgtgacagagactatacaaagttagtaactgaattcaaacactaccttagtaacgggatccaaacaccaccttagtaagcttaagagagaatcgtgtcatatttttcttaatcacttacacccgagccctagttttttagaagtactaatcttgctacaactgtctaaatagttgatcaaatttatctaatctatgataagttatggccgacaactaaacggggcttataatatcttccgttatatttgaagaaaacacgacccagttagctcagtactaatacttatgtgcaaacagtacgttacacagtacaatgtcggtcttttgtagtactacctccgtttcaatataaatataaatatagttgtggttttccatatctaacgtttgaccatcattcttatttaaaaattttatgattttttttaaaaatagttacacataaaatattattcatgttttatcatataataataataaaaatactaattatatttttttaaataaggcagatagttaaatgttggacatgaaaactcacacttgtactgatgtagatagtaattagggtgtgtttagttcacgctaaaattagaagtttgattgaaattataacgatgtgatggaaaggttggaagtttgtgtgtaggaaagttttgatgtgatggaaaagttagaaatttgaagaaaaagttaggaagtaaaccagaacttaatttttttgtctatgaaaaagagggagagggaggtacgtacgagctagaaactgcagagtgtgaatgcattcccaatcaatcagtcactgtaatctcaaacaccatggacagatatgatatggagtagataggagtgaaaagggtcggaaacgatcggaattgatatcatctctttaaaaacggtgctcgatcagccaataattgaccatatttatcatttaaactactcagtatcgatattaatacgatgcagaaaaaattatgaaaaaaatttaaaatagcaaaaaaacgatacggtcggaaacggtaccctttatacggaaacgacactcggttgatcgggaatttccgtgaccatcttcacccctatgagtagatatgtgatcaatcctgcagtctgcgctgcgttgtttggttacatgttttccgaactactgaacggtaatattttttctaaaaacctttatatataaaagtcgctttaaaaaccatacaaatctatttattttaaatttaaaataaataatactcaactaattatatattaatagctcatctcgttttacatatcttcccaatttacttcttttctcttctctcgaactcccagctagctcaaaagcaaaccccagaaaaatccaccggctgccacaagcagccaccgtcagaccatcacatatacacatcgccattagcagtcgagctgtcgaggtcagggagccggctaatttagcccatgcatgatagctccaattcctccatcctataaaataatttcgtatcttttacctctaccattcttttcaaaatgacatcacttctttcactttatttatatctaatccataaattaattagttttattttgttgatatttcttatccacttagaacaagttttatagtaaagatgatgatcacctctaatttatcttcatattacttgccttagatatacacccgtgctaatataccataataatatattttactatattactatattagtttctttctctcctccccgtagaagtttgtgtagagattgcttctttcatgacatgagaggtggtttctcctctctctcctttgttttccttttccatctcatcatgtgatcctattatcctacaaatacgagcgtttggatgtccgtagtacttgctctcataaatatataatattattttttcttttaaggagagacactttggtagtatatttttacttcatatcaatttgtgttatgatgataaaagatgaagttatttttggaacgcatgtagtactatagctggtgcatgaggctgcggtgcagtgccaccagcagctagagatgaattgatcggctgcacaagaggagggcggctaaggcctctcagagcgcaagcaccggttgccggatcctagcccaaaaattgtcccaaagacactcctccccacagtacaagaatcctattctgtgtagcttaattgaatgaaggtactatggaaggaaactgagcccacagtgggcggaaccccaagcgcatggacacgggtagtgcggaacaaatttattcctcacttaccctcgagcggtccgtccgctgacttatctacttttcctcatcctcctcttcttctgcctcacttctcgaatgcggccgccgctcctgatcctcccctccgccgccgagccatcacagcggcggcggtggcggcgaggtggaagcgcgacgctggcctcgtgcagcggcggaggaggaggggaaaggctcgagcggggcacgcctccaccgcggcgaccttgccgaggggggcctcgagcagcgccgccggaccccggggagtggcggagccgcacggcacaggccgccgccgcgaggaggaggagcagaagcaggagccgccgtttttttcttgcactgtctagatctgttggttcggggtgatttgagttgacttgagttgatttcagcggtttggtccgcatctgtggtggtttggggtggaattcgctgtgcgtttgggttgatttcatcagttcagcgatgattccgttggagggcgatttggggttttctgcaggcttgttcggcgcgagggcacgggaccatatatgaatattcagtatgagcttctgctagctgcctccacgcgctccaaggaactgatgaatctccattctccaaataatcctccggctgcttgcccatgcaaacggcataggatataggatattgatagtcatagctagggatcacatgcaggggtatccttttttaaaaaaaatttaactttattaactttagaagcatagtaactatgttaccctgatacggagatacggatacggatacgcgttacggggatacgaggatacgtcacttttaaaaaaacaccgatacggggatacgtctatatatacttattaattaaaaaaattactaaatccctgtaaaaaaacaataacactttcttgtagctaaagagattagcctgaaataatgaactttctgattggattatattatctccaccaaagcccagataacagaggaccaagaataatgtataaattagtgtaagactgtaagcagtgccaaaataaaaacaagttgatgttttttccttgctggtggtccagtcagccttgatgaaactccagccgaactaggcactaggaacgatagatgcagtactctgaacttgcaaatccaaaacccatcagacatatgaaacaagatgcattagttcttagaaaaaaataaggggggaagaacgtacacaaaacagatccatcaacggttccttcagtgggaacgaaggacccatattgctcagtgcggtggctctgtgcccggcgatggcggccatcggcggcgctgcgccccggcagtgaaggtggtacacgtctggcacggcggtggtccgttcgacttatggccgccgcggctctccttttgccgtcgttggcggcagcggctttgcggaggcggcgcagccgcgcgcccacgcgtagatgcggcgattgacagtactccctccgtttcagattgtaagactttctagcatttctcatattcatttaaaagttaatgaatctagatacatatatatgcctagattcattaacatctatatgaatgtcggtaatgctagaaagtcttacattgtgaaacggaggaagtatttgttagggttgggacttgggactatccaggatgcgcagagccgtatccaagaagtatccgaattatctttatttatttgaaaatcagaaaaattgaggatacgtatgggatatgtatcggagcgtatccgatggagtatccgatacggatacgctgactgttagccgtatcagtgcttcgtagcatagtacatcaaccaatgatacattctccataagaggagaggattccaaagcttccttaggcctttaagggtgctccaccctggaccggtgctatggggcgccatggaggattttgttcgacatggaacgagcgcccgtgaccaagttaggctcctcacgtccatccatactgagcgacgtagaaccttgtttgctcgagtctacgcgcggccaaaaaaacgaaaggagcctgcgctgtgggcttcggttcttcgccacaccgtgacctcgcgccgcatccagtgaagaaattcccgattcgcccacgaaaaaccccatcccgcccagcgatttcccctcccaccacatccatttttcctcccaccatcgagtcaagaaaaggcaagaaaatcgaagaaccgaagataagagcatgacaagcaagtatagataggagtaggatccctctgggtcttaaaacaccacaggaacaaacatcacaagaactgaatataagaacataacaagcaaagataaaaacaggagagcagttcttgatttttctcatcaagaactggagaacagaacatgcaaagatattaagaacaatgattcgcttcttgatttcttgacagagctgaccgcggcggcgccggcagggtcaggattggcggtgggcagcggtgaggctggtggtggtggccgaccgccggatctactcccccacctcctactcctcctccacctcaccgccaccgcgtgcagtgggtggcgacgccttcttgctccctcctccccgcggcgtgagaggcgagtaggcacggcggaccgggaggaggagcggcggcgcgggcggtgatggcggacgccgccgcggtagccgggacacctcccgccgccaagaactggtggccgcttgcgcgaccaacaagaaccgccggccctccacctcgccgcccgccggatctactcccccaccacctcctcctcctcctccccctcgcccttgctggttggcgaggcggcgcgatcgacgggagacgaggcggcgtggccgaccaggacgaggcggcacggcctaccgggacgaggcggcgccgttgacgggagaagaggcggcggggttgacggcgaggcgaggctgccggagtggagcgccggtggacgaggaggagaagcggcgggtgcagcggattgggaggaggcgaagggctgggagaggagtcgctggaagggtaggttaggaaaattaattcgttccgctccctgtgaccacgcgactcgggtaacgcccactgtgggctgggtttctttccatagtaccttcatcctatttagccacacatatatgggtgcttgcactgtggggtagatgtctttgagctataactttgggctaggggtatgggccccatagcttgcactgctattgcccttagtgtgtgttcgtcacccccttttcccaacccatctccctcgtttttcacgtgcacgcttttcaaactgctaaacagtgtgttttttgcaaaaagtttctatacgaaagttgcttaaaaaaaatcaaattaatccatttttttaaaaaaatagctaatacttaattaatcacgcgctaatggaccactccgttttccatgcgtactactccgattgggaaccgggaatggcgaacacagccttagtagttagtagggcagctggaatgagaacataagcccttgtttagttcccaactttttcttcaaacttctaactttttcatcacatcaaaactttcctacacacataaacttccaacatttttctttaaacttccaattttagtcaaaattccaattttggtgtggaactaaacacaccctaagtgggaaatgttctgacaaactatttgattttgtgtttgaccaatttttcccctagcttgcttggcaaggaagttgcaggggtatcctcaaagatatatatggatatgaggacgtacgtacggtatggctaagatatatctgatcgaatattgatttcggtatcagtcttcggtctggtcatcaaatacttagttatagtataaaatagtcgagatcaatcaattcaatctcaatcgtcataaaccaattgtatgctacgcaaatggtaagtctgttggtcaatgtcctcctaaagtcctggccctcgacctcagcctcacgttgagatatctaaatcaaccaaatgtattgtcattgtgcgctggatttagatcaaaggactagattagagtataggcataggcgcttgcaatgaatttacagttgtagttgccgtcaagtctctagggcttacttaaattgatgttcttcaacatttacttattgagtttattgggccaattttcagccaatatggttaaccgaaggtggtggtcgaattgaccaaaaaattaaatttagtcatttagcagttgatctcttacctagagaagacatattaattcgtgagattatgagagaattggactcgaaaaccaaacaacaaatggggactaaaaatgtaactcccataaccaattccaccatcaacttcctccttcaaactcccattcctcttcccttctcttgccaaacatgccattaatattatgggacaggagtagtcggtgaggctgtgttctttctcatgggttcccaacccatctcccttgttttctgtatgcacgtttgtcaaaccgctaaacgatacacgctttgcaaaaagttgatataggaaagttacctatttttcaagttctttatagataatacttaattaatcacgtattaatgtatcgctccgttttccatgcggaggagagggttcccaacccctccaaaagaacacagcctttagggtcctttcagcaaaatctcattttcatttcacaatgtgactactaagcacaaattccaaaaaaatcagggtcctttcagcaaaacctccacattgaatgagctcctaaaaaaccccctccccattctgtatataagatcatcacacctttctcgttagggtttccgccgcccgccgccgcatcgccgctgcagcctccttcccccttcgccgccgtacaccctccagccagccatggcggagcaggtaagcgcccgcgccacccaccccgcgtgatctctctctccgtcgatgcgctgtttctcgcatcccctcccattcctctcgtttaggatttaggaccagttattaattggcgcgtctagggtgttcgagccatctactggtctgatctgatctgatccagtgtagtgtgatgaccgatgcgaagtttgaatcttacggtagtgaggctttgatctgtgggcatctcctgaggatataattaggaaatggcggcatattttcgttgaatttttttaaagattctgtttaagaatccacgatgtactatggttttgcgatggggatgtgaattcagagctcgcaagctgagacacaaatgctttgtacattttgagactcgatgacattaatgtagtttgggttgtcgcattggcgctccccaagactccacctgtttatttatttcaacccaaggttcattggttatctctgtatactgtgattttcattgacaaaaaatcgatgatgtgtttgggggtgggaatgatggttagattgggttcagatatgtgaaggaagctgtatagtgtatagtacaaagtaaagttgcataaagggtaaaggaaatgtcttctctattaagtaaaaactaactagagttgtcatgatggctagatgcttataaaatgttttatttgggtgatgctcaattgtttgtgttctgataaaacctttgtcatgtttcaccatagcagagttatgttgcatttaccgtggtacatgtcgatgtcgtgcttacaatttgttgactattctattgcacactttagaatgtagtcattatacggtgccagtagttttgacgtatgtcattctttgtattgttcagactgagagagctttcctgaagcagcccaaggtcttcctttggtgagggttctgcttctacctgtaatttttgcggttcattaaatacatcatttgtatctaataattaggtgcttgatttcagcccaaagaaatctggcaaagggaagaagcctggcaagggaggtaaccgcttctggaagaatattggccttggcttcaagacaccccgggaagcaattgaaggtaataaataaattcttccctgtaactatgcaaatcatgcaccctgtaatttggcatataatttagtttctgaagtgtgcactgccatttctttatactttggtattctttcttttacatcctacatcatgaactacatttgccctatgtcgaaacaggttatctctttgtgaatacctagataagtaattggttccaacatagtcttgatggtattacattccctgctcaaagtaatttaacttggcagtgattctttttagataaaagtttttagttatcaaatttattcctcagttttttttagtgatcagtgatttcttagtgataccatttcttttaaaaaagagcttgatgaaagcaaacattgttccttggttccttaccagataccaatttgtatgcgctgttcgttgggctacaggaagaaaaatgcttaccttgaatttttctttttgctacagttggtatttattttgcaatgcatgtaacaattgttctgttgatgatatacttaggaatacctagggaaacttgctactttcatcataatgtaatcaaattgttaactaattctgtttcagggacctacatcgataagaaatgcccattcactggaactgtttctatcagaggtagaattattgctggaacatgccacagtgccaagatgaataggacaatcatcgtacgcagaaactacctccattttgtgaagaaatatcagcggtaagtaaagcaatggaggactatgaacttacatttcttatctgtgatggcatcttatttagaaggtgaacttgttcatcttgtagatatgaaaagaggcactccaacattccagctcacatttctccatgcttccgtgttaaggaaggtgaccatgtcatcattggccagtgcaggtaatgttctctagctgatgctgtacttagtacatgttttctgttttgttctgcatacctgaatattgggattacatgacttgaaagttccactgaattatctgttttctttaaaatgttcttgaaaattaagaaactaatttatattttcatctgctctgtcattcctcttgtattacattgttgatgccataactcagaaccaagcatcatattgttttggatgaggctgttctattgtcttaaccaggttaaggtcctgtttggcacagctccagctccagctccacccctcctggagcttgagctcagccaaatagtttcagctccaccaaaactgggagtggagttgggtggagctctctcacaaaatatactagagttgtggagctgggtttaggtagctccacaactccactccagactcaactcctggagcaatatttagaagttggagctgtaccaaacaggccctaaattgcaaaaatgtttagttcatgtgattattatttttttgttctgtcatgaaatttattctggttatgaacaaaaatgcatttccagcccctgagtttatatttacttctgaattttctttgccctgtgtgtggttgtgcaggcctttatcaaaaactgtgaggttcaacgttattaaagtcatcccagctggttccacaggtggtgggaagaaagcattcattgcagcttgagcttatcgaaaatgcctaatcaatcactagttaaatatacaagtgttcacttagaattcttctagcttgctgttttgaccttctgtctaggtccctggagcatttgccactcatctgaaatgtatccgtgcaagttttgtttagatctctggtcatgcaaattgtggttgctgttgccctgtcgttgggccatgttccttctttgaagcaatagcatcaacagcctgtttgtttcagtcttatgatggtgatgtgcgttatcgttgttttttttaagctggaaattgttcaccatgtcactgacatttcaaaagatgtctatttcacatgaactaaaagatcttgtgatgtttgctattgtgaaattgttgctgcctgataagatcatctctaagattctgacggtgacttgataatttttgcacgcattaaataaacatcttagcctcctagtagctgttgtagttgtaggctgcgtctcaagcttgaagaaaggagatcggttgtttgcaaggcatgcaatttaagcttcttcttaaagtgcatttcagcatgttaaaaccccaaatccatcccagattctccaagaaatagtgaatcaattcagtcatacaaatgagcaccaaatttatcgttcctctctcttgctgcatatctgcacttgtgctgctctcatcacatctccatagtccagccatttcttcattccttggaatccttcttgatcttgcagcaccttcccttccattctatctgctaacatctggcactacaaattctactggaaatcatcggtatcgcgacgaatataatccgttatgcgatgatttcccaccggaatttccaccgccagataccgcggcaatttcaatcttctgtgtcgatcccaatggctgctgcaacttcacaacggtgcaggcagcggtcaatgctgttccaagcttcagcaagaagaggaatgttgtatggatcaacaagggaatctactagtaagcatcagtgtttcttaccttcttcagatttgtagtgctctttccaaagtgcactgttggctgttgcgaagtgtgctgttaccgaagctgaattgttgcagtgagaaggtgacagtcccagcaaccaagcccaacatcacatttcagggccagggattcgatctgacggcaatttcttggaacgacactgccaactcatcgcatggaacgttctacagcggttcagtgtccgttttcgcaacaggctttgttgcgaaaaacatcagcttcattgtaaacacagagtacacagcaatttcagcttaagtcacagactgcaccttaggtagcaatccttgctaactctgaattatttgaaaccagaatgtggcaccaatcccaagacccggtgatgtcggtgctcaggcggtagcactgaggatcggcggtgaccaggcagcattctggggttgcggcttctttggtgcgcaagatacgcttcacgatgatcgtggccggcattacttcaaggaatgcttcatccagggttccattgactttatctttggagatgccaggtcactctatgaagtgagtaaaaccataatccaaagattggaagacaacaaaaatacactttgtcactgactgcttccacctgtgcacttcccagaattgcagggtgatttccatagcagatcctgttcctgcaggggtgagaaccatcacaggttcagtcactgcgcatgcccgggaatctgtagacgacaacactggctactcttttgtcaattgcagcattggcggcaccggcaggatatggctggggagagcatggagaccatattccacagtcgtcttcgcctacacttcaatgtcagacatcattgcctctgaaggatggaatgattggaatgatccttcaagagaccagtatgcatcctctctctattcagtgtcaattgttacctgcatgacaaaaaggtaaattagcattaatatttgtaatgtttgaattgtcaggactgtgttctatggagagtacaggtgcacgggtgatggtgcaaacttatcagatagagtgccatatgctcagaagcttagtgatgtgcaggttttgccttacctgaacacttcttttattgacggagacagatggctaaagccatactgtgattcactgatatctgcttgaagcaaccaaacataggcattaattgtattgcaaacttgaaaaaggaaaatgtgtactccattctttgttttctttttcttctcactttagagcacgttgaattaacaattgtgcatagaccagtcttacagagatgtattattttttacagaagatttagccattgtttgatcatctacatttgagcagcacaaaaatggtacatggaaagggagccaactccaattgttgaattacaattactggcattacaacaagctgactaatatcaacattctaactgcaagagctcaagtccaactatctcatctcatgtcccaatgaaaattgagggatcctgccattctcttcttgagacagatgctttttagctgggtctgagactgttgctttcgacagacactattcctaaaatgaaatctcactcggtgcatggaatgtccgtccacggcatatggcttccaggttctctcccgcataagagctaagtggagaaacttcaacacctgaagtacaagtaaagttatgcgataatcaattcacaaatttccatctaaaaaaatttcagctagtgacggtcttcaaaagtttctagatatacatacaaaacgttacctgtcatatacaagggcacggaatgagtcaaaaagccacctgcagctaccacccatcggctgtgaaggcggagcagcattaatctggcactatcaggagtatcataagttgcaccattagcattctttactggtgcaaattcctcctccctcaaaatctgaaacattaggtgccaacaataccaatgagatctttccaataaatgtttgctttcagtaattaaatagaactagtaatagtgaatttgaagtcaaacctcaaaaagagctgttgatggagaataggtgaacacgtcaaatataaactgttcaagctttaagcctgccgtgtacccatggattgaaggaatcttcttctctgctaaatggtaactgggcacaggattttaaaattaagcacaaaatatggaaagagtaagttgacactgaagtggtattgctgtataatatccaacaatcacattgcaggaagaagaaaaattaaaaaaaaaagaggttgtataacgaaaaactagtcacaagtgatttattatattaattgatataataatgtctgttctattattaaaacaaggttaaaagaagcctcttaattcactctcaagggctagaaattaccacataaattagtaaaagagacaattatcaggtcgattgtggtggtacagattataactgtgttgatcgatctgaaagagttatataagaatattttatatttaccactaggcaaaacagttatatgcaaaataaaacttctaaaataaaaatgcattgaaatacagccacacaattgtccttttctttaaagtttagtaagttagctatatagtactaaataagtaataaaataattgggcgaagtcatttacaagaagttttctattattcgagcctacaataagaacatagctctaaatactatggcaattacctatgcttaaaccacaacttttgatacggaaataaatgttggaacgaaatgaaacatcatgaatcataatgctcaagaacaaaatagttcttcagtaacaatacttacatgctgtccttttcaagactatttgttacttgattaagaaaatccaaagtaaacatatgcaggcatacctgacagaaagatagtaaaatgattatcaacacttataaaggatggacagtggaggggaaagggaataagaagagacatacattgctccaacaataacgaaggcgccctgtgccttgatttatttcagtagtcatagctgcatccatttcactgtactcaactacagaaagaggcccacccctgccacgctgaacaaacactccaactttctcctgtggatatgcctttaacagcaaagcataataatgaaaaacaaaaatgaggtgcataattgaagttgaagaatacttctcattctgctagggattggataatgcactggcataccttccttacgacctttgcagcagcagacacgcccttgtcaatgaaatatcctaggaatgttggatcagcaacacggacctgtatcaaagagattgattattctggtaaaaaaggagatcaattaaacagatggggagagagaggccccattacaatatatatttttttaaaaaaaaagtgtactcaccaatacattgtcaactccatagcaatctacatatttcacacctcttccagccatatcgtccagcaacctttgagattttagagctgtggcacagtaaaaagaggaaataaacaacataattgtggctaacatcgataatatataattgttgtattctgatacaaggaattaccagcatacactccaccattgccatcaggagcccttgctacctagttttcaacagaatgttgcaaaagatgtcattaaccccagaaggcaagcaccattcaagcaagtttattatcacaatacttgtattttgattagatagtccaatgctggttcacttgcaacggaatgatggaagaatgggagatgaaataaaaaaatataaataaagcaaggtaaaaaccttgtatggtgtttccataataaaccttccatcagctgagacacatgggatagtaccttgctggaaaaatgttacctacgaataaagaatcaagtcaaacataattcttagaagtttcatagggcaataggaggtcacatgttgaacttcactggaatttccgttcataataaagaataaagtagtgatccttacttggtcaggctctaagccaaaatatctgtggctttcaaaaaattttcgagtcgcttcatcagtaaaggggctagtcattatataccagtgtatttgtggagtacctggggttgcacaaagttaacatgttgaacatgtgattttttaagaaagagtaaagaaaccattaatggcatgcttgactaaattaccatcagtggactgagcagccagcttctgtatgcacaaaattcgttcagcttgaagttggaaaagtgactttccagatggaagcccgatgcctgagcagaaatcagaggaaaagaacaccatgaatcttaagatcactgaagactgaaagcagactaaaacgtaggatattactccaaaaatactctataatcatcaacacaacagaatgaaaaacaattgcagtatagaataccagcaaaggtttttctcatgagtaaaaaagtttatttttatattgaccataggacaataaggagaacatggaaaagttaacactgaaacttcctgttgaaatatacaatgagaaaataattctaaaaaatagtagggtaccaaaaagagcatttatctgtagttaaaaataaataacattaatggcacagtggaagtagcatgcaacaagataaagtatgacaacttactgaagcatcccttaggatcagaactgccaagccttgttccctgtccgaaattggagagaaagaggatatgtgagatttcatttcctgctatgcgattcatagatcttttccaatcatacttttcaggagttttgagagtacctgaccaccagccaaaaggacaacagccaatttcccctctgaaatggctttcaagcccctcttccaccacctctgcttgtcctcaggagttctatcttcgacggtcgagacactcgactccggcacaggctcgacggctggcaaaggaacacctgtgctcccgagcaccatcacatgatcagaattcagaaaattgcacacgttacatgggaaaatgcctatggatggatgatctcacaccttgtgatctgagcgagcatcggacgatccggtcaatcctagcaagatctaggctctgaaatgcagttcacgaagttgagtaagccaaggtcaatatctcacgatacacaaaaatgcattgctgtcaattcaccttgtgcatgagatcacaattaagctcaatgtacaaaggcagcaacagtgggctgtgtacatccattgtggatgtagaggccggattttaatccattttctaaaaaaaaaaaacaaaggcagcaacagatgatgaactacgaatacatacaaggatcaagctaaagctaaccagtaactatttcaactaggaatttctccatctccatgagatcagctgcgcatctgaattgcgccacaatcgcaacgcaaaaaaaaacaaaaaagaaatctttaccaaacattcgatcaacaaacagactagtgtccactcaaaacggaatctttacgcagaagtctcaactgagcaaccgaatctaaaactctaaaaaagaaaacatcaaaacgcgaggagaagcagcagcagcagcagcaggagcaagggatctcgacctcgatgtcccggacgaggaagtcgcgctcctcgggggcgagctcgtcccagagcgcgaaggcgccctcctggccgtagtccttgagcctctcgaccagctcctgcggcggcgcggcgccccacctccccgccggcgccggcgcccgcggcgccaccacgatctccgccatctcctcctcgagcgagagctagagcgagagcgagagagatctgcgagcgatggcggatgggcggagactatgatgagatgagagtatgatccaatcttggggagattattagtaggagagaggctgctgctgctgattgggtcgtcattagcgtttgtgcgtgcgtgtcagcgtgagatgaggagaggagccccacatggcaatattagggcctgctcactttgataccaaaaaaaacttactaagttttgtcattattaaaattttagcaagttgccaaaaatttacatagttgtttggcaacttgccaaaattttggtaggatttcttatatagttaccaaaatttgacagcaaactaaatgtaatcactttttggcaactttaccaaaatttggtaaggttgaaaatggcatcaaatcgaacagacccttatttctcagttattattatttttttattaaacacagtacaaacgcaggagctcacaacgcgcaccccatccataaatgactgggccggcatatcttgagattgacgaagtcactaataattagccctttgagagcaagtttaatagtatagccaactagtaactctaaatcacttatagtcaacttaatagtcaattcatacaatggttacttataaactgggcatttgtaaatttgccaccagtttttttaaatattgaaggatgtcgaataacagttctagtggtatttttgtaattttctagtggtaattttgcaataacgattcaaagtagtggtaaatttgcaattgcccttgtaaacatatattgcactattaatacatggtcccaccttttatacacatattgtgtctaggaatccgtgctgcagttggttataaattgtagtccattgttcttctctctcctcgatatgtgtttatagatgggttatagtctactattgtacctgcactgagcatatttggaagactgggctggtatatcttgatatttacgaagtcaccaataattggctcaaaatatgagcatcagtatcaaatttaggatttgaacccggatggactgattctactagtgcaacctacccctagaagactgtcggcatatcttaagattgatgaaattacactaattagtcaaaaaatacgagcattcgtgtcaaatttaggatttgaacccggtggattggttcaacaacaaaaaaacttaattagctgaaaatacaagcatccgtgtcaaatctaaaatttgaatccgggtggactggttcaaccacaagaaatttaaccagctcatgtggtggactagttcaaccacccgtgtcaaatcaaccacgaggaacttaattagggtgtgtttagttcctgaaaaaagttgaaagtttgaagaaagttgggagtttggaaaaaaagttggaagtttatatgtgtaggaaaatttttgatgtgatatgatgtgatggaaagttgggaatagggggaaactaaacacggccttagttgagctatgcttacttcgtcaattatttaatactctctccatttcatgttataagacgttctagcatcgcctatattcatatagatgttaatgaatctaggcacacatatatgtctagattcattaatatatatataaatgtgggcaatgttagaaagtcttataagactgtgtttaaatccagaggtgtaaagttttggcatatcacatcaaatatatggacacacatttgaagtattaaatgtagtctaataacaaaacaaattacagaatccgtctgtaaaccgcgagatgaatttattaagcctaattaatccgtcattagcaaatatttactgtaacaccacattgtcaaatcatgtcgcaattaggcttaaaagatttgtctcgcaatttacacacaatttgtgtaattagttattttttcgtctatatttaatactctattcatgtatccaaatgttcgatgtaacaggatgtaaaattttgccaggatataaacagggcctaatatgaaatggaggaagtatttagggcctgttttgttcaagaaaattttccccaaaaacatcacattaaatgtttagacatatgcatgaaacatcaaatgtggacaaaaaagaaaaactaattgcacagaccgactgtaaatcgcgagacgaatcttttgagcctaattagtcaatgattagccataagtgctacggtaacccacatgtgctaatgacggattgattaggctcaaaagattcgtctcgtggtttccaggcgagttatgaagttaattttctcattcgtatctgaaaaccccttccgacatctggtcaaacgtccgatgtgacacccaaaaaaattttttccccaactatacaggcccttattatccctgattctacttgtgcagtcagtagtgattctactagtgtcagtgtttcatctgaaaaaatgtcactgctttctcagagcaggtacaatagcagggtgtaagctagctataaccatattttaaagagataaaggaagagagaagagcagcgggctacagatctgtagccagctacagcacagacttcaagatataacgtgtgtatgacagatgtgaccaaatattaatagtatagtaagcaactattgtatgaattggttattacattagctatagatgatttagagctagcagtggactatactattaaacttgctcagtgcaggcagtagtgtcagtgttcctctgaaaaatatgtcagtggcttctttcttttcactggttagtgtcagtgtttactgtttactggtggtggtttcgtttcatgttgcaaatgcagtgtttgacttggcgaaagttctaggaacttaaaatgaactttcaccagagtggatggtaaacttatcccaaggattaaaatcctactctactcctataaaaatataaagcgtatttgaattgctttctactatttgtatacataaatagtgtgacactaaagtacaataataagaaaatgtttttgaatatgaatctaataacatcaattttacaaaataaaaaaatatgttctatagattaattgctaatgaaagtattgtcctaaagaaataaaatatcttatatttttattcgtagctgtcatttataagtctttaacaatttttttcgtagaagcgtcgcaagattttcaacaaggtagtttcactataactttcagctcagagaaagaggaaaaacaactgagggggcaatcgttatcttttccatctacattagataataataaagaaatatatttagacatacccttcttcaggtatataaccaaaagttgttatattttgataagaggaagtaataaaataactctatactattgcaatcgcaccattaatacataatacaagctgcgaatcagaattgcatcaaagattcagcattgttgcacttgaatgcactggcacttttactatcccatcgaaacacaattcaatacatgttggccttaaaagcaaaattaaagggctcatcatccgcatggaagaatttatctcaaataattaagacactccatgtgatggcacatcagtgagctagctctgacagtatatggtatgaatatcccagcaactgcacgcaaccaaaaaaagacagaaacaacattgatccctctactcgacattctgttcttgaagctatgttaaccctacaaggtaactctagtcggatgtacattttgtctacaagttagagcaagatacaatcatacaacagttttacagcatataccagattagatcatgaattacaacatagttctaacaataagtaccagacttgggctttcctctttagcatcttagcaggtacatcgtagtgctgcacttttttccttctagggaagtcacttgggagggaaccaaccaccattgtatagtttatctgacggattcggtgctgggaggctggcatggtcgacttgtgtaaagtttctagtattgtcaaaagaggaactaaaacaacttggtgaagcagaataatctggtgatggaggtttattcaagtcatgttgagggaagtattgttcaacagctgaagtatcatccagaacaggaatgtcacctctaagggtcttgaaggcaaactcaatgcatggatctgaccaggaattcccaaatagagatggcacagccagcccagacggataggaggctgcttcaggatgtggagctcgcgttggctgagcgggtgctgtggctggcacattttggtattcaacatttaacgcagagctcacaacaggttttccatctgtttgcatggaaaccggtaactcctgatttgcaacatttctccaaaagcttgtggcaggtgcttcttccggctcaggagttaaagagaaaccaacttgcatgatattattttcagcataatttggctgtaagtaatttgcagtattttccccattggcctgtatttgattcacagttaatgcttggatgaaccgtggctgatcagtggtgctatcctgcatagtttgtattttgttgactgtgtcagctcgtctaaactggaactgattggcagtgttatcctgaataacctgtatatgattcacagtatctgcttgccttgactggaagtgattgacaacgttttccctattggcatgtatttgatccacagttaaagcttggatgagatgtggctgatcagcggtgctatcctgcatagtttgtattctgttgactgtgtcagctcgtctcaactggaactgattgacagtgttatcctgattaagctgtatatgattcacagtatctgcttgccttgactggacgtgattggcagtgttttccccattgacctgtatttgattcacagttaaagcttggatgagctgtggctgatcagtggtgctctcctgcatagtttgtattctgttgactgtgtcagcttgtctcaaatggaactgattagcagtgttatcctgattaacctgcatatgatccacaatatctgcttgtcttgactgagactggttggtaatgtattcttgtgtagtctccatttgaaatatggcgtctgcttggctcgacggcaacagatcgacagtgtttcctagatcaatctgtatttgatttgcatggcttacttgtgactctgactgttcagtaatgtattcttgtatagtatgtatttcattgaaagagtctgcttggcttgactgtaaccgactggcagaactttcctgctctgtctgtatttgatccagagaatctgcttggctagactgcaactgacctgacatgttcctttgattagtctctatttgattcacagtggcagcacggctcaactgtgattgtgagtaattggtaacgtattcttgtctaggtcgtatttgaacaaaataatctgtgtggctcgactgtaattgactgacagcattttcctgatctgtgagtatttggttcacagtgtcagcttgtctcagctgtgacgaatctgtagtgtccccctccataacacgtatgtgattcccggtgtctgcttggcttgacagcaactgattgtcagccctttcctgaacagacgtcatttcagtggaaatgcctgcttggttcaatcgtgacttatcagtaggattttctttagtagactgtacctcattgacaagatttacaccgataagttcatcttcaggctcagtatttaaatcatgagtgatcttcagtgaagctaagcgaggtgatgctcggacaggcatggcaaccatttttgcagggacgattttatgcttcttgggcttccctcctgcacttggctgttttctttttctcggaaaagatttcttttcccttggagcatcaactttgtaggcatgtttttgagatgctatcatgccctccaactcgggcatcttttttgggttgttgagttctctatatggactgagctgttcctcccacggcagcatgagaccttctgaagttagcaattcacattgaatggccttgtcggcggtacctggccttgtatgttgcaacaatgttgctgtctgattttcacaaaatgatctaataagtacaaattgttgtgaaaaggggacatacaaaaggaaatttttgccatcttcaaaacacaactttggccacaaatttctatttaaatattttgttagtaatttttaggcagatctgcacacatgatttccatgtatctaaacgacaattattcaagactggagggagtagagtctatagtaaaattgaattcagaaggaatcagagttctttatctgatgtaatagtgcatgaaaactctgattctttacgcacgcaaagaggggcaaccaggacaaggagcagttgacacttcacatgtggctgatgtctgagctacaagaaacatataattactagggctggactctataaattttaaccaaagcaaatatgttcaatttgaggtgtgcatggtaattaagatacctagtatttttgtttatttaatgtcctgatagaagaagcaaaatgccccagtaactcaaaccaagaagaactgcaaggaactcacatgagattggttttcaatagtacaaggatcttggatagttctctttcttggccttacaatgcatttatagatgtcccctgatttaagaaaacggtgcacatccttcagagagcgaaattcatatccactgactggatcaatgtagtactgcagagattaaaacaaggcaaaaataagtttaagacacaacattcctggaatgccctgaaggctttcattattaaaggatcacaagagctagcaatgcaacatgcattataaagtcaacaaggggaacagtgcccgcctaggctgacaaactgatttttcctgcttaggcagtcagtaactcgccttggtggctgttggcgctaggtgctggcctgccatcatacccgcacctagcaccaaaggtaacactgggcacgctaaaatgtaggttcaactgacaggagcacaggatatgctcatataaaaatgttcacgctatgaaatcataattgacatttcaaacaaagacatgcttcaaataatatcacaagtaacaccagcacccacatgtgccacggaagaggatgactaacaaatttggcctccttggaaatgtggcggttcagaacaaatgagcttattgtaaagatggtaagttaacctatggatacgacaaaagggaacttttgcaagaaacacacaggccctatattgcttttaactgcttttcttattgagatggtcgcatacgacagcatacatgcagcacctgtagaatatatttcttgggtggctactctacctcaaaatagaaccaagatgcaagtggaacaatattgctggttgcaattatattaggcatagggtattgttgctgcacaatattgagatgaatatggagagttgaaactcagcttagagttcttgagatattaagtgcaagtatccatagacatgctaatgactttggaccgatgcggtgattgtgctgcagtatggaatctggttctttactgattctagtaagatttagttgtcacggctccaaagaaatgagtgtttcaaacaacaattactcccaccgttcaaaaatatagtgtgtattaggtttcattaggacaaggctttgaccaaaaattactctgttaggatctcatttttgtgataaaaggcataatcataattcataagtacttttgaatacaaatctaataacatcattttttttcatataaattatactccctccagtttgcacatacttgccgtttcggacaagacagatgtcaaacttctaaacattgactatgcccttctaaaatatttacttcaaaaatatggacaccatatatataagattaatcttgaaaattacctcaataaaatcatatattgttgatatttgtacttttgtacatatattgtaatagaaaacagaggtcaaaattgttatttggagaccatgtccatgtgcaaaacaacaagtatttgcaaactggacatgtcaaagccttgtcctaacgaaacctaaacaccttatattttttaaccgagggagtagttcacagttagaatcaaataagcactttgaaccgagccttagatgtattgttttaggcagaaattagcaagaaaaaagtaacacattgcagcataccggatcagtcttcagatttgatccattcttccttggtctgtcctctttccaccatccatcaggaagcccatcaacaattagatcatcctttctttgaacctagcaatgaaataattagagctagttagatatatctttttcagataaggagtaagagaaaatggatcattacagcataccagctcattcttgtgatttgatacattcttttccgcactgttttctttccattgtccaccgggaagcccattgatgcatgcttcacccttggtttgaacctataatgaaataacaagtatattggtttagacagaaaggcgcaagagaaaaagggtcatgatagcatgttgtttactcggtttagatagaactcagcaagagaaaaaagggtcatgaatcatgacagcataccgggtcactcatgtactttgacccattctttgttagcatgccttctttccaccatccatcaggccccttcatgactggtttatcactattttcaacctaagaataaaataattataatgacaaagtgaagtgttttagatagaaaaggcaagacaaaaacaaggatcgttacagcataccagattactcttgtgatttggttcattctttcctggactgtcctctttcaaacagtcatcagacagcccattcatggcagcttcatccttgacttgaacctagcaacgaatatagagtggtcatcattgacatatatgtcatgttgcacttggaacaaatgaaaaggggtagatgaagttagaaatctgcataccataaagggctttcttctgacaagcccacttcgagttctagagcatgaactgtcactgtaatccatctggatgctttctctgacaagcccacttcttgttcttgaacatgacccctctttggaacccacaatgatgtttcctctaacaaacctgcttggagttgcagaatatgaaccattactggcagccacagtagtgtttcccctaacaagcccacttcgtgttttagaggatgaaccttcactgaaattcataatgtcacctcccctaacaagcccacttcttgttttagaggatgaaccttgatttaaacccacaatgccatctcccctagcaagcccacttcgtgtttagaacatgatccctcattggaatccaaagtggcatttcttctaacaagcccacttcgtgttttagaacataaatctcccacgttggaatccacaacgccatttgccccagcaagctcacttcgtgttgtagaatatgaaccttcattggatctcacattggtgtttcccctaataagcccacttcttgttttagaaagcgaaacctcattggactctacagtgctgtttatcctaacaagcccacttcttgttttagaaaacagaacctcattggactctatagtgttgtttaacctaacaagcccactgcatgttctagaacatgaactgttgctgtaatccataatgtttttcccctgacacttggtgttctagaacatgtgaactcctgtggaggttacttcagttcacaaggacctgttcaatcacaacaaaatataaataaataaaatttcctgaagccacagaagagaacaataaattcattccataaaatcaaaatagtctgatgatgacgatgatgcccgattatttgtcaggcccaatgttttcaatttgtccgactaatcgcgattagtgtcctggccggtactaaggtggcttgattctaaccacgattagttggaaagtcactcgattagttgttattagtcactattagtcatcctagtcagtattgaggcgactagactgtctttccaatttaaacacattgctcagaactaatatttgaaaaaaaaaagctaaagaggtactgttacgaaaatactttgttcattaagatttgcagagattaacgatgatgataatgtttctggattaccactcaagtagagagaaaattagacaagctatatggtgcacaaatcataatttagtacgacagataagtaattgaggtggtcgcatgtcttagccttcataaggacattctttccatctttctgtgcccaaataaggaaaacaggcttccaagaaattgcaaccttctgcagccccacttagccttatctatcaaaaaagggaagccatactattaaagaaacaagttattctcctcgatctcccataaggttagaaatccagtgccactagtcacttaaaactagtagtccgcaattctttttttttcctgatgggcgcataaatccctacctattttccattggttcataggaaaaaactgttcatagcttaagaacgagcctcaactcaaaaaccgtgtggcacaaactattaaaaataacaaaaatatagctagtggcggacataacgtggggatattgggtggtgtggggcaaagaggggaaggcaatcggatccccaatttctctcttttcttttcttgagatgccatggagggttaacactatcacactacggcataagcttgacaaatccgcaatcaggttaaatgattcaccgattcagtggagtagaaagcctctcagcgtgccacaacacaatttcccccaaaataaattcaaacgagctagggataatcaccataagaaaatcacagaaatcaacaacgtccgggtggattcccccaactttacccgcgacgactactccgaggcggtcgagaggatataccttcgaggaggaggagtccgcggaagaagcaggaggaggagcacccgcacaggcacgcccagcggaggaacggatcgaccctccctcgcagcagcagcgggagaggaaaaccctcggaagcaaaccgagcggcagtcaacgaagggacggaccggagagaagcggatgaggaggaggaggaggacggggtgggggggcctcgccgtcgctggccgccgcggctagtggtcggatggtggtgcggccatggctagggttagcgagcgcgcgggggggagcgcgtgcgtggagagggggttgaagagaagaaaaaggagggagaccttttttttttttctttttaggcttagcgaagaagaagacgaggtgggtggtggtgaggtgaggtggtgacttgggtgagtgaagtgaaccagtgaggtggtgtggtggggcgccacgtatgcaacgttgaagtgtatgcaggctcactgttactctgatgaacccacttactgacagtgtgcttaccagaagtttcacaaaccaccggggccgaggttatcgcgctcggccctagcggtaagcatggttaccgtgttaaccatgaaaaactgtatgaaaccgtgcaaaatttatcaaaaattcaaatcattttttaaatttatttgaatttaaggaggttatcgcggtttttctattaccgtacccacgcggtaaggccggtaaccgcatgcttgccgacaataatgtaaaccctggtgcttactggctgacacgccatgtttagtcgtcgtagcaatacttaggcttccttcgcccaagcaaagttcgaaactttctttcctctacgtttactactgcgttcgattgttgctttttaggctgtgttattctcccttttttaaactcacccctcttttttccgcgcgtatgttttttcaaactgctaactaatatgttttatgtaaaagttttctatagaaaatttactttacaaaatcatattaaactatttttaaagctcttttaggctaatacttaattaatcacaagttaataggtaacccgttttccgttcgggaagactaagccatagatgaggtacaatagcatactataaaccagctataaacgcatatcgaggagataaaagaggaaagaagaagagcggtgtgttacagatttgtaactagctgcagcacgggttgcatgaagcaatgtgtgtatgggtgggaccaaatatcaatagtgtagtacccctccgtcccataatataacaaccgtgttcgctagaggctgttcccaactagaacagtgcgcacgaaaaacggaacggtccattagcgcgtgattaattaagtattggcttttttttcaaaaatggataaatgtgattttgttaagcaattttagtatagaaactttttgcaaaaaaaaaacaccgtttagcattttaaaaagcgtgcgcgtggaaaacaagagagatgagttggaaaacctgagataagaacacaacctaagattggatgggatatttcatagtgcaataaatctagacaggaggcatgtctagattcgttgtactataaaacatccaatcatgttctaggttactaaattatggaacggaggaagtatatgtttatagataagtattgtatgtattggctattaaattaattatagatgatttagagctaataattggttgtactattaaacttctcttagaggtcagttttgctgtcacgcgaaacaagatagaccattattagcgtatgattgatcaagtattgattattacgaacttaaaaatggacttgtttaacttttttaaagaacttttatatagacaacttttgtaaaaaacacattgttcagtagtttaggaaacgtgtaaaaaaaacgaggaagttgtagcttagatttggagctttagagcagggaaaaatgatgcactcgttatcttatactccctccgtcctactacaagtataatataatacatacatgacatatatactacgaatttagacaggcaattgccatattcaaattactttgtgttttactctattctaggcggtgctcttttggaggggttcgcaattaagtagtagctacaaaatttttttgaaaaatggattaatatgattttttaaagcaactttccaatataaactttttataaaacatgtaccgtttagtagtttgaaaagtgtacacgcgaaaaacgaggaagatgggttgggaacccatgggaaagaacacagcctaacccaaacacctatatatctcaccattataatttctaaaaacttatatatctctaaccattaatttctaaaattttatatagttttaacatcggtgctccaaggacagtggatgcaccaacggcacctgcctgctagccaccgccggcgctgccggaggcgaggtccctccggcgagccggccggcgatggcaccgccgatgcatgctcaagccacctacatgtacaagatgcttctgtatgtgtagctagcagcctagcacactgggctgacaaataaaaaagatgggtacctgtgctgctgtgcggcttgcaaactcgcatagagaattttagaatgagtacgagacatcctaatcttattatcaccatgaatcttattgcaaaatgtcaagctgatcaaattctgtcacaccagtggcaggcagcctagtacaagccgtcaagagtttttctcaaggtgatcaaacgctggtcgatctgcatgctcttgtgatacagaaagagcgatcgatctgacatgcccatgttttttttcctttttttgcaggaagatcaaggttcatgaggctagctagctcagtgcctgaagtgcctgacgccggtgaagaggagggagacgccgtacttgttgcagcagtcgacggcgtcgccgtccctcatgctgccgctcggctccgcgatcacgccgatgccgttctggcacgcctcctccacggcgtcgttccaagctgtcgttgcattgtaaggaaggcatcaacgaacacgaaaaatgtgattcttacaaaatgtgacaacattgcaaagctgttcttgtagtgtgtgtgacagaacgtgcaaggaagtaatcgttgaacatggtaatggtggttgcaatggtaaaatgtaattcttaaaaagaaaagagaagtatttcatgattcagaacctacggatgctggtggcttggtcataaatcaaacataaattcaactactactgatcagcaaatgaatgtttcagaacctacatatgctggtagcttggtcataaatcaaacataaattgaactactactgatcagcaaatgaattggctcagaacctacagatgctggttgcctgggtcataactcaaacataaatccaactattaatgaagtttgcattatcattttgttttgattgccactatgttaatgttgtgtgcaaacaaattcaggaaattatcagagtccagattttccagtaatgcaacatttgttcttaccgaatgggaagaatgcatcactggccaaagcagctcctttggcctcctctcctgctttcctgaaagcaattctcagactctccagtctgtttggctggccacttcccatgcctaacatgcagttattctgaggataatccacagcatcatgttagtccaccaaatcaacaaattattttgttcatgtagcagaggcaaatatactgaccttggctatcacaatggcgttactctttacgtgctttacacaaagccaggcaaatttggcatcagagagctcactgtcttgaggagctctctcggacactgttgtgaaggtgatatcttcaggggttagatcatcagactcttgagccaaccagccaccactgacttgcctgagtgatagcatcccttttccacttctcttcgcctccagtatcctcaatgtctttgatttccctttgaggatctcaagacccttttctgtatagccgggtgcaacaacaatctcgtagaacattcgcgtctgtccatctgtagggctcctgaattcacggatttcttttgcaagatcctgaaacatgatatagtgtgaataatggtcatgcccaacaacacaagtgtttagaggcaagaagtctactggatacctcatcaattgtcgtattgaaagcaactatcccaccaaatgcactaacaggatctccctttacagccaacctgtatgcttcaagaatatcctgtcgggatgctactccacatggatttgtgtgcttaaccacaacacacgtaggactctcaaactctgatacacagttccatgcagcatccgcatctaagtagttgttgtaagacatttcctgtaacagaaaatgtcatatgtaaacacaagaaacgtcacattactggtacaacatgagttcgcaaagagtggaaatggccagaaacaggttatatgtactgaaaaaaacaaatactaaagtcagataaacatgcaagtagtaaaaatcaagttgaaagagatatttttttgtaagttactatccgtgtttcattttagttgaatgaaaggaggcatgattttctcaccttcccatggtgctgaattgctgttgcaataccaccagcattaactacagaaagactcttgtccccatagaaggcagctttttgatgaggattttcaccataacgaagtgtagatttcagggacaggggcacggtgaagttcggggggaatacatctcctacatgagaacatgatagtgtaatgatatctgaggaaatgttgacaaaaccatcatatataaactagatcattacaaaaagttagtgttaatacctttgttcgattgcttccacaaccattctgagacagctgaatcataagaagcgacatgttggaaagctttccatgctagcatcttgcggaattgctggtcatcttgttttccttgcagatactctaatagagcagggtaatcttcatgatccaccataacaagaacatccttatgattctgtcaggcacaggaacacatcacaattgagcaacaatagaactgttcctatcaatgaacaacaaataccatctgtataaatagatgggaaatccatttacatatgtcaacatgatatcaaatttgtatgaagatatcaatccccaagctaactaaaaagtctcaagaaccaataaatcaccttagctgctgctcggatcatcgtaggtccaccgatatcaatgttttcaatgccatcctcgaaagaaattacaccagaggtgaccttgttatagaatggatacaagttcaccacaaccacatcaaatgtccctgtgcccaaaggaaaaggtcctagttaactgacaatacttcatcacattaactctttacaatgttcgagagaagataagtcagtaacacaaatgaactaacaatctcaccaatgccatgctcattcaatgccttaagatgatgctcctggtctcttcttgcaagaataccaccatgtacactggggtgcaatgttttaactctaccatcaagctgaatttaccaaatgtgaaccattggataaaatgaaatttatttgcagtcagtgcaaacatatctaattaagggacaaaactgagtaaccaacaatgataaacgatgctaggaagcaacatatatttcaagaaatgtaggagtaaaataaaaattaggttataccatttcaggaaaatttgtaatttgttcaacttttgtaacattaactccagctgcttccaggcttgatgctgtgccaccagtcgaaataatagaaaacctacagtagcaaaatgtccataagatgatcatatactagattgaaaaagaatcaacagtagaaatctaatcatggttcatcctttataaaatcatgtttcgttatcctgatccaaattgtcagccttaaaattatgcagctggggaagataaactgcaagaagcttattatggcgaataaagcctaactttacaaaagggcaaatatgataatttactactggtctactgcttgatataggaatttgatatacaacaaatagttccatggtgatgatgagagaagctttaaagcacaaaattcaaatattctaaagtgaacttgacagcaaaaccacaactgttaaatataaaaccgaaaaggggagcatcccacaagatgaaaggtttaccccaaggcttgaaggccattcccaagataggccaagtctgttttatccgacaatgatatcagtgcttgtttgactcctgctgtgttaggaacttattattagctcacacattgaaatatatctttatgtcaagaatgagaaaacacaaaaatcaatgggcgtatagaaatcaacaggagtacagggccaaaattgatttgttcaaaataaatctaatcatggttcaaaataaactataataagaagcttattacagagaataaagcctaactttgccaaacagcaaatgataagttcactgttcgatataggaacttgttattagctcacacattgaaatacatctttgagcatgctgcatgaatctactctttgagagaacatagaaaataatgggaatagaaaaaacaacggcaccaaatttatctgttcaaaacattcaaccaatataaacagcgcaacaaatcaaacatatctacatggatttctggatggaactaaaataaaccagtacaaaaggatctcaacggaacatagtcatcaactagaatatggcgtgcaaagtgctaaattttaaaattcacacgtatgaattttatatcgaatggtattatacaagaatataggcattgaaacaccaaagccaactaactgttgttaagcatgctgcatgcatttaagcatttagaacacacatatttgccccccttaaaaaaattatactccctccgtttcaaaatgttt

SEQ ID NO: 5860 - DNA, 4839 bp, Oryza sativa
ctctcagtttcaattttacttgtcgtttcaatttactggttctagtattcaaaattttgtcaaaatatttatcattttcatattccaagcactttaaagatgtttttccctactattcatcaatatatccatactaatactactcctcacattattttaggtaaaattggttaggatttaattaacttagcatacctcctgtttaatttgagatttatgtataacgataaataaattgaaatgaagggaatactaattaacggactagagagatatcttcatggatggatgtttttttctgaaacaaattcatggatggatgtggattattcgtgctacccacggttggttggtccctttcataattaaggagcttaactctctctatatatagtcgcagttcttactattacattaccacttctttatagggattttctaagatccatgttttactttagactatgtgtatatatgatgacaatatattggtgcgtgattgtgctctgacgatcgaatagctcaataagtcttctcgtaacattgtacaagtgcaagcgctggtcacatacatgcacgcacaacctacccctacctctgtcatgactcatgaggacatccaaggaaatagggtcgtcacatctcgagattaacaaagtcactacatatgccttattattaacgggtatgttgtctagctatcatcgaaaaaataattagccataagtacaagcacttacgttgaatctaggacttgaatatggatagataagttttatcacaagaaaatctaagtagttgagaactacgcttaatccaaatcaaaatagacgcatacgtacgtctaaacagattgaaggcctgaacttaattatatggcccagtctaagatcaattgaaaccaaatgatcgagcaaggcgcgcgcggttacaccacgtatagaacctaaccgtgcatgtgttttatagtaggacttgatggattaatttttctcttgtcggtgcgtggaattatccggagattatatccacgtgcaaactaatacctaaccaccagccagtccccaacaatatactcccttcgtttcaaaatatttgacatcgttgactttttagcacgtatttgaccattcatcttatttaaaaaatttaagtaattatttattcttttcatatcatttgattcattgttaaatatactttcatgtacacatatagttttacatatttcacaaatttttttaaataagacgaacggtcaaacatgtactaaaatattaatggtgtcaaacattttgaaacggagagagtatatcagctggccaaatgacaacagatcatcgtcgactttataacagcagatctcgaggaaaattaaagcgttaacaaagtgtgtagcaagtttctttcacgtagaagtagaccacaatgcaaaaacatttggaatcattcgatgctttcatgtgcccgcgagatatcgatcgatcgatcgatcgacattgcagatcgacgtacgtacgagagaaaaggatgcatatataatgtcgtcgaaaccgacctgatgcaaacacgtctcgtcagagagagagagagaggaatcaccagagaggggatagaatcgattccttgttccaaagcaagcaacgtacgcagctagctagcagctgggtgcacgtacgtacacacagcacaggtcagaggggacaacatggctgtatattgtagctttcggcggcgagccaaaagctagcttgattcgtatgtgtatccatccaatgcgaccgtgaatgaattaaccggtcatttgctgaatttgtacattcatattgcatgcgtgtgcacatgcagtacagatcgatcgatcgatcgagcatctgcaaatacgtgcagcgcgtgctttccttccttcaccgctgggagatgccagatgccccggccagcgacgccacactgtcgagaggcttcatgagcgtttgttccgaacagaattaaacatattcccgaatattaattagacgttcgacctgatgattctagctttcgtctacatgtacattgtcaaaactaaagcaagtccgaagaccattactcctcttactcctctcctctgtttcatattataaatcgtttaacctttttcctagttaaagttcgctatgtttgactaaatttataaaataaattagtaacatctataacaccaaattagttttattaaattcaacattgaatatattttgataatatgtttgttttgtattgaaagattattatatttttctacaaatttggtaaaacttaaagatgtttgattaagaacataaatcaaacgacttataatacgaaacggacgaagtagctagctagcaggctatatattgatctactagctacctctgtttttttagtaatcgacagtaaataatattgaataaacacacaaaatttaaccactaatttttttccttcagaatttataaaaacatgtgattctgcaccactgcattaaaataaaattcaaaatgattctaacagtatgtgctttagtgtacaaaatagaataaattagtgttcataaaagtttggataggagaatcctctgttttcaaatagtcagtgatttataattaatgcaagtgttaatatttgcattgtgaaaaatatcattttgtttgttgtagaaacaatacaatgatgcatgcaatattaaggacaatttaaatgcaggagtaaaatttttattaaagacaaagttatatgaaggaaaataaaatggtaggggatcaaaaaccatttttatgccattatatttttaataactttaaggaatacacagtattaaaaaataattatcaaatgttattgtttcccatgttagatatgtctagaacgactactaagatagtattaaatacagagatataaaggaagtctccaaactttttgtttgaattacaaacccaagggctaaagtttattacctgcatgttaattgaaggaaaaatatctgcctcgtactgcactgataacgtacagtggattgagaaaatattaattttggattcatctactagatttactagctcttacaagaggattttcagtaataagttagcactggtacttaactagcgaataacttcgcaaaattctgctagtttaatttattttcaaacaaggattctctctccaacttgtcaacaaaatagcactatatagctgacgaactcttacgttacaacattatagtcgcagggtcatcttcttcttttcccctttcgaaggcattgtcactttgtcagccttctgctagcctttggacttcaaatccagcaaccatctgaaaagttaaatggcaagtaattcagaaacagaaaagcatatctgctttgttaattagtttgttctggtgatcgtagtgcgcgtgtgcgtcgatgttatatatatatataaacacatggaggggtcgatctcaataacacacaccaacaccaagcaaccgaaacaacttgaagctatcgctagcttagctgcagctcatgcaataagctaattagaagctagcacaaagtatacgtagtaacagcaattctctgatctcgatggagaacaacaagaacagccagctgcagcctcctccaggtgaccattgatatctattaattgctcgctttctaattaatcttcaattaattaacctccgtgtatacatttgtatgacaaataccacaagctagttaacccatctctctctttatcgtttaaacttttaattgttcgtccatctctgaaatctaaactagctgtccgattaatttgtgcttaactcgcttgaactagagtactcgtaatcatgtgtgtttgtaggttacccgaggttggattcggagcagcaggcagggaagaagaagggacgctgctgtggatcatcttgccgccgttcaactaaacgtggggagacgagctttattgaaggatggtacgtatatatacagtatactccactactccagaacattatatatatattttttagataatcagaacattatatttgatgccatgcattaattctgagttaattaatctctgtttcttctcatcctggctatagggttttttttaaaaaaattttcccatcttcaagtgcgtatatatgtcacttggctagtggctatttaattactgatgtttcttattgattgattctgatttatatgcgtttgttcttaattttttcagcattgctgcgctctgttgctgctggctctgcgagctgtgctgcgactgaagaagggatatatatatatatatatatatatatatatatatatgtatcacatatttgctccagatcattgtgaaaatcgagggttgttaattatatacgcatggacgtctgtccttatacttgtttagatgagtttgttcccaatataatgttaatttggcgtaatatattatatatattgtacttctctcatgcagtacgtatatagagtatatagtacgtcttgaggcatctatatatactttcttcccttgttattattgataatatatatttatgtatcgactgtcgtacacaaaataagcattttctacattcatgtgaagatcgagtgccctctgtttttaatcatatgcatatatgctcctcttatagtgccctctgcacgcttgagagctctatcgatgattgtcggagatatgggcccgggggtatgcgaagtgaagggaagttaccttcccgtccagccacgtggctctgcaagctggccccactctcgcacctcgcgagtcacgaaagcggccgggggggggagggggggggggggg

SEQ ID NO: 5861 - DNA, 968 bp, Oryza sativa
  unsure (1)..(968): unsure at all n locations
atgcgcttttgaaattctactttcaattgccagtatattagtttaatgctgatgctctcctttttttaatcttttaaatataatttgacatggtagttttatacctgattgacacaggctagggaatatgacaacaaacagtactggtgatctccgctcggcaggagtggtccaagttttggatgttggatgtggtgttgcgagcttttctgcttaccttcttcccctagacattcatactatgtcatttgctccaaaagatggccatgagaatcaaatccagtttgctctagaacgtgggattggtgcaatgatctctgtgttggccaccaagcaattaccttatcctgaaaatgcatttgaaatggttcattgttcccgttgtcgtgttgactggcatgaaaatggtaaggtttacaactttaaacactgtttgtgtcaagctatgcagccacatttgacttattatgactcttgagattttgattgggcaacatagttttgtgggaacattcagctatactatgctggtgctattcagctataacaagttcatctaaaagtttagttgctctcaagttaaaaatctctgttctacattggtgctcttcctaaaatgcaatgatcctttgtttcaaaattttaatctgaatacataattcatattttgctgtatgacttattttcagatggaatattgctgaaagaggtagatcgtcttctgcggcccaatggatattttgtatactctgctccaccagcttatagaaaagataaggactttcctgttatctgggagaagttaatgaatataacaacatcaatgtgctggaagcttattgctaaacatgttcagaccgccatatggatcaagcctgaagatcaatcctgccgacagaaaaatgctgatacgaaactactgaatatctgtgactcgtatgataattctccaccttcatggnagaatc

SEQ ID NO: 5862 - DNA, 2558 bp, Oryza sativa
  unsure (1)..(2558): unsure at all n locations
cgttgtcactggttacagtaatagtggcacatggattcttcttaaccttgttggcatgctctctattttcttgtgcttcctcatcatcttcagatctctcctcatcatcttcagctataccatctgtttcactagaatcttcagcatcactatgactgtcatattcttcctcaatgtcatcttcaacatcactgtcatcactgactccattgctaagcacaacattatcatcttcgttgtgcttgagtatttcagcatatatttcagctacatcacccatgattatgcattgagccatatataagcattccttatcatctgatagtgctttcaggccattgtttagttcagcacccggaaataaccaatggaaaatcacttcatcttcttcacttagtgaaacatggtctccaaggtatcctctgatctctggcaatgccaccttgtccctctctatgtatgacatctcagtttgaccaccattataaaccacagaatatccatcataatcaaattccccaccaaagtgaaaccggatacaaagtacatccaaattatccattacacctaacatggcaacaatgagatcatcagtaaacttatcttaaaaaatgaaacattaatcaagcagcaattatctaccaaatcctaaacaactcatcccaagataaaataaaaatcaaccaaaaaacagtcccttatacagtatgaagtgagatagctgatgaacaacaacttatgaagtgagccaccctcgccgggcgtcggctgccacccatgctacatcgtcgatggcaatgatttgctccatttcagcatttccactaggtatgatgcctgcggtgcatgtgccatcgctcgcgacggcttcaagacgcacacgccgagcgccggcatctgacgatggataatgagctcgcaagaaaaaaaaacagcaagggatagcaacaacctaaccctcagtagtgccctaccaccaacgaaatcaaccaaaaaaatttcatcaaccaactgccacacgcacttattatccccttctagaacaaccctaaacctaaagcatgccaagatcgagtggggaggagggagggaggaagggagggagggggagggacacaccacggggctgcgatctcacggatcagcaccgcctatctgagacgatcatcacctggattctccgccgtcggaagggagagaggagatgatgagaggacttgtgagggagaagagtccaacgcatggaggagaatacgacgtgtgattaatctcccaggttctctttctccacgttagatccaacctagtaagcaaaaccacctaatccatgtgccacatcagcaaagcggtttgtattagattagaaaggtgaatagtgatccggttttaagaatctagggggttaagtaaaccaaattaaaggttagggggttatttgctccagggtcatacttgaggggagtaaaactgactttttccattgggtaaattttgctcactaaattatttccagctctgaaaagttacatcgatgctatcctcatgtacatatcactcacattgattaacttggaagcagggttctttcaaggcttcatttttgtgcaaatttgcctaaagtgaatactaaggcatagggtttaatttatctttccaatgtaatgctcatgaaactaatgtcttatttcatattactgaagaggtttcaaaaggtgaagtcatgctgggtttatccatagtcaccaaaagctgagcgcttggatcttgtctttctaagagttgaactattcactaataaattattatggcattgcccttcatggtgctaaccgaagatcatagaatatagacaagcaatttgtgagggtaatatttttttctattaattttctatcaaatgatttgtaagcatggaaatattgtgtttatactcaaagtgtgaaaattgaagagtcagcaaggttactcccatgtttgtaattaagtgtccattttatactgaacaaatggaatttctaatggcatatatgcgtcatagcaatattgcataatagttttttatatataaatgaggtcattctgaaaataccgtatttttagaataattagcaacaattgttgtttgatttaacacctatattgatgctttccactgcttcaccaataactgatgaaaaaccaaattaagaacctgtcgttgataagaanggcttaaantttggcatccctttttttnttccgttataccaccattccacttatggaacttatagtcccacggagtaataaggaaatttgccaacggaaggccgacaatggcccgccccttcttttataaaattaagatcaacctcaattcactccctagccataaaattggggaacaccttaaggtcaattcaatctccggaatgtattatactccacctttcttatttattgaggcccttatacctaagctacaatgaaggagccacctttcttcctattatatttcttaaacctgccgcgtggttatattatcatttaaatttaaattaagcttcaagcctcccaag

SEQ ID NO: 5863 - DNA, 4743 bp, Oryza sativa
attcgcttgccccacggtgcaaggtgatctcaactctcaactgacatctttaatctcaactaacttttgatcctaacaattcaccaatagaaccctagagaaagatactaatttaaacaattgcctagtagttcaaaggtccctcggtcgttccccgaacttattttcattgttctctaatccccatctcgatggctcaatctttgttcactatgagttcttccacacacgcatcctggccctctaacgagcatcacagccttgtggcaatgtatgatccgccccacacctcagatatctggcatcacagactataccagatccactcattagtgtaggcatctcctttgcctctagccaccaccatacacctccccccctccttttctaatccaaacaacgcaaatcaaggtggtgtgtgggacggcaaactagctcaacaaccagcaatcacgacggtggcgggatcctctaggcaagttcctcatagccactgtcctcctccctttagatcctctctctccacccactgatccggccactgtacctcaacaaacatttaacctatttgaagtgatgtgtggtttaagcctaaatggcccaaaaatgttgtagtagtggcggtttagtacactacaagagatcttatgataggtgacgtttcatttacgtcacaaacacataaaatttcgtcatatttcgtaatctgtgacgctcgcgtgacgaaaattcattcgtcacctatcatgcgtctctaaaggcgttctatgacgaaaccttcttttttcgtcattaatctagtgacgatccttctatcgtcataactttgtgacgctcatattcgtcattatctagcctaaaaaacgtcatgagattccatatggcatgatacggcccatgtagtgagcaagctgtttttgggctaggcctttttaaagcccatatagtgaaaaacctattaatgagttaggcatattgtaagtccaattagattttaataaattcagcctaattcatgtatattgaattaaatattgagtgggccatgcatattcaaaaagcccagtaggcccaagcattgcaacaaaatagcatatgggccatgcttactcaagaagtgtcacgccccgaactagtcccgaccggaactagcccgtgacgctccaaattaacctgttaatcgataccagtcccaggaaacagtgctggtattacagggagacagaatatcacagcaacagaggtctctttattatagagtagatgtacagtcatgttgggctgcggacagatcccgagctcacaactgcattacaaaaggaaagcggaagccaggacttggaccaatcaacacaggcgcgacttgggaactaggccgaaaccctaaaactcatcgtagccggcttgctcctggaagaactcctcatcagcaggatccgcttcatcttcttcagcaactggggggggaattatttatatagagcaagggtgagtacgggagtactcagcaagccatgggaaataagtgtttaatgcaggcttcaaggaaaggctgatgtttttgtaattaatttttatttgaactcttttctgaaacaactaagtgagtgcttctcaaacgacacggatgagacagtgcgtctcatccggtcggagtatgtgcaatgtatcagtctttagaatttaaacaaggttggcacccggccaacagctttttcaacggccacccgggccaacaacttttcaaacggccacccgggcctagctgatcccatcagctgcagatttttcaaacaccgaaccccttttcacacagcaatttcacaagcagtagtcaaaccaaactacgctaggaatcacctcacatccgcccatgaccgtgggcacggctgttcgaacagtttgttaacctctgcagagggggtacactttacccgcacgacattactaacccggatcacccagcccgtggggatcagccacgtcgggagacctccaagctttcatgacaaggcatttccaaagccgacacaggtttaccatacgccgacgagaggggtcccagaccaacaacaggttaggtcccagaccatactgtgccaggaagcccaggggtcctccccgacaccaccccggcgaatccacatgtctctcggcatcaaggctcccctgataagctagttactcagccaggggtgtcccattccacccatgtggtcgtacttgtcttatgtttggatgaaattccaaggaatcggtccttaagtgcgagagcgggaaaccgtacacccagtacgtttcccggtccgcggttttggaaatttatttagttcgcaaagaccgacccaggtgtcgggttttccaagtcttttgtaaaactccagttttacccaagttattactcagattttaagtttgaaggcgaccgtcgatactggcacagggtgcacgaatatcgaggcgcaactggatggttacaaggggacatggtatagcaattaacaatggaaggatcaaatgcaacaagttaggtaggtctgccaatctgccttgcagacggaacaacagattaagtgcaatcctatcaatgcataatattttgcaagcaatataattagatttcaaatataggctcaagatgttcaaaggtggcttgccttgctcgagatctagagcttgatcctcgaaatcctcgcactgcgggtcttcgggctccgaaactacacgcgaaacgggacaactcaacaaacggcgaaaatgaaaccctaataatgacctctaagcgtgccattagatagatctcgagatttgaggaattttggaagttgaacggagtcaaacggatctaaggttaggaagatattgaatttctaagattattggattttttggtctaaaggaaaaggatttaattaaatccttttttggaaaagaaaagaaaagaaaagagggagggattatagacttttcctcgggcggctaaggcgcggcccaagggaattggagcggaccggccgagttaaatgggccggccggcccaaggcggcccaagtgcgcgcgcgcgggagggaagagagagagagcgccggtggaccgggctcaccatgcgcggtcccgggtgggacccgcttgtcagcggctcggctcaccgtgcggagggagtacgcggctcatgcgcgcgggcgggggagggacgcggtgcacgcgcgcggttcgcggtggacgcggatgcggcgggcccacgcgcagcctcacggctcgcggtggaacgcgcgcacggggagggactgaccggggtcggctcgacccggtctaggctgagctggcgccgacgtggcgcctacgtggctgccacgcgggccggcgggaggtagacgacgacccggccgcgaatggacggcgggcggcggcggcgagcggcggagcgaaccacggcgatacggacaaaagcgagcacaccggacggttgctcgtgatgaggggagacgagccaacggctcggatttgccggaggaagcttgacggcggcgaatcgtggcggcgacaaccggcggggagggaagagggaaacggtggcgaggccacgaggggtcgattcccggcggtgagagcatctacgcggtttcgggaactcgatgctagcgtcggattggacggagctacgccgagcgaggctggcgacgtgtgggtgctacggagctcgagcggcgacggcggcgagcacgcggcgagcgacgacaacggtcggggcggcgccggctaactacggggagtctactcgagctactaccgaaagctagggggaggagatggagcgaggaggaagaacggagggaggcatcaccgagatgaggaggggcgctgtgacgagaggccgacggcgcgggagtaatctctccggcctcgggccggggaagaggaaggagagggcgcggccgaagtccccttccgtgtccttgctcgtgccgactccttcgacacgcgcaacaacgaacagcgacggcgaacagagcacgggggcggcagctatggcgaggaggcgaaaacgagggagattggaggggaaggagctggggtttaaagtgggcggcaatgtcggtttgggaaccgacttagggcggtcaaggcgcgagctggcgctcggcggtcacggccagagcggcgacagggaggatgatgccggcgggggaaaaggggaaaaaggagggggagaaaggggcttgcccttttgccgattcgggaaaaaggaggaggggagcgggggcgacgcggcagagggaggaggggcgctgcctccgtcccttggcggcttgcgcgcggagtggcggggccgggcggtgacgacagcgatgacggcgggcggtttggagcggcgcgacgacacgggcgacagacgcgtgcagaggctgacggcggcggcgaccgggcggtcggccactcggcacgcgcgcgcggcttgcaacgggcggcgtccgcgcgggcgtgcgcacgcgaacacggcgcgcgggaagtggtagcgagggagcggagagggaggacttcgctcggcgcgggcggcttacgcaggcgcggcagagcgaggagaggggaagggggcgctcggcgcggcggctcacgcgcacgcgcgcgggcggtgcggaggaggaggagcactcggcgcggctcttcgcgcacgcgcgcgcgggcgcgggcgaggcggagcggagctgagcggggggggggagcggagcgcgccggggaggg

SEQ ID NO: 5864 - DNA, 9930 bp, Oryza sativa
  unsure (1)..(9930): unsure at all n locations
tttatccatagtcaccaaaagctgagcgcctggatcttgtctttttaagagttgaactattcactaataaattattatggcattgcccttcatggtgctaaccgaagatcatagaatatagacaagcaatttgtgagggtaatatttttttctattaattttctatcaaatgatttgtaagcatggaaatattgtgtttatactcaaagtgtgaaaattgaagagtcagcaaggttactcccatgtttgtaattaagtgtccattttatactgaacaaatggaatttctaatggcatatatgcgtcatagcaatattgcataatagttttttatatataaatgaggtcattctgaaaataccgtatttttagaataattagcaacaattgttgtttgatttaacacctatattgatgctttccactgcttcaccaataactgatgaaaaaccaaattaagaacctgtcgttgataagatgtgccttaatttttgtcatgcttttttttttctcgtataaccaaccatacaactaatggaactaatagtcgacaggagtaataagtgaaattgcagacaggaggcgcgacattggcgcgccccgtcatctagtaaaattaaaggatcaacctacaactacaatccactagcccataaaaattgcaggaacgacctacaaggctacaatccaatactccaggaatgatttataactccaatcctctcttagtataagttagagcccactaaatactaaagcttaacatgtaaagatgccacatcatcattcactaataattattacatttaaacatcatgcaagcatgttatattatctataattttataatttattaaattttatagcttttcaaatgcttagcctaatgatatgatttggtagacacctctgcattggccaaaatttagtccctgtcacatcagatgttatgacactaattaaaagtattaaacatagactaatgacaaaccccattccataaccctggattaattcgcgagatgaatctattgagtctaattaatcaatgattagcctatgtgatgctacactaaacatgtgttaattatggattaattaggcttaaaaattttgtctcacgaattagctctcatttatgcaattattagttttgtaagtagtttatgtttaatatctaaattagtgtataaacatccgatgtgatagggactaaagttggatccaaacaccacctaagttacaagatcaatcgaccttgtcagtcacctcttcttcctcatcgttgtcggagctgtggacacaatctggtgatggtgcgtgtatggctatcctggcctcttagtcgttgtcgaccatggtgtagcccttctcgtggcgatggccaatggttccggatcatggtctggcactggacaagcttgtcctggcgggcatagagcgtctcggccgttaagcgcgcgtcctcgttgagcttctcctccagctccggcggcaccagagggttgggctcctcttccaggatcgtcgatgtggagggtcctcttgatggccagtatcttgtcaaccagcctgttggccagcagtatcttcccactcgggaccatgatcttctcgccgtcgatcaccgccaccacggggatcggcatcggtaggttcctgttcatcagaaacgccagcggccaccgccttcctcttggtggatgacttcttcatggggccaccgactcactcgccttctcggccgccgtgcctcgagcagagcacgccttcattgatatcttctcactggccaatgccgcctcctcatcctcctcctcggtcgccgcagtgatcacgcgtcgattgagcccaccctctttgccggtcatcacttccgatggggaattttccttagagaatttgatggctcttcttcgtagatggggattttggatgaaccctaacttttcgatagagggaagaggccgccggtgcgtggtagttactaaggtaacataagtgggctatataagttgccacatcagatttgtgcttgtgtggaggagagatgagaggagagagaataaaagtgggctacagatttgtaaccagctacatcacaagctccaatatttttaactatgtgagagagatggatggattatgcattcatgatgcagtatatttctacagctaactattgtatgagtaagctattagatagactataaatgatgttttaaattttgaagttagtagtgggctgtattattaaacttgctcttagagggaagcttaaggggtggctaatgggcgggtgaccaccccaggcgatcaccccccatcctcctatacgttactctccctcccttcctcctccccttcttctcttcctactacaccataaatttaaaaaaaataaaaaaataaagttggaaaaatttatgtatagaaaatactatatataaaaaatatttgaatttaaattcaaatttgaaacaggtatgtaaacttttaacttataaactttgggcctataaactaatatttgaattcaaattcaaatttgaatcgggtatgtaaacttttgacttataaactttggatctataaactttaaatgtatagaagtactatatataaaaaatatttgaattcaagttcaaatttgaatcggatataactcaaattcaaatttgaaacgggtatataaacttctgacttaaactttaggcctataaactttagatgtatagaaatactgtatgtaaaaaatatttgaattcaaattcaaatttgaatcggatatataaacttttgacttataaactctgggtctctaaactttaggtgtataggaaagtaatgcgatgcaaaaaaaaaaaagaacccacgtggtggggggggggggggggcggcggagcggccctgatcgccccgggcaatcgttgcccagtagcaaaaccgtgaagcttatcatagtctgactcgagatggcagtcaccgcctgatcaccggcatcttcattcgctcggatctcggaccatgcaacgcagccgcaccggccaagccatgtcacggcgatcacgccggcgtaggcatcgtcacgcagttgcctgcgtcaccctgttttcgctgccgccgccggagcggatagcggaagctaccgagccgacacagcacgagcaccggaatctccgagccgcgcaatcttaccaatttttagtaaagttaccaaaacagtggctacatttagtttgctgccaaattttggtaactatataagaaatattgttaaaattttgacaactatactaaaattttggtaatatcaaaatttagtaagttttttttttcatcaaagtgaacaggcctcaagtccgttggattggagcatatgggttcaaccaagcaggccaaactttacagcccatcaaggccttgtataagaggcccgccaaatggcccatctcactagatgggcctaaactaaaatcaatttccagcccatcaaatgccttgtctctttagtcgtcaatatcggcccatttactagtatgggctggaaattcgagctactccaaaaatttggcccattccagccaaatccaaacgaccaaacaagcagcgagttcgagagaccactctcctcagatctctaccccatctctcccaccgcttctcagatccaccaccaacacccgcggtcgccggcggccaccgcgcgcgccatggccgcgccagcgacgccgcggctactcctctcgccgacctccaaggacctcatcgccgccgcctcctcctccttcccgtcgccgccctccccgacgacctcttccgatcccgcctccccgctcgacgccttcgcctccgacccggtcctctccgcgttcctctccccgtccttctccccctccgacttctcctccgccgcgctctcctcgggcctcgccgcctcccgcgccgagcagctgcaggaggccatccgcctcctccgccgccacctccgcgccgaggtgctccgccgccacccgctcctcctctcccacctcctctccctccgctccgcctccgcctcgctctcctccctcccctcccacctccacctcctctcctcccacctctcgctcctctcctcccatctctccgcgccgcgcgcacacctcgcgcactcctcctcctccctctccaccctcctctccaccgccgacctcctgctccactcccaccgcctcgtccgcctctcctcccgcctcctcacctccacgccgcctcctgacctcgcccgccaggccgagctccaccgcgagatccgccttctctacgaggagaagaacctcgccggcatcaatgccgtcgacgaggagatgcgcaaggtcgatgcggctgcctctaagctccgatcggaggccagcgctgtgatcgatcgcggcattgctgagtccaaccagaacgacgtctggtgcgggctgcaggtgtactataatctcggagaactgaagccggcagtggaagggctcgtggcgaagtacaaggcggcaggagcgaagagtgtggctgtggcactggacatgaaggctatatcaatggctgcagggggtggaggtggccctggaggcgtgcagaggagtggcacgccacagattggtggcagtaagaaggcggcggaggcactgtgggataggatgagacagtgcatggaggagctgcatcggtcggtcacggccgcatggcagctgcagactgtgctcaccaagaaacgtgttccattcacacaaatgctgttcctcgaggaggtttggcaggtgagacctgatcaatgggctaatcctattgctgcaaattaattgaaatgaaatttagaatataagatgtgttaaagttggtaaacatcgaatagacactatatgaagattttgttgacaatatgatgttcgtctgtgactgtgagtcatgagatatgttggcagccgagagacttaggcagaataatttacatcgatatacctgtaactattttgcagggaacaaatttgatctaagtctacatgtttagttattgatcctatattgtttacacttgagttggcaggtttgcatgatatatcacaatgtaatttgtcaacctaaattggatcttacgatatatcattttcaagtagttgatagtagaaataagtgcatgccttggattagatataatatatcagttctagtcttctagaataatgaattatctttaagatgtcagttggaaagtaatatgaactatctattcatgatgctcagtgttgcaacatatactgagttattacttactacactagtaaacacatatagtcctttctatctcctataacttcctgctgtgtgaaatttatgtgtggatgttccatggtctgtacaatcaagtgctaaatttttcctcgttctaatatttacctgtcaatagtttatacttgtgtgccaatatcttgatattgctcaccttttttttttttttttgaaatttagcattgacatgctcaccatgcgttccgattcctgtttcttgccccactgacaatgagaaaaattgcaggagggtgatcctctgttaacagagagagtatgggatgctattgttaaggcctttgcaagtcaactgaaatctgcctttacagcgtcaagctttgtgaaggaaatttttactcttggatacccaagattgttttcaatgattgagaacctcctcgagaggattttaagagacaccgatgtaaaaggcacccttccagctcttactcccgtagggaaaaaccacatgactgcagccattgagatattccagacagcctttctggctctttgtcatagtcgcctctctgattatatcaatagcatatttcccatgtcaggccgtggtataccttcaaaagaccaaatatcaaggttaatttctcgcatccaagaggaagttgaagttgtgagaactcatgggcatttgcttgctcgtgttctacaagaaattggaaaagttttgcttctcctagcacaaagagctgaatatcaggtattcacctgctactttatagtgaagttatttatttctagtttttcctagggattttgtatgctttctcagtttgtcatgtaaatattagcatatgcgattcttatggaatggtaaatctactactaaactctgatgattttgatttgaaacttgtatatgttacttttacgtcatgacctgtttcactgactgttttgtagattttattctgttaaaaaaacttaagatttttttttctagcagatggttgtagctctatctgtaggtccttattgtgcattggattgttctcttttctcgactaagtttgtgaagctaatcagtcacctcacagacctcaatctatgttcaatatgcactgctcggtcgaccttttcattcacctcaatctatgtacaatgcatttgttggtgcctgtgttattctgttcttaggagctcctctagttataaaagttggccttttcattgagatgaataaaattctggaagttttttttgttagttttgtggttattgggggtcgcagagtgaaataagagagatcttaatctaacccagtgaatgtgtacttgtggggactgctggttgtttccaagaaaatagtgatatcatgttggtttggtgaactaaaatttgtgttcttaacttctgtctcaatttgaagtaaagagagtacagcatagaacttgcattatgaaaaaaatgatgtcctatagtgcactgctgcatgagaaaatgcgactgacgtcttaagcagaatagcagatcatgaaacatggacaacattcgctggtttaagccattctaaaatctacggcatagaagagttggatcaatgtgcctttgctggagagcaaaaatgcacgtacaatctaattatattgtttgctttgctgttggttgttttaccgactgagtactattttcaccatttcctcctatgtgatatacttgcttatttgtatgtgcgcgcactgcacgggttcatttatacacttgtcgtgcagtgcacaactgcaaaatgaccataaattggctgcaggcattgtcttggtttttgtatgcatctgctaggcgctgatgtatattttgcttcaatgcagatctctactggcactgaagcccggcaagttactggcacagtgactccagctcaactgaaaaactttgctctatgtcttcacctccaggatgttcacacacgtatttcaagcattgtgtcaacacttccaaatgttacctctgaaaaactttccaaatcccttgaggccatttatacagtcgcgtgtgattcagtgagccctctattcaaagaaatgtttgatcgtctcggatcatgcattctgaaaatgcacgagcaggactttggaactcatggaatggacgcaacaatggataacaacgcttcagcttacatggaggaactgcagaagtgtgctgtccacttccgtagcgagttcttgtcaaagcttctaccttcatcatcatcccgctcagagaccatctgtaccataatggttagaagtatggcctcaagagtcctcatattgttcataaggcacgcctctctagttaggccactctctgaagccgggaagctgagaatgacaagggacatggccgagctggagctcgctgttggtcagaatctgtttccagtggagcagctaggcgcaccgtaccgggcgctgcgtgcattcaggcctgtcctattcctggagacgtctcagcttgagaaatctccactccttcaggacttgccccctagtgtgatcctccaccacctatattctcgaggacctgatgagttacagtctccattgcagcgtaacaagctcacgccgctgcagtattctctctggcttgattcccagggcgaggatcagatctggaaaggggtgaaagcaaccttggatgactacgagatgaaggtcaggtctcgcggagataaggagttcagccctgtgtaccctctcatgcttcagattggatctgcattgtctcaggccaagggctaaacctgtgttcagttcaacccagcatcacatatgtttgtatcatcatcatgtaggcattgggtacttgagagatcgattgagctttggaatagtttatacaaatgaaatagcatttgcatttgttttttttatggaaataaaggtgttcaaagtacagactctttctcctagctcctattatgttgtgaagtgtgtgatatgattgatcattgtacatctattagtcctgttgttccatctgcctgcttgactacaagcatgggaattttgcatgcgcggcacgctgatcacttgccagttgtatgtatgatctttggtgctaaatcacccgaaatgaaggaattttacctactcatgtgagaactcccagagattccaaagtccaatttgggttctttaaaaaaaattccgtgtaaggcataatgcaattgtttttgtgcagtttttgaggtgtgcaatcggaaaacatatcaatatcgccgttgtgaattttcttttctatttccttgcatctccttaagatttgtgctttatttctctccgtccatgatagtagatggtagtgacagtggacatgtccctaaaatacaagagttagttaaagagggactgaggctcccattggttgctcattttgcctaataagccaatagatagaaaataaaaaataatttataattaaaacttttatagatttgtacgtagcgacttaaaagccaacattaacagaaattacgttaaaagcatctcaaaatcaactaaatcaagttcaaaaatttaaattttggtttattctttgacggtttaggccaaacgatgaggctctgagggagttacacgattttataaacttaataacattaattatttatttcttatattacagattttcagtatatttaacaaggatccgtactcactgcctagtaaacaaaagggatgaaaaatgtatgagcaacataaatatagaaacaaaatgaacatgagtcaaagctactccatcttcatgtcccaatccccaagcaatggatcgatcattcctctctctctctctaaaaaaaaaagaaaaaacaaaataaaaagcaagcagtagatcaacttgccgcggggggagagtgtcagtgactcagtagagagagaggggggcagcggaagaatggggcggtggtggccgccgacgtcggcggcggccgcgacggcggagccgcggtcggtgcagctgctgctgctgggcgtcgccctcgtcgctgcctccttctacgccggcaccgtcttccgctccccctccgcccccgcgctcttactgcccccatccgcctcccgatcgcccgatccttccagaaccccaggtacctcgtctacccatctcggagcgcagggaggtggcgcccgggggtgcctgatccgctgctggctcgcatttttcagttcagttcttggggggaactagaattaggcgcccatggcgttggcggtttgcgttttctggtagcttgcgcaactattgtggcggttttaggttcctaattgtagaaattttcgatgatcttgaattagtgtagaaaggtgattatttgttttgcatggaggactgctcggtttgtttgtaaccaggtgatataacattatgtattagacactgaaaagagtatagttttcacagacagttcggcatttttcagaaaaaaaagggaataaatcggttaggcatttgatcaggaatgactatgcggcgccagtatagaaaatcaaaagagtgcaggccactcctattcagttcataattcgtgacattatattttttagatcttgacacatttctgtatgtcttagatatgaanntcncngntgntcatnncaanngggnttcatg

SEQ ID NO: 5865 - DNA, 8190 bp, Oryza sativa
cgacgattttccccatgactcgtgccgatcgtatacatgatggtcaggttggttggaggctttagagcaagtttaatcgtatagcctactactagctccaaatcatctatagctaatgtaatagtcaattcatataatagatgcttactatactattaatacctggtcccacctgtcatacacacattacgtcttgaagtccgtgctgtagctggctacagatatgtagcccgctacttttctctctctttttttatctttttaaaaatatatttatagttggcttatagcccgctattatacctgctcttagagagttcctggccagcacgctaacgcagaagcaatgtttttatatcaatcacactagcaactatatttcacctacatctgtgatttcaatttcaatttcaatttatctttcagagatggttccgatcttctctgcatatttcaccctatcgcgccggatatgaccgtgtgtgcagaggattagacgtcgagatgtaactatacattaatagcgtcgcatacatttgttcgtgctgcccatcgctcgatctgtcgagcatgttcacgtagactgccaatgtaaacatccttctaccttttcgttgcaatttttttctcagcttaattgatctgggactggtttggtttgtgacctaaattggtcttaccaatttttgtcaatgttaaattttgataaattttagcatagctagttttggtaaggcaaagttatgtttagattgaagccaaaatagcctaagggcttagtttgttttagagccaatttttgccctaccaaaatattggtagtgccaaaatattgataagttttggcactaccaaatttggtggaaccagatcctctaacgtagcgctcgctacgtcagagggacgtccaacggctatcgtccgtccattcggcatcggacggagtcgagcgagcatagcgattagacttcgcccatgttgcagaaaaatcggcccacgcgacctacaaccaatcagccatcgacgccgcctccgagccacagccgccgacgccgctaggaagcaagtcgtcgccgtcggcgtcaccgccacagcctgcgcctccccagcgaggtcccttcattgccacccccctcttccccatccccgtcccgcgcccgcctccgtgtcctccctcgagcggaagcctccgctgcgtcccgtcgtggaggtcgcggaccgtgcgcgtcgacaaaaccatgactcctggttggaggtcaacatgtcatggaacatacagcaggaaagaagcaacttgtccaaagcaacaatgcattgttgtgagatttattgttaagagcatctgagtactgcaattttgacacagatttgatccaagtctgtattcatgtcagttctgctctcaaattgcaacaaacattaaagtatgggaccaaatctatagatgtgcaacaatcaaatgctcaatctagcaacaacagcacattgtaatgttcagtgtttactgtcgaagcagcatcaacacaagtgacattcttttgctatactgaagtttcaatccatttagacgtactgatttgaaaacgaaaaattgatgcaactacaatcttcacattcagtgttgagttacaatcccaattcacatcaatttacaacatccatttatatcaatttacggtctcgatctaggtgtacactgccggcagcaagcattcagtgatgcaattacaatcttcacattcagtgttgacgtacactgccggcagcgagccagcaacatgttcaaggagcagctcctcgactactcccgtcaccgccctcgtctccattgtcagcgctcgcgtgcaaggtgtagctaggggtgggcatatttagaccgaaccgaagaaccgaaccgaaaagaccgagaccgagaccaaaaagaccgagaccgagaaattcggttatctgttcggtccctgccctcaaaataccgaatttatttcggtcatttcggttgttaggctcggttaaccgaattaaccgaaatgaccgaaattttggcccaataggcttaggaagcccaataagcccactaaaacaaaccctagagtgatacaacccttaccctaccaccactgccgcactccacagcgtcgcctcctcatccagcctccatcgctccgcctcctccagcctccaccgcgccgcagacgccggctccgccctccacctcgcggcgtcggccgccgccgccgccctccaccgcgccgccctccaccgcaccgcggccgccgccctccaccgcgcggcggccaccgccgctgccctcccccgcgcgggcgccgccgccgtcctccaccgctgtcacgctcggaatttctatccaaaattccaaacgcttacatgtgtgtgaaccctcgtccaggaatcagccgaggcacacaataacaatttgataatagagtacaattattactctaattaataagcgaataaaatgtcattacagaggtagatagttcctctcaatcaataaagatctaagcagcggaaaaataagataaacggcgcagacgactccactccacatgcagcttgaccagggctacacctaatcctccacaccatcagcatcactgtagaactcctcctctgatgaatgattgcaaggtgagtatatgacatactcaacaagccacgcagcaaatatgcaagtgcacaggataacaaaggatggcatagtagggtttcatttgcataaacagcatttaataaacatttcagaatttaataaagtagttaagtagtaattaaacaatattaatccaatgctatacaacataccctgttgcataggcccaaccattcttaacaatcatcccggttgcacagttctatctccaaaccaggaatataccattccaaaccaggagctaatcaaattattaccagttatagcatcttttattatggtgagaagtgtgaaactaatcacgaaagacattgttagacccgcccataaccgcgggcacggctattcgaatagttttactctggccagaggtgtaccactgtacccacaagacacagccccacaacatgtcaccatgcgcctcaataccaccacggtacctcagaaaggggctgtgacagtacccctcgcacaacacaatccaccacagtgcaccattcctggagcataatcaccccttataaacaaggtatggactccccagcgacccccgtgggcttatctccgccacttctcagtctggtgctccgcaatgaaccatgctatacaaaaggtaaagccgttgcccacgctggcttgtggttggcacggttaatgtttcacaaccgaaactcgtgaaccggttcttaattgtcatgagcacgaccatcaaaaccatgtgttcacaacccatcattatcagattttagttggcaaattaattaattaatcaatcacgattgaccatcatgagctatcattaagccatcattaaataatagtgagtcataagttatcccaatagtgtgctaatgtttctaagcatggctaagcaatcgtatctaatatctagctgaaccaatatataaagcccaactagtcaagttataataacctaaggtatcaaggaataaagtaatcaagaacaaaaggactataacaatcaataggttaattccacccaacgacattcgaaaataaatgcaatagttgaatagaaacaatagctttaaacgggatcaacatgctcaaagggatgtttgggatctgtgtgacttgccttgctggccttggaactcttcaaattcttctcctgcaaaaatggactctccggaaacgtcggaatctaaacagaaaggagcaaaatcaccaaacagcacataaacaagcatgaacagtacatgtggatatttttaacatgtagatcttaattttagaaaaaattagagacttgaaccaactaaatccgagctaagatgaattagttatgaattttcaaagattaaatcggattaaatcacttatatgggttttaattgaattatgacgcaataatgaattatttttgaaaaggaaaaaggggtttattgcgtcagcggctagggtttgcggtggaccgagtgcacggggcggctcacagaaacgaacggccgagatccatccatccaaaactgacggccaagatccatcggtccacgaccggaccacgggggacgacgacgatgacgtcagcggtgacgtcaccaccggcggcggctcgggcgtgcaagctcgccggcgaacgacggcgcgacggcacgaacggagggcaccagcacgtagaaagcgacgcggcgaactcaccggtgaccaaaacggcggcggaagatcaacggacggcgacggcgtcgaggaagaagcggcggcaaccttcggcttgacgacgatggcggtgctccggcggtctacagcaacgatggaggggcggacgaggacggcgacgcgacggcgaccacgacggcggccttcccgagcaacggcgacgactagagcgacgacgacgcacggctggagcgacggcgacgacggcggcgcgaggtcccacggggctagggctctacgggcgaagagagacgaaggcgagggtggcgacgggtagcggagacaccgggggtccttttataggggcaaggaggcggcggcgaaggcccacggcgaccggcgacgcgatagaaggtttagggttcggaggagagagatcgatccgaattgaactcgaatccacggatttccaaagcgatttagacgatgtttccaaaagggaaaagatagagtggatcacggggatcctttctcctcaattgatttcaccggaaacggaaaggggcggccggatttggaatggcggcggcggcgcggcgcgtctagggtttcgtcgggaggaagacgacgaccctgacaggcgggccccacctgtcagcggcgaacgcgcgcacgggcgggcgactgcgggccggcttgggccggggagagagagagagagaaggttttgggccgactttcggcccaaagccaaaagagacttttaaaaccttttccaatttaaattattcatgaaatgcaattccatttattaaaaatacttccttagctcaaataaatcccagaaaaatctaggaattatagaattaagcaaagtatttaatgaaattttatctggccccattttatattggaatttattaattaaaaccagatcttctcttctaggcttttaaaataaattctaataattccaatttagacaacaatttatatatttgggatttttagggtgtgacaaccgcgacggtcgacgcctccgccctccacagcgccgcggccgacgcctccgctctccggcctccacagcgccgtggctgacgcctccgccctccaccgcgccggtgacgcctccgtcctccaccgcgccggcgacgcctccgtcatttttttttcattccaaattttctcctgaaaaatttcggttagaccgagaccgaaaccgaaaacaccgagaccgaatttgccggtcctaaattttttgggatgaaattcgatcctgagtttgcaaagaccgaactgaccgaaaaccgaagaccgagaccgaatttttcggtctgaccgaacgcccacccctaggtgtatgagagccccgaggtgggtggtggcaaaagactccgcgagggcaccaccgtggaagccgttgtcgtcgaggcagccgcgacctccacgctggatgaaacaggagaacgcagggcgagggatggggaggagggcagcgatgagaggaggggcttcttccgtggtcctctactactccactccacccgtgcatgcgccggaggagacgacgagctgcagtgagcggctgaagaccacgggaaaacaggagccatcccgattttgctgggtgggaagaggaaggtggcaacgaaggagccctcactcgggaggtgcaggctgcggcggtggcggcgacgccgatggcgcagaggcctcccctcccccatttgtttcctagcggcgccggcggctgtggctcggaggtggcgtcgataccgcgtgggctgttttttctgccatatgggccgagcccatctgctgtgctcgctcgactccgtccgatgccgaatggacggacgagagacgttggacgtccctctgacgtagcgagcgccagaggatctggttccaaatttggtagtgatgaatttgaactattgtaggcaaaatttggtagcaaaccaaatatacatttgctactattgaagttaccaaaattttgatagggcaataagttggtatcaaaccaaacaagccctaagttaactattaaaatgaccaactttcttagacatgccaaaatttaacttcaaaccaaatagatactaaacactattaaaattgccaaatattcgcaagggcaatttaggcctcaaaccagcccttgatctcctatcctttatcacgtgccaccttaaaattgttcacacatctcgcatataccagattaagtattcacctgttttatttagtgtagcacaagattattaattagttaccgaatctatttaccaggacattcgtgcagggtaagcacgtaacactaattaaaacactttttcaatgtagggcccctttaaatcgcaggaatgagaaaacataggaataggaaaaacgcaggattttgataggaatgtaagtgtaaaacagaggattgcaaaatcctctgtttccaagagatttgactcaaaggtcgtttgattggaccgcaggaaaaacgcaggaattagaggagagataaagactcaaaggaaagtttccaagagattttacctcatgttagaattcctcaaaaacttgcatggcattagacaatacataggaatttcataggattccataagatccatttctttgattcaaatggctatataggaaaaattcctataggaatgaaatcccctaaaattcttatgaatttcctttaaatcaaaggggccgtaaagtccagaaagatggttagtacaaaatatttgataaagtacaatttttataaagtatttgggttatttagttttgttttgtgcaggatttaataatttaaaaaattaaaagcaacttattcacatatttgattcaacttttatgtcgtcgtcgttatttaattacgagccattccccgttgtggctgttgcggaggattgtgagctctgttcggtccaaagacagcataagaggattgtgtccgcaacagcattgtggaaacaacaactaacaagggcgatcgccgctatacggtgcttcaagtgaatcaaacaatccatgctatgtggaagggtcaagggtacaagaactcaaaagaaaataaggagaatgtgatgttaatgtatcaatttaccaagtaaaccaaggttcagtgtttatcttccatatttttttatttaatatgcattttagcattcaatctccaataaaaaaaattcaagcattggcataagctctgctcatttcatttcctctcttttctaggtagaaatagatatatctctataatccattaattaagggccgtccctgttagtctaatgatattaagtaaaaaaatatgctaaatgtctaacacaactgtttttttttttttgcgggggtctaacacagctgttgatatttaaaaaatgcaaacaaagaacttgatatgcccaaattttaacggatcatgttagataaaaaagttcatatatatgaggtataactataggtaaaatattcattgttctgcatttattttgaactacagaattactaattctgtaactataaactttggaagttcatttgcatatgaatacacataaaactggcaattaatacataatttttcataaaatttatacaaactttagctttataagcatatgtaatgttaataacatgtgtgaaaaaacataaatagaaccatccagccaaaaactcatcatctgcaaaatttattagtctaccagaaattttcatcatataccaaatttatgcctaagcagatcaaaacagcaaaattgttcaattaaaaggagagaatcgtataggagggaaaatttgggtgataaataatgtttgattgttgactcttgataaaaggcacttctattttaaaactagatgacatccggcacatt

SEQ ID NO: 5866 - DNA, 24636 bp, Oryza sativa
catgctacatagattttccttgaaaagactaaccaatgtatatattttctttaaccaatcaatatatatattcagccatatcaatagatcgttaaattctcaatatgaattttgtgagattcatcatcaatatcgttaaattctctggctgaattttgacaatattcagccatatacggctctggctgcatctccccaagcagaatgctgctcccctagtcccctgtcacacgtaaatctggaatatccttaactttgctccagtagtctcctccacgtttgcatcttctcaccagcgtagggcattgtctaataaagagcttttccaggctgtgcagcctctgctggagaccttccggtaaagcctttaaactagggcagttccaaatagccagatcattgagagctgtcagattatgcatcccttcgggtaatgttgttaggctgtcattagttcccaggtagagcctggtcagatttgatagacgttgaatgctgggaggcagggacttcagtcttgggttataatcaattgacagacttcttagagcgcccaggcaacccagtccttcaggtaggtcctcaagtacattgcagctgcatatcctcagatacgataagcttgtagggaaagccactaagttgtagcagaattcgatttctatccgttccaaattatgcatgccctcatcttcaaaggacttcactgagacttgggcaggtggcatacccgtgaagttgttgcaatatctaatgtcgagtcgttttaatgaagtcaagctttggaactcctcccctggccaaaaggtgaggctgttacagtactcgattgttaagtgctgcaggcacgcaaatgatttccagaaccacagtggtgactgcaatgtatcatattggatgaagcagtcacaggaaattagatctaagttctgcacagacatcacgtgaccacttatattttgtatatcttctggtgctagagcactgaatccctgtaggtgtaatttagtgagtgagccccatgatgaaaagtgatgggccaaaacatgatcctttgaatctgtggttccttccaggttttctttatagtgatagattagtgtttttttcctctctaaactcccttgacttgcaccaagatatagatacgacagattactaacacttgacgataagccaatcaatattttgtttcctatcacacttaacgacttgagaaccggagcattaggcatagctgtcaattttggacaatcaatgatttccattgcatctagcacgggaaaattagccggtgttacctgttcaacatcatattcctgccagttctctaaggattccattcgttctagtgacaagagttttaattttgggaatgccactaattgatgatcacattctttatcagagcagaacccgttacacaagtatttcaacttcttcatgtcttttagtcggagaacctcgagaaagggaagcttccacactgatggaagtttcatacaatttatggagtccgttactttgagcttaacaatgttgcgcaatgtgattccattttccatccatatgggaaacgtagtgcccatatactgcctcagctttagaacggtcaatccgttgggaggcttaagagcgtcaagtacttcttcatgacgatataaatgcaaatcttcagcttgtaactccgcagattttgatgtgccccagcaaagtgctaactgctgcaaatttgtcttacactcaaggttggcttcttttgcttctatgggatttgttactttaatcaaattaaatatctgaagcttgcccccaagttttaagtcattcagttcgttaatcctatagccagattcattaccaggtacgaactttgtcaatgtccgtaaattaatgagctgtcctagaccagctggcatgcttgttagtcgagcacagtcatcaaggtacacatggcgaaggctaatcataaatttcatgccatctggtaggtgggtcagcctcctgcatctattgagtatcaacacttgtaaattataaagtgcgctagctgcttcaggtagtgtatttatgtagctaccagacaaatcaagatatcttaagtgcttcataaatgctggttcaacaggaaatttttcgatgccgaaaatatgaagcccaactactctcaaaggagactcattgaatttaatgtcctgggcaatatgcatgtcattcttatctaaggcaaatacactgcggataactcgacaatgctgcatcaagaaaccaatcttttgttgaccctcaaaagccatatgatggacatttttgggtattttcttaattttagccagattttccaaagctaaacactcatcaccgcttatatgaactgcaagatcatgcataagatcatgaattttgaatgtagttacatcactttgcccatacctgtacactttacgttggaaaattgatccaatttgcttaacattttggaaaaatgacctccaaacaagctcccaaaaaacatgattcccattctcttcaatatctgacatcttcttggatggaataaatccattcgatacccaaagatgtattagatcgtccttatcaatctcgtagtccttcgggaatactgcacaaaaagcaaaacattgtttcatatgagaaggcaaatttttgtagcccaaagacagcgctggcagtatctggctttcttcatcccaagtgttgctttcaaaggatggatagccaatctcgtgtctcctgttttgtactcatcaaggctcccatactctttatggctaacggaagcccgcaacatttctcaacaattcttttaccaacctcaacgagctctggagtctcaaccacacctgtgccaaaagctcttctgctgaatacaatccaagaatcttctgggttaaggttctctaggcacaatggactaattgactccatgattgatgcaactttcacgtttcgggtagtcacaaccaccgcacttcccattccacaagaaccaagcaatgttctaagagctccccatttctgtttatcttcattccaaacatcatctagtacaagaaggtacctcttttggcccagttcttcccgaagacgttgctgtagcaattccaggttatcaaacttcagtccacaatcattcccaattgcggtgtcaattatccccttgacaataacaggaacactgaagttctctgacacacaaacccacatatgcttttgaaaatgtgctttcacttttacgtcattgaagaccagctgtgcaagagttgtctttcccagtcctcctatcccaacaataggaagtattagcaattcgtcggtctcggcacttagaagcatatggacaatttcatctctttctttgtcccttccaataacttcctgctcgtcgacgtaggaataggtttgcatcctctcatccactggcatggagcaatttaggaacccaaatcgattcatttgcgaaacaagctgatcaatccgctcgactatctgctggagtctctttcctatcctatacttgaacagtaaaggattataatgagaagagaagaaagcccttacgccagtattgattttatgcccacgacggagcgcttcgcagcggagctcctcgtagtgcagctcatcaagggcgtcatcagcatcacaggcagccagcttcagctttgcgatccaagacttcacagcaggcttcttggatgcctgatcctcggcatcattgatcacttggttgacggcaagcagcaaggtatacagctccgaacgccgtcgttcaatacccccgatgaaactaaactctgtgccgagagactcacctgctttcttcaggagggcaggcaaaagagccgatagtaactccgccatggctcaaagctcagagatcaatggagtattggcagaacagaaaggattggaggacaattaatggtgggttgaggaatgagcgtatggtgtagctggttgagttaagtctttggaaaaaaccatccaaggcacaaagatgagttggagttgaaggagactgataatggaatgagaagaagcaagtgagctgtttgttccattagaaaaaagtgggtgggttgtttaagacaatgggtgcattagatacatcatgttagttgacgcgcttcaaatttcaaataatcacatcatacaatcaaacaacaagtggtcaactgctcagtgtaagctggcaagttgctaaagatgctcagtgtaagccccatatgtcagctgaggtatcacagcaggcatcagcctagcaccagatcagaaggagaagataaacatccgcccactgcagcaaccgaattaaaccaaaccaacagcagcatgtatggtttcacctaaacaaacaattccagcaagtttcctctcctaaggacgtccatagaaaaaatggaaaaaaaatatatgcaagagtgccaatttgtgcattataatgccctactaggctgtcatgtcgtgcattatataaatcgtccaagactttgaatttatctttgtatcgccgcaggtggctataattcagaacaccaactaagcttctattatttgcttattttagtgcctatcaaaattattagtggctatttctgttcacgggctgggaatctacgagcttaccttcggaggtggagctagccgtgccttccgatggctgctgctgaagacgggcttatttgatttaaagtcaatttttactctaccaaaatcttggtggaaagttttggcactaccaaattttctagcattgaatttgaactatagtagccaaaatttggtatcaaaccaaacatgcatgtgtcgctgtttaagttaccaaaattttagtaggataaaaattggcatcaaacgaaacaagcccgatatctcttcgactgtatagctgtgccggatcgagacaaattcctctgctccgtgaagtttcttgcgcccgcatccggctgtcttatgggagagcagcttccgccacaccggccaacaccgggttttggccgccggcagagtgtgagggggattgggtggaggcaaccaaagcggagacaatattgagcacgcgcagtccgtgttagataagttagttattggagataaggtttatattatcacatttaaccatttgatcttatatctataatacggattgatctcaggttgttgagagtgatccgttccctctgtaatgcgccacggcaaaggcttttcctgcctatatcaacaaaggtgcggcccctatcagggttcagcgcttccccctattattccctgatatggtatcagagcaaaccgatctacctccatcaccaagcaaagccatggcaaagtttgggagaatactaccaatcggacatccgatatctcaaaaaatatcgaacggtcaaaatgttgcagctgatcaacatgtgaaacattaatttatatatggtgaaacaaaaaaaaacagcaattgaaacattaaaaattttatgaaacacagtgaagatacacgttgaaacatgttgctatcacttatgaaacaacgagagttaatagatttaaacatatatttttctttcatcaaaatataatcgtgtgatatcttgttgtaaagatgtaattacaacgaatacaacggtatgatcgaatcatagattggataagtagtttagaagaaaaatcattttaaagaccgctaaaatgcatgcatgcaagcattgatggagggtagtggcaattattttcgagaattttgtgaaacacagtaaaaacaggcgctgaaacatatcgacatagcgtatgaaacatgaagtattaatagtttgaaacttatatttttctttaatcggaatataaacatgtgatatcttgttataacgatttaattccaataaatacaatggtgtaatcggattttagattgataagtagtttaggagaaaaaatattttaaagattgacacatgcatatgcatggttggaatgaatagctacgataattgagttagcagttagttgattacagatagaagcacccgtgaaacttgccatatcagttgacggattcgaatctttctagagttagcatgtagacagtgtggaaggcatcgatgtggtatccaatttttccgtgtcagtcgaacggccgattacaagcattttcccgaagtttctcgaagaatcatgccagcaatcactgctttcttttcggaaaagctaggaaaatcgaatcacgcccatggtttgaaattttggttcgaaatttcggcttccaccggcaagcacaaatctccccggaatttttggtttcttgtcaaatatttgtaaatttggtcaaaatttgttcaaattcagtcacaatatgttaaaaattcaaataattttggtcagaaaaacccggaaatcacgaaattttcaattttttggcaaccatcgaaattccggtgcaaccgaaattgcaaactcggatcatgccatatggaaggcgcgtattcttgtgattgttcggggtgctcggttggaaggttctcataggagcagatcaagctccagttgtcattcttcgagaaaaggagggcgaaaaggaaattatcatcaacaaaccagattgtgatgaatggatttcgacaaatcaacaggtgctttcatatttgctttcctccatgactaaagatctacttgttcaagtggcaacatgtagcacaacagcctcggcatggagtatgatccaagagatgttcgggtccatgactcgggcacgaacaatcaacacgcgactctccctcaccacgctgcagaagggcgacatgaacatcacgacgtttgttgggaaggtgcggcctttggctaatgaacttgcaatcatcggcaaacccattgatgatgatgatctgatcagctatatcattgctggtcttgatgaagaatatgtgccggtaatctcgtccattgttgggcgaccagatcaggtgaccgtcagtgaggcctttgcttagttgatactccctccgtttcatatcgtcagattttctagcattgcccacattcatatatatatatatatatataaatgaatctatacacgtatatatgcctaaattcattagcatctatatgaatatgaacaacgttagaaagttttacattgtgaaacggagggagtaaagcttcaagcagaggctagcactttgccagagtggagaatggagaatcctggcctcggctaatagcgcaagctgtgtccagggtcagcaacaaggcgtcagaggtggcggcggcaacaatcaatgaccgagaacgttaatacgtgaacgttcgcgtgttgctcatcccgcgaatgggaaaacacgtggctgggagcttcggacacgtgactcggaaatttgttgcggcacgctgatccaactacatgggcctcacgggctcatggcccatccgaatattttgtgcttatgtggaatgcaaatttgttttaaaactcatttgtaaaaactttctattacctaatgaattttagtttctatgcatagattttatctgtataaagtatatatgtataaagtttatgtgtataaaatatctatatataatttttatgtgtgtaaagtccatgtgtatatacattgaatgtttctacgtataaagttttctatgcgtaggctttctatgtataaagttgtattcgtataaagtttctatgtataatattttctcacccctacccaccacttctcagaaatttaaagggaaaatagaaacggataactctttatgctaaaaatcgttacactgggccttcgaagaaaaaaaaaacttcatgtgacttggacttgcaagtaacatgaataggggaaatgatcgtgggctggcctggtggagagagagactcccgtgtcgctctctgcagggcgacccgggaggcgaccgtcgccgaggccccgctcctcctacgcgcgcgcagcctcgccgccgccggcgatgctgcccccgatggcagtgccggcggcagcgcccacatttatgcaggtgaaacctgccctgtataagatcgttggaagttatatattcatgtgggcatttcgccccccggtgaccagtctaaaaaaaagatcgtgggctggcctacatcaacaaagaaaacaggaaggcaatcaggcttttcatcaaagtgcacgatggtttttctagttcgctcgccccggtcaccgcgaacactcgcgcatcagacttacccatcaatgacaaggtgctccaaacaatggtggaaactgaagtcgaggaagaggcagccctagcggtggtcgaagaaacataggaggtgtcgacaacaggcccaagtgtcaactttgctacaaaaggggacacacggtaaaagattgctagtaccgtttcgatgaagactatgttccatagatgaaaggtttgcaggttctgctgcattctacggcattgatttcaattggtatcttgacaccggcgctacaaatcatgtcaccggagagcttgagaagctaatagttcgtggcaaatatcatggcaatgatcaaattcatatagcgagtggtgcatgtatggagattagtcacatggtaattctgttgttcagatccctagttgagatttacagtgaaaaagtgttctttatgttcctaaggccaagaaaaatcttgtttcatctcatagacttacttgtgatatcttgcctacatagtcatagaattagtatatcgtaaatttttctttataaaggatttggccatgagaagaactctacttagggtcgttgtcataaaggactatatgctcttccatcttcatcctcgaatcaaacgcatacccgtagctcacccgaaaaacaaacgtcgcgcttgttgccaccattcggccagtggaagaccatggtgacttgggcgggtggaaatccacattaatccagtcctgcagtaaggtccatactctgtttgtgtaggcgcacgcagtgaagagatgattgcaatcatcaaaatcagactgacacagtgagtagactggttcatgaggccatccctctcttcagcagaatgtctgccgttaagcaccggcctttaacagccaaccacacgaactttactctagctggagctgttgccttccaaatcagctcaccaatggcaaggtttcctaccatgaaaatgaggtctacttggagatactgagtcaaaataagagagggaaatatataaattaaattgaatcatttgctgctgataaaatgtatagctacatttttcttagataatggattaaataacctggcctctacatccaagtggatgtacacagccacagaatagctacatatatcagtattatttctccaacaacaccctaattcatttaatgttgtttatcatctatgtttcgtgggttattgtacattgaacactacaccaagagagaaaaataatatttgcatcagtggctatccgaataggaagggcaacatcaatcaaacagattggatagaaaaaaaggtacttaattttttggctaaactcattaattttgtttgaaaaatgcatgaaagaaaagaactcagtgaataacttacgtgagcatggcaaacagccccagccaacattcctgtgcctttccatgttttttccgtgagggcatgttctccggaatcgcagccgtaatgctgcttcacgtctagctatgcccaggccaactgcaatcaaattattatcaaacgctgggaaatttataccaatattattgattattcgtaagaaatatattgtgattcaatgatctgtaacgcacattcttctctctttaaaataaagcatattcaaacaatattggttcccgttcaaataaaacaaagtagctcgtgtaaaaccatgccctaattgggggaaaccaggcggagattgtggatcgttagtccacacacaacacaataagaaagggagtacagcaacaaataaattctcaccactgctcgtgcagtagtgcatcaggcgatcaatctctaaaatccgacgccatactccatccccttcaatctaaaccatggagaatcatgccctgattgaacaaaacaagttaaagattgaatacttaatactatcaccgcacaccaagaaaaggactaaatccctcactgaggctagtgaccctgcagcatgcccacatgaagccccttctgcatgcgccatgatttctctagcagcttagcctcatctcccacgctgtctgcatcgtcctcgccctcggatggcttacatggtattatgggtaattttactatccttcataagatacctagatgtaccatatttctagtgtaaaatttgatatctctaggtactaagtacctcaaggcaccaaaaattttagtgtaaaatttaggtacctcaaggtactttctcaagaactgtaaaattccactatagtaaagaccccggccgtagcattcacgtgggcgttgcgcaccacggcgtcggtcatggcctgcgagaagcagcgaatcatagcgtagccccctcacgaactcgggcttgcacggctccagctccaggtccccagcgaaagattcatggtaagtcttcagaactccaggtctccagatctaagaaacagcacaagattcagaagcaggatgaatccacaaacactggcatacctgaatatgctgaaaatggatgcatataaacaaaattacgataactctagggaaatatattgggggaaattataaaaaaatgtatcagggagcacacctttgtttggttcacttggtggaaagaagtatgcaccacctattgtttatcagatgctacacagaaccccatatcctttgggtcagaggtagaaatatatttggcaactccgacaagaaagagggaattcctcgaaatcacacaatcagtgttgagcagtggaactccaatcaatatcagtatatccacaatttgtacattgttacaaaaaggccttgatcccagcaggtcaagatatacgttcggagcagagaaatgcaatgcacttcattcacttaagacacattctgtttcaacaatgtttcagcgtagatacctgcaaaatttctgaacatgagaggaatgatgccaaagttcctccaaacagagtgatgcaattcattcgattaaacaatgtctgacttgataaaagcagcaacaaatggtttcgtagctcccaggtaagtaagactcaaacttgcttaatcgaacagagcaaggcaagggtaagaaagagagaacgagggacaacagtgtgcacctttgtagtataaattaattgtctggctgcccagaacttgatgctcttctttgccaagcgttcatgcatttgggaatgatggttctggctgcatcttgccagacagggcgcggctcacttgtcactcgtaaatcaggaatgtccttgactttctcccaataatctcccccacgtctgcatctcctcgccagagcagggcaatcttcaacggtgaacgtttggaggccatgcagtctttgctggagaccttctggtaaagcggttataccaggacatttaataaaatgtagtgttttgagagcagttagattctgcatcccttcaggcaaggaggttaagctgttattacttgtcagttctaggcttttcagatttgaaagacaccgaatgctggcaggcagggagctaaaacttgggcaacccaaaattacgagagttgttagagtgccctggcaaccaaatcctccaggcaggccctcaagtacattactgtcagttatcacaaggatccgtaggcagatgaagtttgtagggaataccactaagttggggcagcgatcaatctgtaagtattccaaattacatgggcctccatctgtagagggccttgctgacagtcggtcaggtggtacacccgtgaagtttttgcaatctacaatgaagagtttttctaaagaagtcaagcttcggaactcctcctttggccaaaaggtgaggctatcacagtaccagatttctaattgttgtaggcatccaaatgatatccagaaccatagtggtgactgtaatccttcatgttggatgaagcaatcacaagaagacaggactaagtcttgcacagacatcatgtgaccacttatactcttcacattttctggtgctggtgtattgaatccttgtaggtgtagtttagtgagtgaaccccatgacaacaagtgatcgggcaaaatatgctcatcctttgtatcagtgcttccttcacgttctccattatagatatagtatagtgttcttaccctccgtgaactcccttgacttgcaccgagatacagatatgatagattactaatacctgacactaaccccagcagtactttgtttcctgtcaaacttaaagacttaagaatcggaacattaggcagtgctgtcagttttgggcagtctataatttccatggcgtccagctttggaaaagtaactgatgtcacttgttgagtgtcatattcatgccagttctctaaggattccatccattctagtgacaataattttaatttttgaaataccactaattggttgccatattcttcatcagtggggtacctgtaacacaagtatttcaacctctccattcgtttgagacggagaacttcaagaaagggaagctgccacactggtgggagtttgacacacattacagagcctctcaaactgagtttaacaatattttgcagtgtcacaccatcttccatccacattggaaagttggagcccatatattgccttagctttagaacttttaatccgttgggaggcttaagagcatccagcacttcttcaggacggcataattgcaaatattcatctgcagaatgacaatgtgaacaggtgaaatttcgtgagtcccaacaaagtgctagttgctgcagatttttcttattctcaaggttggcttcttttgcttgtaacggatttgttaccttcagcaaattatgtatttgtagcttgcccccaagttctaagtccttgagttcatgaagtctacaatcagattcattgccaaccatatacattgtcaatgttcgtaaactgctgagctgccctagacccggcggcatcctttgtagactagaacaaccatcaaggtacacatggcgaaggctgatcataaatttcatgccgtcaggcaggtgagtcaggcccctgcatctattgagcattagtatttgtaaattgtacagtgcactgaccgcttcagggagtgtttttatgtcgctagaggataaatcaagataccgcaagtgcttcatatatgctggttcaactgagaatctttcattgtcacagatatgaagcccaagcgctctacaaggggacaccatgaatctgacgtccttcatagaattcatatgattcttatgtaaactaaatagacttcggataattggacaacgctgcatcacgaaaccaatcttgtgtggatgtggaaaaactagatgatggacattcttcggcattttatttatttcaacaagattttgcaaagtatagcactcatccccgcttatagaaactgcaagatcatgcataagatcatgaattttgcatgtagttacatctttgtacccatatatgtactcttccttgcgggaccgagtttgcttcgcattttggaaaaatgatctccaaagaagctccagaaaaaccttgttcccagtttcttctatgtccgaggtctctttagatggaatgaatccatttgatatccacagatgtattagatcatccttatcaatctcgtagtcctttgggaatacagcacaaaaagcaaagcactgtttcataaaagaaggtagatgtttgtagctcaatgataggactgtcagtatgttattttcctcccaagtattgttttgaaggatcgccagccaatcccttacactatgttttctactcagcaggcctcccatactatttattgctaatgggactccagaacatttttgaacaatttttgtaccaatctcgacaaactcacaagacttggccacacctgtacggaacgctctttcacagaatagagtccaggaatcttcttggctaagttgttctagagccaatggaggaactgtccccatgactgacgcaacattcgaatttcgggtagtgacaaccaccgcacttcccattttacaggaacaaagcaatgttcttagagcctcccatttttgttcatcttcattccaaacatcatctagtacaaggaggtacctcttttggctcagttcttcccggagacgttgttgtagcaattccaggttatcactcttcagtccacaatcattcccaattgcagtgtcaattatccccttgacaatatcaggaacactgaagttctctgagacacaaacccacatatgcttttgaaaatgtgctttcactttcacgtcattgaagaccagctgtgcaagagttgtcttgcccaatcctcctatcccaacaataggaagtattagcaatttgtcactcttggcacttagaagcatatggatgatttcatctctttctttgtcccttccaataacttcctgctcgtcgacgtaggaataggtctgcatcctctcatcctctggcatggggcaatttaggaacccaaattgattcatttgcgaaacaagctgatcaatctgttcaactatctgctggagtttctttcctatcctatacttgaacagtaaaggattataatgagaagagaagaaagcccttacgccactgttgattttatgcccacgacggagtgcctcgctgcgaagcgcctcgtagtgcagctcatcgagggcatcatcagcatcacaggcagccagcttcagcttggtgatccaggacttcacagcaggcttcttggatgcctgctcctcggcaccatagatcacttggttgatggcaagcagcaaggtatacagctctgaacgccggtgttcaatacccccaatgaaactaaactctgtggagagagactcgccagctttcttcagaagggcaggtagaagagctgagagtagctcagccatggctccaagctcagagtttaaaggaatatggacaaaacggaagagatgagagagcagtggagagtcggcagaaggtctagtatttagaatctacaggaggaggaaagacacagtacataacaagttggtgtaaggggcacataaagagggaggacaatatgtggttcgttgaagaattagaagaaaaaaaaaagattgcatccatcatgctaggtgacgccttgtgaatttcaaataatcatgttatattttaaaatttacgcatagatcaacaggtaaagaacaaacatgtaaatattgtccgcacaggcagacaggctatagtcctatgatcggcacctcctttgatgaagtccaaagctcccagaatttcattttttaaaaaaataacattaaagcggtgtcctattatccatatgtgtctgaattcgtgcttcatatcccaaattgttcatgaacagaacatatacaccaactcatgtacccaaagaattgatagcattgcattttttcagttaaaattgcaaaatgtaaaacagtaaaagccaatgcaacacagaatcaactatgaggtacattgtaagtcatgtatgtcaaagccccagcggacgttcccagggtttatgctgcaatcacagtgaatgttcgttgggtttatgcaaaagagaaatgatcattcgccggaattataaatcattgcataaacccagtaatagcagaatccccctccactgaaacatctccttagcagcaacacgatgaaacttcgaggtagtttcatctttcagctaaacagcgtcaatataaaaaatgacagtatgacacacatattactttattagagaaggtggcaaaggttcgcgcatcttcgcatcaagaatggagggggaaaaggcaagctaaagtataacacgcataattgcaactaaagaactaatatggatcttcttttcaaaaaggaaataaataaataaaataaaaggtaacacccttaacagcagttgttatcaccgcggtgtatgaatagggttatcattctctaccggaaaaggtgtccgttgtggaatcgacccaaaactctactgtatggccgaatttcttgtgattaaagcttcaacaagaatacaatattgctagaccgatccacgcatacacccaccaccaccaccaccaccacccattaaaaaaaacaaaaaagagagaagaaaaactttacctctagaatgctctaagctactggcagggtcaaaaaaaaagtaaagtaaagcttacagttgcaggtggaggctgtggagccatggctgccgcgccgtgccttgcgccgaccgcggagatccggcttcctccgctccgaggagccttggttccagaacgcgtacggcccttgtaggagagaacatggctgccggcgtgcggcggccggcaccgggttttcgccgccggagcggagagcggaggcgaccgagcaccggaatctccgcaaccgctactccaggccgtcggataggagcagacggccaggatctggcccggctcactctcatccaacaaattggaggcccggaatgacggcccatctctgtggatcggcctggaaattaaactaatatttcggcccatcaagggctcgcttgtaaaggccattataacgtgtattggaacagttataactggtgatcagcgtgttccatccaaagagtaccgggaacaacctacacccgctccaaaaaaaaaaattagagactataaagggcggcgccctgggcggccgctggggcgtgcccccgccgccgcgatccgcgcgcgccgccaccaccgtctccctccgccgccatcgtcgtccccgtcgcttcgcgccccgctgccgagagccgcgcgcgccgccgtcgtcatccccgtcgcttcgcgccttcgcctcctccgcctctgccttcgcctccacctcgcgctaccaccgtcggtcgccggcccccgccacgacccccttcatcagctaccggatccggcaccgtccgccaccaccgtggtcgaaggaagcccgtaagctggtgtcctctcgccgctggatgtgacgaggactcccgtcgccatcacgccatcgccgctgcctccgcctccgcctccgcctccacctcctcctccaccgctgtcgcgtcgcagtgtcggagctcctccgcctccgcctcgcgctgttgccgagcgcagccgtctccgccgagcggcggtgaaggcgggcgcagcctccatcagcgacggggtcggagctctgacgaccacgccacagggggcgcaaagagctgacggctcatattctagcatcaggagccacgccgccgcgcccggcgaccgcgacgacgaggaggaggaggagccccgtcgccgcgtccatcctccgccggctgctacaccttcgtccgttccgcatcccgccgcggcgggtaccggcgcctcggctcctccgcctccgtgtccacggccacggatgtgatttgggtggtggtggggacgacgaagcgagagaggagcttgttccatgtcgatccggccgtgcttgaggccgggctggtgcagcgtgtgacgccccgattttcggtcgggattaaaaatcatttaataatgcattttctataaactaaataaaagttaaagcaatttaatcaagtgaaataatgagggaatttaaaatttcctttaaaaatcattggccgagaatattttgtaatattctttgtgccctaaaatactctctgaaatttctcgcaaattttcggagctcgagaaataattttaatagcacaaagatcattgaatcaattaaaataaaaaagaaaacaaagaaaatcccccttcctctctttgggccattttcggcccaagtcttccttctctcccgcggcccgcgcgccccctttctctccctctcgggccggcctcctccctcggcccgctcggctctctctctccctcaagtctgttccgtctccccagccagcctctccctccctctctctccgacaggtgggacccgtggaccccacctgtcatccccaaccttcggcctcccaggccggcaaccgccatggccgcccgagccgcctcacgtcgccgctttccccgcccacctcctccaccctgcaccgctcccgcccgaccgtgggacctcgccgcccacgaccccgctcccctcccccactccgtcccgcgaaaaaccgccgccaccacccccacgacgccgccccacttccccctcgaaatccgccgctccccggccctctcctcgcccccttgagctataaaatcaatccccgtggcctcctcttcctttttccccattttcccgagtccccacgccctctaccgagctctccacgccgatccccatcgccgccgctcgccggcgatctccagccgcgcgccgccgctgctcccgccgtcgccgcgcctcaccgcgtgtgccatcagcttcgccgtcctgcgcagcacgccggcctccactcggttccctccaaacgccatcggaaccacctccccaccgtgtaacctctctccgccgcttgcctccgaactccggccgcctctcctcgccacgctagccaccgccaaaccgcgccaccgccactgtcggcttcgccgctccaagccgagcaccggccatcgactcgttcctctaatccactaccgagccgccctccccattaccaaccaaagccatcgtcgccatttctgcctccggtcgcgccgcgtcgcttcttcagtccgccccgtgttgtgtcgttgccctccccggtaccgcagccatcgtccgtggctcagcaatccctccgtgttcgccggtcgtcgccggactcatctccccatgcctcccggtgagctccgtcgtcatttcggccggcgtttcccgccgcaccgcaactccctaccctctcctaacctcttcatttccttcccaaggtcccttcgaccatcgactgccgtttcccgctcgcggaacgtcgccgggccatcgccgtcgtcgtcgcctcccaccgctccggccgctaccccggtaagaacccctccttcctccccctcctcttcgccggccgcgcgcgccgccgccgcccacgtgcgctgccgctccccttgccgcgccgcgtctccgctctctcgcgtgcgctgccgtcgcccgcgtgtgccgtcaccggccgtcgccgccggtggccgcgccgccgcgcgccgtcgttcggccagccggctttgggccgtgccttgcccctaccgcgccgcccgtgaccgttggatcggctttgggccgatccaggccgtcggtcccgtggaccacttccgtggtccgggtccacggtgccgcctcggccacggtggattgagtccaccgtgtgcctgccccttgtgccgcggacgagtggggcccgcctgtcggcgccagccctttgctgacgtcagcacatccttttcctttgagaaaataaataataattacgcaataattcgtgaataattttagaaattcatttaaatggctcaaaacttctaaaattcatatctaattcattcgaactccaaattgagccattcaacttgcaaaattcatctaaaattgagctctacatgtttgtttacttttgatgtactgttttcttggtttttattagagtttttcctcgttttgcgtgccagcgtgtagttcctgtcgtttcggaagtccgcggtcgcgaggaaaagagttcggaagatcaaagtgaagaagcgaggcaagtcacacattccccttgagcatgttgatcccaatttataaatgttttaccgtttgcaaataaatatgcatgttttgctaattacatggaatccgggtattacctgtctgctcgcttgtgccatgtttacttgatatctgtcctttgtcaaccgggagcaataaatcgactaactcatattacttatttgacctagctagaactatatgcttagccatgcttaattaccactagctcagttgatgggataattacagtattagacctttttagtatcagaatgagctgcgtgctcgagacatctggccatgcttcatggtcgtaattatcccactaaaatgcgactgaatggtgggctgtgggtgcatggttttgctagtcgcacccatggcaattaaggaccggttcgcgggaaaccctggaagaatttatcatgcttaccacaagccagcgtgggcaacggctgggcttgtaatgtagctttcctctagctgacgcatccaggcaagggtgggcgtgatggagcggggcgggccctgcgacggcctctgtcgcttccggattcacctaggcacgagaggggactgcccgttgcccgctggggacgggggtgaaacctgaggtgtggtgtgcttggctagagggggttatgcgaagggtcctgtcacagtctctttccgatatgtcgtggtggcatgtcggcgcacgaaaacgtgtcgtggggctgtgtcttgtgggtacagttgtacacctctgatcagagtaaaactattcgaatagccgtgcccacggttatgggcggtcgaccagattcaccgtgattagtcccaccttaataaattgacccaatgcactgtagttcaggtgggttggttgggcctgttcaacgtggtgtagcgttgatcagtggagatttaatgttactttaattactcaactgttttactgttttgctcaataaaatattttacaactgcctttatgcaaatagcctcaaacccctttttgtatccccttgcacgtctgcatcattggtgtggcttgctgagtacggtagtgcttctgagctgaagacgaagttagaagaccaatgctcagaccccagttgagttttgcctgtggagtggagctgaagccccgctaggatcgcctttttccgctactgtcgttctcttttagtgtgagagctaagtgcctcttctgtaagtattttacgctttatttacgtttggaactgtatattacttgtcgttttgtgtaccctggctggtcctggatagggatttaatatacaaaatagtctggaaatttagggctaaatttctgggcgtgacacggcgcctcctcgcggcggccgggcagcgggcccgcagcggtgcggtggcggtcgcattggacgtgctgctgtggctgcaggcggccgggaacaaggggatgttgggctacgacgatgacgatgaatcagccgccgccgacctgtcggagatcatcgagttgtactcgcaggacgacgtagacgactccagccactgcgggtcctagcgccaactctctctttaaaactgcatatatttagttatgtgtatagggtcataatccctcctgaaatagaaataaggtggtgttctatacatagattaattacttctacgagttaaaaatatgcatctgggaacaaatcacaaatgataaatctggttgtatgtatgtgtaatcaatatagtagatagtaaatactgcagcctaatctgctctcttggttctccgaattaaaaaggacatacagctgtagatgtcgaaaaaagtgccgtttttcttgttgcttcttttggtgcattagatgcatgctggtgcccttcacccatctttcaatttttccaaggatgacataagtcatgatatgttacatgctgggcataaggttacgatagaacttatgtgccgcgtattgcataatgctgtctgtaaatatgaagtgcttgaatgatgatttatattcactctcttctcatattagttgaaaacttgctgctggctatctcttcttcaagcaatctaactttctgaatgattttttttacttatgttctgattttatgccatcacttttattttcatgctctggaaactagaaagtgaaaaaaatttgtgttattttgaataatcgcttcatctttacttgtcatgtaaagctattgatgttccacaaatttcattgttcgaggaatgcgtaatgctggaagacctcttgaagagatgcagaagaaggagagcaaaattgtaagtcttatatttttcaatcatgtaaagaggaaaatattactcagacagatgggcgcacataatttttttttcttctgggttgacaagctatcattcaaagaacaaatgtcctgcattttgttgaaagttggccgctttgaggaggcggagaaaacatataggtccctgctttttatgaatcctgataactacaactgagacacctgtgctgtttttttccctcacttaaatttctttgctttggtcttctggtaagctctaaaaacagtgaatatgggttttgaatttcagcatggacttatgctaatatgttgtttacatgccatttttattccttttgacggatatataatatctgatttttagattattgttattttatagaattttgtgattatgcatgctttagcgacttctgtaaaatactttctcccagtttatgagttatacttctgttaagtgtttgtcaatcggctaattcaacaaattttattggcacttgcattttgtagttaatcacgacaacaatttggtctgcaaccacatgaactatccatgaggcaaaaatcatatgttatcacgattgattctgagccttcagtccttcacttatttaatgtccatgttgcaaaactttgcatggcattgatttaagttatttcttgtgtttgtgctctctttgcctaatatatgtatatcacacgcatggtcttcataggaggacaggggagctataccattacatttctgtagcatgatggtgcaaatttagcatgtgggagggttcttagttaacctggtgggtggtgggtttaaacagaggccaggctgctgctcaaacaagggaaaattgtttttaggcacattttaaagcaatttggatagcggcagacataacattatggctattaccagaacctgattgcatttctgaattctgaacatttatgaagttttgtgagatcaggaaactcttttaccatttctttcttgctttttttatgcctaaatcatcttatcttatgttgttttctatagaaaattatataaccttctgtcactgaaactactaccaatttaccgcaaacttagtggaaaccacaactgtaatttactgcttgcagtgctgaaggtctccgcagaagatggcaagggcaacaagtcttctgtgactgttcatttgtatggcccaaatacagacttggtggttgatcggaagagggaattgcaggtgagcatttgaatagtgtgattattgataatgcgtgtatatcatgtcctataatgttccttcatggctgtgcaattggttcatctgttagtcctgctttattttatttggtgcatttttttacagcaagctcaaagaacctcattgttttttcaaatattcaagggcttcttgaccatgaaggatggtgacatttcagtcctattccacaaaaatatgttaatgaggatgtattattaggagcctcacttgtcggttgtcggtcttgattcttcatgtagtttgtagacaactaaggtttggcactaatagaactagactttcagttaaatggacgatttctatgaaggaagatctaatttgcttcgatactctactatctacatgccatttttaatgctcttatctggtagatcattgaatggttagtatgctcaattatgggttgtatgctaatatgggtgtatatttgtctgcaggatttttttcttccctttccctaccatgattctctatggtgaggtatagctttttatttgtattttactcatccaggccttctgctatctgtagtttccgtaattatattcagctatctgtcttttaaaaccgaattactagctatgagctcaaaatagcatattatttgctgtcgaaaatatagatgatttcttatagcccactaaggctgtgttcgctgctggtagttgggaatatttctcccgtgcatggaaaacggagcagtccattagcacgtgattaattaagtatttgttgttttttttctaaaaatggatcaatatgattttttaagcaactttcgtatagaaactttttgcaaaaaatacaccgttcaatagtttgaaaagcgtgcacgtggaatacgagggacatgggttgggaacccatgctgccgaactaagagcaagttcaatagtatagccaactaatagctccaattcatctatagccaatctaatagctcattcatacaatagttatatactacactattagtacctggtcccacctgtcatacacacactatgtcttggagtccgtgctacagctggctacaaatctgtagcccgctgcacttctttctcctcatttatctccttaaaatatgtttgcagctggcttatagcctgctattgtacctgctctaagcctaaggagtgatggctggatagatacgactctctgttattacccccatcgctgttactattaatgcggccagtgtggcatcactgtagttagaaaggaccgctcttacaaggat

SEQ ID NO: 5867 - DNA, 14624 bp, Oryza sativa
ccaccggggcaatcattcaccaaatgcccaacctcatggcacttggagcaatacttaccattgcttttgacaaaatgagtggcacggtgagaaggtttcttacccttctttggaatgaatccaagtccctccttgttaaggatgcaccgttgttcactcaaaatcttgtcaagagtgttcttacccttgaagcacctctccaaactcttgttgagcttggccacttgctccttaagctcattattctcaacaacaagtgaggcattacaaatggaaatacgagagctagagctagagctaggcatatccacaagatcatcacaagaggtagaaatgctagatgatgcaatatgagcaatatggcaagtagcactatcatcaagaaaattacaagatatgccaacatcaatgagagctccatgttgagtggtggaaaggaggttgtcatgagcttccttaaacttctcatgagaaatggtgagtctctcatgagaggtctttagctcctcatacaagacctccaaagaagcatgatccttctttagggccttgaacttgacaatctccttctcactataagcatggagctcctcaaacatactcacaagctcatcataggaaacatcatcacaatcatcatcactctcactatcaataagagatgttaccttagaggagccctttgccatgagacaaagtggagcgaagagtgatggagcctccttgatggcaacaacggccatctttttcttcttggagcttgcatcatcaccacattcttcctcggacctggatgaggcggagctctcctcatttgagtcccattccccgatgaatgcctcaatcttcttgccttcctgcttgagcttcttcatgagcttgtagcctccactcttcttcttagatgacttgtctccatcatcatccttggaagggcacttggaagcaaagtgtcccttctccccacactcaaagaccctcaagttggagagagtcttgttgggtcttctatttcttctcctatttgagttgtagccccttcctctctcctttctccttcccaagagatcattgaaccttctagcaagaagggcaatctcttcctccaagtcctcattgacttcatttacctcgcccttacccatattttcaacttcggcttggagagccatgcacttcttggaaggtgaggcttcttccatctccttcttcttcaacttgtacatgtcattggtgttgatcttccccaagaggcttgcgggtgtcatccttggcatgtcggagttgatgagcatggtgacaagggtctcatacttctccggtagagccctaaccatcttttgggcaacctcaacatcggtgtagtttgccccaagccccttgagatcattcacagtggcattgagcctcccatacatgtcttccacactctcatgaggcaacatggagaatgtctcatattggatcttgaggaaatgaagcttggcatccttgtactcgcttgtgccctcatggatctccgccaacttgttccaaatctcatatgcggtctcaaggttgctcactctatcgaactcctcttggctcaaagagttgaacaaaacattcatggcttgggcattgagttggaggttgcggtgatcaatctccgtcaagggcgtgccggtgatagcaaagcctacatccacaatactccaaatattgtggtgataggaagaactacccaagcctcggtcactagggtagttcttccttcactccgaaggtggtgaactccaaaccactcacaaagcggcatcgggcctcctccataatcttctcggagaggtcaccgggcaactcctccacaagccgtctaggaggcggcaaccttcaagagtaacaagcaatgacccggcgtggagatgatcaatcaagtgccacactagctctacaaatggaagcaatgcacttgaatcttggcgaattaaccctctaacacactagatggatgaacataaagcacaagtgggtgtgagagaggtgcaaggggtgtatgcaattgaattaggtgccaagagagtccccttgccgctggtgggggagtatttatactcccacccaccaaaactagccgttggtggcgaaatctgccaatcattgtgctctgccggtctgaccggaggtatgaggccagtcagaccgtgctactctgcaacggctagaaaactagccgttgtagtgctgtcagagggccccttcggcccggccggtcagaccggcgttgagtgggcggtcagaccggcctcggctcggtcagaccgccatcggctcggtctgaccgaatacggctccgtctgctctgtatcagccaccccgagtagcaccatcccggcctccagggggccggtctgaccacgcatgagccaccggtcagaccggccttatgggccggtcagatcgccgttgtgaggccggtcagaccggctagggcacgccggtcagaccgccactatgtggctggtctgaccgcccctggtcaggccgagcttagtgaaagcaaaggtgagtgtgtgtgtgtgtctgatgaaaaagtgagcacaagtgaaaatgcaatgacctaatgtggcaatttaatcatctctttgctaggtcataagccctcttaatagtacggcgaaactagaaaataaactagcaaatttgatcgccctacacctcgatcaattctaaattaaagcactagttttaccgtcttctttctctttgctttgcgccgtcaattttaatcaatcgatagtcatccatgcgcacacatgacatggacctaacttaaaatattatctcaatagcaacggttagtccacaattagcgcttgtcattaattaccaaaattaacaacgggggcctagatgcttcaatgactccccaatgacggttggtgagtattaccgacgtttccaaccgtcacaaccgtcattctcaacctataaaaggagctctcatcttcacttaactcacacacctcaagaaagagctctctcatattctctcaaattagtttagtattattaagttagtggaataggaatagagtagaaatcgggtgttcggatgtctttggaagagttcggatatagttctagtagctttccttttctctttcgtaagctttgtactttatttagaatactcttctatatacatttatggtattgaaatactttccgagtatatgaatacctactttacattatgttcatgttatactgaatatactgctagcttatctgggagatgctttcgtgccggtataatgttttcttatgcaattactctatgtcatgacgatgatattagagtagtatctagtagtttagatgtggtgtttagattacaggatatcattatttggggttatatgctgcggatgagaggtgggccgctgatggtgacagctcagtacgggtattcttccgcgcgtgtatatagtcctaatttaatttcctggggagggtactccgtatttagccccggttgtatggtcatgacgggctgtcgtaaggaactcggcaattaggagtggcttctcgaagtaccaggagggcatcagatagagtgtattagctagtatatcagatgactagaatatatgtaagtataggaatagattttctctctttattttccttttagcttagataatttagtatgagaatgagtagcttaatacttgtgtgtcactctaccttgaattatcttaacccctacttaggctatgattatcacaagtaatatataaattattagtcaacttctctctaccatgatcttcccacggggattaaataaatatgatacccttggaatactctccggtgaaatgctacaatggtatatctgtgctcttgcggattaactctgtaaccataatataccaggagtatttctgcgccattactgggaattatatttctagtaacgtcgttaagaaataccaacagtaagcaaatgggaatcaggctcatctaccacagcaaacctctgccaaccaacagctttccaaatagcacgaaaattaatatccatacctatctttttcagtagctccggagagtactctcgcgtgtgagcatactcccggtctctcagcatttagtaggcttgtcttttccgatcactgacaaggtcgagatcagcatcatttaggagacgtcgcggagcgtcggcatcctccatcgagagattagtggatgaacgagcgctagactcattatgatgacttgatgaagagccggacccattgaacagataagacaatcgcctcctcattctgcacaatggagcaaaacggactaactcagcgggggttagaatagcaagagtttcacccgcaggctagtttcaccaaagcaacttgtatatatgaaactaagtatttaaatttgagggaaactatcaaagcttgaatgaacttgagagcaaactttggagagggaatgaaaatgtgttgaaatggggtggaattccccctctcggccggctggcttttatagggtacccacaacggcaagaaatgacatgtgggacccactagctgttacactgccaaaagtggcaggtggccgttgcctggccggttcggccgaaccctgggtgggcccaaccggccccactttcggccgttgggttccaacggttagtgtggtcgtggcacaataaattatcgttgaaaattttattttggtttgctttgaaaaattcatttgaagaatttcctcaaaattcaaaataaatcctaaatgcaattctgaagttcaaacatgtgctgatgcaaaaaatttaaattgttgaaaacaaatatgcagatacataccaatttacctgttgactaaggtcgtgtcattttaggtccgacgtgcaagaccatacctccttgcagttcagttcgcggattttctacccgtctccggagaaaaggttccagttccctaacggatctgaagcaatggcaaggaattatgcattgcaaacaatggacaagtcatggcgcggatggaaaaacactctaaacacacaatacgtgaagaagggcaagacaccattcaagacatatgggaaaataacatcgttacaatgggacgaatttgttaagttcaagaccttgccggaagaaatggctaagagtaaattgatgtctaacttggcaaagcgtaacaaatggcaccatcgactgggctcaggtggttacgcacccaagatagaacaatggaacaaagaggaggaggaaatgaagaatgcgggggttccggtgcctatggaggactggaacatatgatccaagcactgggtgaaagctagaacaccgaagatcaccttggaaggcaaagtgcaatttgaagaacccgagctacaggtagttgcagacaagatagatgatctatcaagcaaggaaaagaaaggagaattcactccacagagggagaaggatgtgctaagacaggcgctggggaatcgggagcatggaggccgggttcgaggcgtatcctctaagctgagttggaaagaaggtttcaaacaggacgcctcctcatacaagaaatgtgacgcctataaggacaagttgagggacgaagggggtaagcagtttgaaaaagaattgattgatttctacatgaaatattctattccactacaagagcccaaagaaccggagccagaatatcccttcgatgatttacaagagactaaaccttgtcggttgtatgtcccgattggatgcgctgggaggacacttgaggcagcgaagggaattgttattcctggcagaacgtaccatggcagatttattgaatctgcatatgcaaaagtgcagccgcaagaggtgaacatagagttcgagtcgtatgacctagacatcccaacacctgatggaatcatagtacttggggatgtggtcgaccttgtcgttctgtagcacaaaaaggatatcatatttggcaatgtcgccgctgctcctaaaaaaccaccgagacctcctaagcataagccgttgaaggacaaggcggaagaacctgagatacctaagccaactgaagggccatctacacctgtcatgccgcaaaatgaacaggaggtgcaaattgtaccggatgtccaagaaccggctgtggctctaccagatgtgcaagttctgtcatccatcggtgtagagctggaagacatactgtcacgccctgaatttctatccaaaattccaaacacttacatgtgtgtgaaccctcgtccaggaatcagccgaggcacacaataacaaattgataatagagtacaattattactctaattaataagcgaataaaatgtcattacagaggtagatagttcctctcaaccaataaagatctaagcagcggaaagataagataaacggcgcagacgactccactccacaggcagcttgaccaaggctacgcctaatcctccacaccatcagcgtcactgtagaactcttcctctgatgaatgattgcaaggtgagtatatgacatactcagcaagccacacagcaaatatgcaggtgcacaggataacaaaggatggcatagtagggtttcatttgcataaacagcatttaatacacatttcagaatttaataaagccgttaagtaataattaaacaatattaaaccaacactatacaacataccctgttgcataggcccaaccattctgaacaaccatcccggctgcacagttctatctccaaaccaggaatataccattccaaaccaggagctaaacaaattattaccagttatagcatcttctattatgatgaggagtgtgagactaatcacgaaagacattgttagacccgcccataaccgcgggcacggctattcgaatagttttactctggccagaggtgtaccactgtacccacaagacacagccccacatcatgtcaccatgtgccttaataccaccacggtacctcggaaaggagctgtgacagtacccctcgcacaacacaatccaccacagcgcaccattcctggatcataatcaccccctataaacaaggcatggactccccagcgacccccgtgggcttatctccgccacttctctgtctggtgctccgcaatgaaccatgctatacaaaaggtaaagccgttgcccacgctggcttgtggttggcacggttaatgtttcacaaccgaaactcgtgaaccggtccttaattgtcatgagcacgactctcaaaaccatgtgctcacaacccacaattatcaagttttagttggcaagtaattaattaaccaatcacgattgatcatcgtgaactatcattaagccatcattaaataatagtgagtcataagttatcccaataatgtgctaatgtttctaagtatggctaagcaatcatatctaatatctagctgaaccaatatataaagctcaactagtcaagttataataacccaaggtatcaaggaataaagtaatcaagaacaaaagggctataacaaataataggttaattccacccaatgacattcgaaaataaatacaatagttgaatagaaacaatagctttaaacgggatcaacatgctcaaagggttgtttgggatctgtgtgacttgccttgctggccttggaactcttcaaattcttctcctgcgaaaacggactctccggaaacatcggaatctaaacagaaaagagcaaaaacaccaaacagcacataaacaagcatgaacattacatgtggatatttttaacatgtagatctcaattttagaaaaatttagagacttgaaccaactaaatccgagctaagatggattagttatgaattttcaaagattaaatcggattaaatcatttatatggattttaaatgaattatgacgcaataatgaattatttttgaaaaggaaaaggggtttattgcgtcagcggctagggtttgcggtggaccgggcgcacggcggtggctcacggaaacgaacggccgagatcgatcctatccaaaacggacggctgagatcgatcgggtctacggcggctcacggcagacggaccctgatgacgtcagcggcgacgtcatctccggcgacagctcggcggctcgggcgcgcaagctcgccggcgaacgacggcacttcggcacgaacggagggcaccaggacgatgcgggcatcacggcgaactcaccggtgaccaaagcaacggcggaggagcaacggacgacgtcggcgacgaggtcgaagcggcggagaccttcggcttgacgacgacggcggtgctccggcggcctacagcgatggcgaaggggcggacgaggacggcggcaacttggcgaccacgatggcgacctccccgagcgacgacgacgactggaacaacggcgaagcatggctggagcgacggcgacgacagcggcgcgaggtccacggcgctagggctcttctgacggcgagagacgaaggcgagggtggcggcgggtagaggagacaccgggtcctgttataggggttggaagacggcgacgaaggcccatggcgaccggcgacgagaaggaaaggttagggttcggaggagagaaaccgatccgaatcgacctcgaatccacggatttccaaagcgatttagacgatgattccaaaagagaaaaggtagaggagatcccgaagatcatttcccctctattgatttcaccagagaaggaaaggcgcggccgaatttggaaggagacggcggcacggctcggctagggttcgggcggtggcggccggaggaagacgacgggtccgacaggtgggacccacctgtcagcgaccgagtgcgctcgcgcgggcggctgctgctgtggactgggccgacttgggccggggagagagagaaaagattttgggccgactttcggcccaaagccaaaagagacttttaaaaaaaattttcaatttaaattattcatgaaatgcaattccatttattaaaaatacttccttagctcaaataaatcccagaaaaatctaggaattatagaattaagcaaagtatttaatgaaattttatctggccccattttatattggaatttattaattaaaattagatcttctcttctaggcttttaaaataaattctaataattccatttaaacaacaatttatatatttaggatttttagggtgtgacacataccaacattgcaatgggatgaagcagaaccggacatctataaggacccaaatcctgcaaaggaccctgttgaggagaccctcgtgaatgacacggccaaagataagtctgaagtgcctagagtactcagaagccacgactccaagaaaaaggatgaacacaaggagaagtacatggtaagcgtcttcaagggggcaaggaaagagcactactaagaggggatgatgataagaaggcagctgcactatccggaccaaaatacgtctggactgatgactgtccggaaaacttcgaacttggctaaacttttctgccggattgggcacttgatgaggttcgatgggagatgagaaggtttcatacatggtacatggaagccagcaagaaaggcctacctaatttaactattcaatcaccggcaaatgcttttgccggtgaaggattcttctggcttgatttcaatgatctgcacgccatctatcgtcgggaaaagacggacataaactacgttcctgcatggtgcttgtgagtacaagtgtttatttattgcacgaataagtatgtgatcaattattaacaaattgcttttgtaggatgcaatccatagatgctaagaagatcggtgaacctattggatttctggatccaataaagatctgtcaaactcagcataccatgacattatcaccaaattctgaccagctcaagggcaagactcctgcagagatagcggaatacaagaagagcttgcacaagcagaagatgattattgtcgcacagtgcatcggacgagccttcttgcacttccaaaataagagagtcatcaaggccacgtacaacttcaagtaagtcaagtagattcattgtacatacctatgttatttcatatgtgagtaactgcatcgccattactatgtagcgatcattacatatgttccttatcgacccgaatgcaggcgtagtgatggtcctggacccccttgattattctcacatgacgtatagacattttctacaaatcttacaatagtaagtgattctcatacttgcatgcctactattaatgttttataattaaataacggtccttaatgcgaaacttttgaaaattccatacaatgcgtacaattactacaagttcaagggtggagaacaaactaaaacaagggagaagctgctagtacatacgtattgcccggtatgtaatacttataactcacttaatgtatttcaattgttttattaatttcaaattttaactatttccttctatctcatgaagtgtcacaagcaacctaggggcactatcctctgtgggtactacgcatgcgaatacctccgggttactgggaggtatagggttaacgcagaggatgtaagtctctcgactcaacgtacaagtctattggaccactacacttatgaatcgtactaatgtattatcattctttcgtgtaaacagttgcctagtattgagcgtcgagaaggattcgacgatatgagcattaaaaatgtgcaacaggacctctgccacttcatccaccgcatgtgttgtcatgtcttaggcaagttctttgacccagacaacatccttgatgaggacacaagtagctcagatataaccatggttaccttatgtattaatcaaacaaaggtgaatatgttctacattcgatttacttgttatatatttgaacaaacgatgctacacaataagttttgtgtgttttcgtttgcagaggtacttgcttgaacgaaagaaaagaggccgagcataacgaatgcatggaatatccaagaagttgattggggaccaaatcaagaccttctccaagtcgacttcgagtgcaattcggagcctaggaccagtatgcacgaaaacgggcgcccgggtcgcatacgtgctctgattggggcattctttatatggatggaaagctaagaagataacctttccaatggtttttgtcccacgtccaaattctttccaagtcaacggaaatcaaccgaacaagttgacgtccagaatctatcccggtgctgcgtcaccgtatttgggcctttgggtcgtgtatcatgttggaacccattagggttgtgtcaagaggggattgcacgaccctaaactctatatatcagtagttgccatcacctttagattttgggttttgcttagattattctgtcgagaacagtttcgccgctagatcggtttgtaagaccccaacttgtgagtttaatcattcatctataattttggttgtattttatctcattcttgtttgtgttcttcgatgggcaaatagggattagccttcttggcgaggtcatccgtgtttcgacacgggtgataaccaaaggagacgtggtgctgcaattgcggggctcaagagcgtgcgcgttcaagaagccggatcaatttgtgtcgcgacttcgcccaaatcgttgtttatcagaacatttcagaagatcgggaatcctagtgcacatcaatcctggctacaagcgatgaattcaaggaccttcgggagtagagtaacgcgatgccatgacatggttattagttacagattacagtgtgcattcgaagtgaacaatataaattaatgtacaattttttgtataatgctttgaatgatactttgaatgcaatacatgtcagtattgaatgttcattagttactatcattaattatgaattaattaattaattgcaatattattgaaaaaattattaatacaaaatttgcggctatttcaattcttgatgctattttcctaggcggtcctattctatcatttcgggcgggcttatcttatcttcccaggcggtcagtactagctcctagccgcctgggaagaacatgttcccaggcggaccggccgcccgcctgggaagatattctacttcccaacgattgtctacaggcggaacgccggtccatctgggaaggctatttttgctcgcctggaaatacttttttctagtagtgctcaccccttcaaaaaaaaatttcacacctatcctatctctctccttctccagatatttctctctaactctcctctcctctcttcctctcctctcactctcctctcctcaatctctctcttgcctccgagccgggtggcggtggcaaatactgtgttttttgcaaacgcaaatctatttcaaggtacagtgcagcaaaactgatcacatatcattttcttatgaaaaagatttacattaaaaacaatgacctgatcatattggtggtctttgttggacatggtggcacggtctattgtataactataccaggattcttttatccgtcgtagtctggactacggatacagacacaaagctgtggtcctaagtgcatggatgttgctataatcaaagttgtttatgggcttatggcatgtactgtaatctagatgtagatagggcgccaaaggagataagcacaaggttaggccatcatgttgtatcctaagtaaatgattgttttgttcatctcaatttcaagcattcatatgattggatacaagagtatatcaatcatactgagctttttcagttggtgcttaataatctaaacaagtactccatccttccaaaaaaaaaagacaacctaatattcgtatgtgacacattatattacaacgaatctggacatcttagtacgtggtggttttttttaggacggaggagtacatagtagtagtgtagtactgtatcagcttagcaaattggctccattatggccgtgtttagtttcctccctattcccatctttccagcacatcatatcacatcaaaaatttttctacacacataaactttcaactttttttccaaactcctaactttcttcaaacctactaacttttttcagaaactaaacacaccctatattgctcctcacgaggctcgtgctatcatgattctatttttcacgacactaccattgacttcaccaaatcgaagtcttggctgccccttggtttcagtgtttttgccgcatgaatgagttgcttgtccattcagaagtttcatggaaacagcttaattaagagcttggaagctaaagcagggtttttaatctgtaatcttggaatcatcttcttgttgtatttctgcttattctttttctttcctttcttttcatatgttcttggggttcccaagatgggaacgtgatcagtctaccttgagagtggctttcttgaggatgatcagctaggcaatacatcacttaagaacgtttctatcctttgtggcgatttctccagttcatattgggcattcctccgagggagcgcttggattaatcgccgaggttttgagatggtaagcaggccgaatcatcgttcaaccgaattcatctcatgcatctctatttttatcctatattttagcttgtaccacacatatccttgattccttatacacagcctgaaattgattcgctatcagaaaagtttttagttggggtacacaggtaccaagaaagcataatgcagatgcatagaatacttattgtttgttagatggatcacaatatgaagattccaaagatgttcccctctagctttactttgccaaaaaaatttagctaagaaaagaaagacaatgacataaacgataaaccatactacaatttagtatctgcaaagttcaggaaccaatggcactatccagcgcactatatttcttcagattcctctctgatgactgttctagttcgttatttgcgctcgaattcttagttcttacacgatttttttttctttgccaggatgctctgatgaaccggtcccgcgccttcgcggaggcggtggtgatcatggtgtgcccggtgctcctcgccgtggccctcaagaaggtcgacctgaagagccaggagcgcagccgcgccgtgccgatcttcatgcttgtcatggcggccctcaccctggcattcggcaccgtccccttcctggctctgtccctctccaagaggttcagcgaccacaggtggagactccccgccaaggcgaccacctggctggctccctcgtcgtgcgcctgcctcgtcggcctcgcgtgctggatcatacacctcatcctctccgcgcgctgggcttacgcgttcccggccatgggcaccgtgttcggcctctgcatcgtgatccactccgtccgctactgccgtgcagggggtgacctggctaacctggtacatcctggtgatgtgttgcatactaccgatgagttaactgacagaaaaaggagagaggctttgcagaaggcgatggaaggcaagctggacgagtcgctggagttcttggcgggggtcacggcgctgctgttcctggggctggaagggctagcgttggagggccagatcaatggcggacagggtcgtctcgccgcgcccatggggctatgcttctt

SEQ ID NO: 5868 - DNA, 16456 bp, Oryza sativa
ccggtgatagggctatgttcaccacatttgaagtaggagggaaagaacaagagaaagtgacatttggagacaatagcaaaggaaagataattgggttaggtaaaattgctatctccaatgatttgtcaattgataatgtctctcttgttaaatctctaaatttcaatttgctttcggttgcttaaatttgtgatcttggcttgtcatgtgctttcttcccgcaagaagttattgtttctagccttcttgacaagtcttgtgtgttcaaaggttttagatatggaaatctttatttggttgatttcaattctagtgaagcaaatttgaaaacttgtttagttgcaaaaacttcattgggttggctttggcataggaggctagcccatgtttgcatgaatcaattgagcaaactttcaaaatgtgatctagttgtgggcttgaaagatgtgaagtttgagaaagataagctttgtagtgcttgtcaagctggcaagcaagttgcatgttctcatcctactaagagtatcatgtccacatctagactattggagctcttgcatatagatttgtttggcccaacaacctataagagcattggtggtaatagtcattgtcttgtgattgttgatgattattcttgctatacttgggtgttatttttgcatgataagtctattgttgccgagcttttcaaaaagtttgcaaaaagggcccaaaatgaatttaattgcactgttgtgaaaattagaagtgacaatggttccgagtttaagaataccaatatcgaggactattgcgatgatcttggtatcaaacacgaactttccgctacctactcacctcaacaaaatggtgtagtggagaggaaaaatcgtacattgattgagatggcaaggactatgcttgatgaatatggtgtttccgattccttttgggcggaagccataaacaccgctttccatgcaaccgataggctttatttgcattgtctcttgaaaaagacttcctatgagctaattgttgggaggaagccaaatgttgcatattttcgagttttttgttgcaagtgttatatttatcgaaagggtattagactaaccaaatttgaaagtcggtgtgatgaagggtttcttctaggttatgcctcaaatagcaaggcataccgggtctacaacaagaacaaaggtattgtggaagaaaccgccgatgttcaatttgatgagactaatggctcccaagaggggcacgagaatttggatgatgtaggtgatgaaggcttgatgagagctatgaagaacatgtcaattggatatgtcaagcctattgaagtgcaagacaagtcatccacctccactcaagatgagccatctacttccgctacgccaagtcaagctcaagttgaagtgaaggaggagaaggcacaagatccacctatgccaccaaggatacacacccctctttccaaggatcacccaattgaccaagtgttgggtgacattagtaaggatgttcaaactcgatctcgtgtcgcttcgatttgtgaacattacctatttgtttcttgtcttgagccaaaacatgtagatgaagctctttgtgatctggattggatgaatgctatgcatgaagagctcaacaactttgcaagaaacaaggtgtggactttggttgaaagacctagagaccacaatgtcatagggacaaagtgggtctttaggaacaaacaagatgagaacggattggtggtgagaaacaaggcaaggttggtggcacaaggtttcacacaagttgaaagtttggactttggtgaaacttttgcccccgtggtaagacttgaggctattcgcatccttcttgcatttgcatcatgctttgatataaaactatttcaaatggatgtgaaaagtgcttttctaaatggtgaaattgccgaacttgtctttgttgaacaacctcccggttttgaagatcctaaaaattctaaccatgtttataaactctcaaaagctctttatggtttaaaacaagctcctagggcttggtatgaaagattgagagattttattttgtcaaaggatttcaaaattggaaaagttgacaccacccttttcacaaaaatcattggtgatgatttctttgtgtgtcaaatttatgttgatgacatcatattcagttctactaatgaggtattttgcaaggaatttggtgatatgatgtctagggaatttgagatgtccatgattggagagtcgagcttcttccttggacttcaaatcaagcaactcaaggatgggacgttcgtgagccaaaccaagtacatcaaggatctactcaagaggtttggcttggaggatgcgaagcccatcaagactcctatggcaaccaacagacatctcgaccttgatgagggaggtaaaccggtagatttaaagctttatcgttctatgattggtagcttgctttaccttaccgcatctaggccggatatcatgtttagtgtttgcatgtgtgcacggtttcaagccgctcctaaggggtgtcacttagtggccgtgaaaaggattataagatatttaaaacaatcctctactattggcttgtgctacccaaaaggtgctaagttcaagcttgttggctattccgattcggattatgccggttgcaaagtggatagaaagagcacatccggtagttgccaaatgattggtaaatcccttgtgtcatggtcatccaagaaacaaaactccgtagccctctctaccgccgaggcggaatatgtttcggcgggtagttgttgtgcccaattgctttggatgaaacaaacattgttggactatggcatatccttcaccaaaaccccactcctatgtgacaatgatagtgccataaagatagccaataacccggtccaacattctagaaccaagcatattgacatacgccatcacttcctaagagaccatgtagccaagtgtgacatagtcattagccacataagaatcgaggatcaactagccgacatctttaccaagcctcttgatgaatcccgcttttgcaaattgaggaatgagttaaatgtcatagatttctctaatgtggcttgagatggtgcacatggttgcttctttttgcattatgtatatttgctctcatttgctcttatattttggatttgttgccatttggttcttcattgcgaaaatggagcatctcactttaagggggagatttgcactcttgcatgtgctctacttccctttatatgtgatcaaatcaactagtggtgctagtagtatttccaaaatgcccaagttaacataagtcaaaacttttgcaaaatcaatgtaatttgaaaactatctcttggaaaatgtttcaaaaggtttcctatatgttttccaagcctcacattgcaagaaaaatgatttttgaatgaaaatgccattttggccctcttttaaagaaactagattcttagttttggccaaaatgagatttttccccaaaatgagattgagaaggaatttgagaaaagtttcaaaacaaagttggtagagaagaagatttgaaatgtttttggtattcaaacctatttcaaaaaacaaatcattcaaaagttatttgaaaatcaaatttgcccaaaaacccctatagaccataaaaggtcacctcctagcacttaagtgagttttgttgcaaatcttcataattttcaaatgttatgaatggttggcaatatttaaactcacacatttcaaaatttgctccaaaagtcatttttttattgaattttattgtgtgggggttgctgacttgtgcaagggctgtgcacagccggcagggggcttggcggtctgaccggcactatatgtgcggtctgactggccaggtgcagtgtcacgtcccaaaacgactctaaaatacattctctaaattatgtctagaataattaaaatccgtgtgaaagcctccaacaattaaaaggtgcaaagttaaaagtcaaataaggcttgggggacttttgtatatttcctaaaagcctaaaatacgtaaataaattttagtggaattttcagagcacaaataataattattaagaaataaacaaagttgaaaaggttttataaaaagaaaaactctaaaaagtcccctttccctccctctccctcttgggccggctcggcccatctccctccctctccctctcctctccccgcggcccatccggcctatccccgcgcgcgcgccgctgacgggcgggcccgcccgccaccctcgctgatgggtggggcccacccgccatccccttcctcccgccgctcccgccgccacccccgcgccctagcgccgccgccgccgcggattccgccgcatcccgccgtccccgtgtgcaataaagtggggagaatcattccccgtgattccctctccctttccccccatttttccctctctctctcgcgttcaaacgggcggatttgcccccgcaaatctcgccggtgccattgatggcggccggacctcccgcgccggtttcctcccttccccggccaccctctctcgacccggctctatttaaaccctccccgcacctcctccgtccgtttccgcctctcgctgcccttcctcctcgccgaaatcgagctcgcgccgtcgctctctctctccgccgtcgccgtcgagctccggtccgccgccgtcgtcgccccggaccacctcccacctcggcgccgcctccttcggcttcgccgcatcctcgccgacctcgtccacccctccgtttcggtcgccgaccgccggaacgccgtcgacctcgtcgacccgagccgcgccgccgccttcctccgctccggccgcctttttcgtcgtcgccgtcgacctagggtgagccgaggaccgccgcctcttttcccccttcccttcccctctctcggccgtcgctccgccgtgcctatggccgccggcgatcataggggcgcgggcgccgcctcccgctggccgcgccgagtggccgccgcgtggggcccggccgtcagccgcccgcgacctcgggtgcggctgacgcgtgggacccacggcgccggccggtgcgagcccgggtgcgcccggtccaccgtggaccgtgaggctgccgcgtgggccccactcccgtggacccggtccgcacgccccctcccctcggctgacacaataaacccttttaaaattaaaatttaaatgaagaaattcgcaaatattcatttaaagagcatataaacttcaaatgaccataacttggccatttgaactcggaattggaccgttcaagtctctaatttttccttaagaagtcaagaacccatttttgtactttgttcctacttgttacatggagtttattagagtaaaagccttttcttttccattggtcgtgtagacgctgcagcttcggaagatccgctcttcgtggaggttgaagccgacgtttgggaaagcgagcaaggcaagtcacatcatccttgaacatattgaatcccagtttataaaattattttgatttaaattattgcattaccgctttatttaaattcccgcgttatcactgttttatctagccatgcctatttacctttgttatgaccttattattgttattgttattatttccttgttcaccctagaataaacaaaaccccaactagtggacactctactcatggtaccactagtattattttaggtagatgcttcgctggttaattaggcaacattaggtggttttacaactctaaactttgggatattcatatcacctggacactatggaatggttggattattgtggaattggattcacacctccccctctattcaaaatcctcaaaatggttttaggctgggctcggggtgcatggttttgatagtagcacctcggccatataaggaccggtcttcgggcctctgttgcaaagcactaccgtacttccacatgtctagtgggtaaggcttattttgtggctcagtctggttataaacaaaagtacacggaaggagatagacgaagtcaggggtcgatggacatctctagggcaaatgaaggctacacgagctgcagcccggtagtcgagatgtcatggcacagggccggtgtcctgctgctaggggctcagtcctgcctacctgtcccggaggttccggccgtaggtggggttgggtcggtactcttgtctatggctaggatgggttggaaactatgtcacgtcttccgtccgtataccgtggtggtatgtggcacgtggttacacgtgaggaagatgtgtcttgtgggtaaagatgtacacctctgatcagagtataatctattcgaatagccgcgccctcggttatgggcaagccgagcaatgtacccaagttagtgttttaattcttaaaacctgcttaacaactaaaatgtggaatggttggcctgggttggcttgggacgagctgggacccagggtcgggttgccagttcggtctgaatcatcgtaggccttgggttaaggcaggttcgtgtgggttcacggccttgattaataatattgtatagctctagaatcgtgtttacaaaatagctttgagcaactaagtgtcttttaatgctgtttactgcaaatcctaaccctttatattataacccccttctactcccttgcatttatcctgcacttgtgggtgtgtcttgttgagtacggtggttgtactcagtcttgctcaatttttcccaaacccagaagtggagttcctggaagatgaaggctttggtgtctagctcgtgcctgccgtcaagcgcctgtggtcgtcgccctagtcttccgctgtttcccgtttgtctttgtgtgtgctgggcctccgccgcccatgtaataaattaactatttacgcttccgcttgttaaactctgaactgtgtcaacttttggtgtaccttgcctcctgggacaaggaataatgcacgcacgtaaggaacgcccgttgggttatttccggtcgtgacatgcggcggtctgaccggccgaatagggccgatctgaccggccgaggtgggcccaggcagttttgccccttttcttctccatcctgcacctaccctctcccatctcatcccgattcatccccaactcgaaaaactctctctctcaccttccctcaaaccctaactcttttctccaccaaatcccctcggtttgaccgtggatttctctctggttacaccgtaagtgattctcctccgcttcctctctctattccatggattcgttcgtgtttttgttgagtttttatccatggcatggaaccctaggtgaagaacgaggtgttcttcgatttgcaccagtagagggtagtttcttggtgtgattcatccccttcaaccggtaaatcactatctctcttgtgcattctctcaaattaatctatttcaccctagggctatgggtagttattccaatcctgatgaattaggccatattctttgatgttctagttccaatcttaagctatattgttctagcaatttttagactcaaatgtgaagatgtgaaaatttttgaatgcttgaacttgtaggaggagatctgcccagagccacaggcggtctgaccatgggtcagtcgccggtctgaccggcgtgtgcgcccggtctgaccggccggcagccgtcggtctgactggccaccagcgggcggtctgaccggcctgatgccgtcggtctgaccgaccctatgggcggtctgaccggcctgatgccatcggtctgaccgccctactggctgtggtctgaccacccctccataggatataggcaaattttcacctctccaaattgtttctagaattattactaatatctatcatcctttgctctttgatagtgatgcctccccgcactcgccatggtcgtcgtgcacccactccggatcccgtgagtgagcctgaggaatcgtgcggcaatgagtacgctcaaagtgatgaagaggttgaggtcaatgttgaaggggctagtgaggaggctagtggagatgatgacagtggaagtggagaggatgaggatgaaggaagtgatgatatgcatattgatccctccatcgcaatataccatcttgaggcaccatgatcagtttttgaggcctcgggacaccccggatccccgttttcacaccgctttccagaagagtgtgtatgagcaggtttatgcagggaaagcttttgtagagcataagtggatttcttggagagacacaatgagactccagagtttgagggcttgcaggatctcttcaagactgttggcattgaccagattgtgactctcaaacaagactacaatgaagatttgatccggcagttctatgctacagtgtgggtggctggagactatggtgagatgaagtggatgtccaacacccttcaatgttctatctccaggaggtaattccggcgactcctcaatattcgcttggactttggagatgacttgcatgaggagcacacccataatccgctctctatagactatttctctcagttttatgaagatggagtgcagtacacacatgggaaggttgctggcctgacgactatccccagtgtggttaacaggattgtgagagctaccatcctctctcgccttggtaacaatgatcatattaggggggcggcttggcacgtcatcgatgccatcatttagggccgtcagttcgacattgtgtctctcatgatgcaagagattgccatctccaattggacctttacttagggaatctattatgccccttacatcatgaggttgattcaagacaagcttggggctgctgggcaaaatttgaagaagcacaagcagtacaagcccagccttcagcttggagctccccgtgctcctagggcggcgccctcctctcatcctggagctagctcaagctcagcacctcctcctcctcctgggtatgatccaaatgctttcttctatccacagtatgcttattttggaatgcaacccaacgaatacttcaacctggtacttggggctattaacaccctaagtgaaagcattcaacacttgtctaccgggcatgaagcattacatgaggatgttcgtggcttgcgtacggatgttggagacttgaatgcttccgtggggagattgcacactagagtgggtaacattggattctcgagtccaaatgttggagagctcccaagtatttgtgtatccacttcagcgcgtcctccttctcctccacaagagtgaagaccttttttgtgcttgatgccaaaggggggagaaaagtgtgctctattgtcacgtcctgataaattcatcccgaaataaaaatcatcttctaaaaggaataatagaattaattaaaattcgaaaagaaattggcaaaccttaaaatacgtacaagaaaaattcaaatgtgacccggagaatttttgttaaattctccttggtctaaaaggagccctcaaattttagtggaattttcagagcacaaataataattgaaaagaaataaacaaagttgaaaaggtttataaaaagaaaatcctaaaagaagtcttttccccctcctcctcccttcttgggccggctcggcccattccctccctctctctctctctctccccccggcccatcggctccccgcgcgcgcgcgcgccgctgacaggcgggcccgcccgccgccctcgctgacgggtggggcccacctgtcatcgccttcctcccgccgcgcccgccgccgcgcccgtgccctagcgccgccgccgccgcggattgcgccgcatcccgccgtccccgcgcgcattaaagagaggggaattactccccgcgtttccctctcccgattccccctcttttccctctctctctccctcggattcgtccggattcatcccgcgaagttcgccggcgtcttcaatggcgcccgagatctccgcgcgcggtttcctctctccccggccgcgctctccccctcccgttgctatatattcgatccccgtgcttcgctcttccgtttccgccgctcgccgctcgctctcgccgtcggtttcgtgcccgcgccgtgctcctctctctccgccgtcgccgccgaccttcggttcgccgccgccgtcgctccggtcttcctcccggctcggcgccacctccctcggcatcgccgcatcgccgtcgacctcgtccgcgcctccgtttcgctcgccgaccgtcggagcgccgccgtcatcgtcatcccgagccgcgccgccgtcttcctccgctccgtccgccgtttccgccgccttcgctgcctcggggtgagccgaagaccgtccccttcgtttcccccttccctcctctctctcgggcgccgctccgccgcgccgatggtcgccggcggtgaccatcggggcgcgggcgcgccgctcccgtcggccgtgccggcgaggccgccctcgggcgcgccctcgcggctgccaagtgggcccggccgtcagccgcccgcgcccgcgggtgcggctgacgcgtgggacccacggcgccgaccgccgccagccgcgtgcgcccggtccaccgtggaccgtggggctgacgcgtgggcccccaccccccgtggacccggtccgcgcgccccgctccctcggctgacgcaataaacatgatttttaattaaaatttaaatgaagaaattcgcaaatatccatttaaagagcatataaacttcaaatggccatatcttggccatttgaactcggaattggaccgttcaagtctctaatttttccttaagaagtcaagaacccatttttgtgctttgttcctgcttgttgtttggagtttattagagtaaaagccttttcttttccgttggtcgtgtagacgctgcagcttcggaagatccgctcttcgtggaagttgaagccgtcgtttgggaaagcgagcaaggcaagtcacatcatccttgaacatattgaatcccagtttgtaaaattatgttgatttaaattattgcattatcgctttatttaaattcccgcgttatcactgttttatttagccatgcctatttacctttgttatgaccatattattattgtcattgttattactaccttgttcaccctagaataaacaaaaccccaactagtggacactctatttatggttccactagtatgaatttaggtagatgcttcgctgattaataggacaacattaggtggttttacaactttagactttgggaaatattcatatcacctggacactatggaattgttggtttatggtggaattggacatacacctctcttcccctttcaaaacccctaaaacctgttttcggtggggtttgggtgcatgccagttgtgggaagtagcaccccggccactataaggattaagctcgggcctctgttgcaaagcactaccgtacttccacatgtctaatgggtaaggcttagtttgtggctcagtctagtcataaacaaaagtacacggattggagatggatgaagtcgggtgtcgatggacattctccagggcaaatgaaggctacacgagctgcggcccggtagtcgagatgtcatatggcagagggttggtgccctgctgctaggggctcagttctgcctgcctgtcccgggtatcccggccgtaggcaggattgggtcggtactcttgtctatggctaggatgggttggaaactatgtcacgtcttccgtctgtataccgtggtggtatgtggcacgtgtttgcacgtgaggaagatgtgtcttgtgggtaaagatgtacacctctgatcagagtataatctattcgaatagccgagccctcggatatgggcaagcctagcaatgtacccaagtcagtgttttaattcttaaaatttgctcaacaactaaaatatggaatggttggcctgggttggcttgggacgagctggaacccaggtcgggttgccagttcggtccgaatcatcgtaggccttgggttaaggcaggttcgtgagggttcacggccttgattaataatattgtatagctctaggatcgtctttacaaaatagctttgggcaactaagtgacttttaaatgccgtttactgcaaaacttaacccctatattattatctccttgtaccccccttgcatttattctgcatttgtgggtgtgtcttgttgagtacggtggttgtactcagtcttgctcaatttttcccaagtccagaagaggagctccttgaagatgaaggctttggtgtctagctcgtgcctgccgtcaagtgcctgtggtcgtcgccctagtcttccgctgttttttttttgttgtctttgagtgtgctgggccttcgttgcccatgtaataattctatatacgcttccgcttgttaaactctgtattgtatcaacttttggtgtaccttgcctcctgggacaaggaataatacacgcacgtcgggaacgcctgttgggtgatttccggtcgtgacaagttggtatcagagccatctcgactgtaggataagccaagtggataaaacctaaggacatattttataaataaaactatttgcgaaagttcctctttttctccttcccctaatgttatttgcaaaaggtttactcttttcttccttcttcaaatttcaactagtactagatggtcagctttgcgaagaagaagatgtcgtcagttgtttgccgaagctccggaagactgttggatccgctagcgaagcaaaggaagcagtgaagccagctgtgaaggagtgaagatcttggagaacccgtcgcagaacctaagccaccctctagtgtttcgtttgtcgtgtgtttccttgcttgtgtgtgtagcgcgtggtttgcatcagtgggttgtgatgtaaccatgctaggttgtttgcttaatcaacttgcagaataagcctaacatacatcataacagcaaaagacttagatctgttaaggtcctatccttagtttccaatctgtctctcccctttgttttccctctctccctctccaaacctttgcaacagatggctgacaatgagaaaggcaataaggtcagaagtcaggacattggtacctcaagctcccgagtgaatgaagcaccagacaccagttgtgtggcagtggtccaacacctgattaaccagaaccaattgcttatagagatactacagcagcatcggatgccaattttgaacccgagtcagatgcaacctcaagtgcagttggaggcagtccaagcactcacaccacaagtcagcgcatcgccaacatcccagaaggcccctcatgccatgccacatgttgacccaaaagaagccagtatcatctgttttatgtgtgatgagcaagggcactatgcaaggaactgtcctcagcagaaaagaaaagcaccaatgcgaaccgaagatgaagtccgtaagatgatcattaccagcacagaatggcctccaccaggaatgacaaaacatcagagaagaaattccttccgaggtgcacaacagttgacagagcatcttttagctaatggaggtagagtgtctgatagtgaagattcagatcaagtctcctcagatgatgaagatgaaatggaacgtaaggcatgctctcgttgtggagaagtcggtcatgttgccagctcgtgtgccactacctgctttcattgtgaggaagaccatccacccggtgaatgccccatgagcaggatcacttgtttcttttgtgaaggaactgatcatgtaccaaaagattgtcaattcagttttctgctgacgaagaagatggccaaccaacccgccagttccaacggagagaagcatcaaggcaacacaaatccccgccaagattacagtttcagcctcactccagtgccaggacagaggaatcaaaatgagaaaagaaaatgccgagtccgggaagatatctgttgcttcaattgtcaaggaatgggtcatttcgccgacaagtgcccaaaaccgagaaacatagctgccagcacgtcagtccacgcagctccctgcaatcagaagcttgctcctcagcgaattgtcatccatgcatcccaaagcagtcctatggcccgcgttgcaacagctccaactccagcgagtgcattaccacaaggtgtcaatgctcactttcagccccagcaaagaattgtcgtcgatggaagaagttgtgtctctccccgacctactccaggccaagcaaagggcaatcgacctccggagggcgataccaagcagaagaccgtcatccgcttcaaccagcaatcagaaggaagcttctcctgtgaatgatagcattatgcagtcctatcacatcatcacagaaccaatcgaggatgcagtcactggaacaatgccagctatatctctccagaatcaaaatgagcagccatgtttgtggttttcagtccgctacttatcgtggtgtaatcgaaagtttgcagcaatcatgtaatacataaatatattcatgtctataaacagtgagcttgctatgcttatggatgattcatattgagaatacaatgtaccgatgttaagcaccgtccctttttgtttaaagcagtgcctcgtattcatgtaatgagggagaaatgtgtaatacagacaagttccatgaggattcgtttgaaagatgcggatatgtgatcatgtgtataattgtttactgacaaaggagacctagggtctcgtgtcagaggaactatattctaacctcgagttaatagccaacctgtggatggaaaagaaaaacaattaaactgtgttgggttaaaaagccaacgagacagtagttgaggataggagttcggatacgccttttacagatcaagataaggattgttggaggaaaccccgaagggtacctgccatacctctacattgataagatcggatatacctgccaacagataaggagatccaggagacatcaatatttgagaacataatagtcgatggttggtaattagtttatctggtatcagaaaaaggtcaacggtgatgtggcagaagaacaatttggatgctccccatctcgaggaagcactaaagatgaccatcggcaattaaaccctagtggtatagatacggatagcaggcaatgtatttccctgaaggtagtcagtgcagcttttgacgcaccacttcaaggtttcactgaaaggcaacaagccaaaggacctcatcatccccagaagcgtccgcaatccacattaaagaataccccctgttagagataagccgaaagaagattgataaaagagattggcaaagatgttctctagcatgaaagaagtaggccgaaaggtgattgataaacagaaacatgctctgcatcgctcacggaagacccctgattgtaattgcccgcaacagtcaccttgtcattaagtaagcaagatgacctaggtaaaagtgtttctatgaaggcaaagagtgaaatcttcaactcggtatcagatgctacacggagtgaaaaatgcaagcaccggttaccaggcaacgccatgtcctgggagatgatccaacgggaaagaactcatcaaggttaaaggtgtaaaggaatacgttgagtgctaactgatgacaacaggaagagaatagcggaaagtaaactgaacataaagaaagtgaatctgagttgcttgttcgtgggagctattcccagttatgaaccaagtgatatgttcgaagatagtctacagaggtcagattaagatcacctctaacaacgaagcttcagatctggcaggatcacgatcagacaataagaagtccagcagtaaaactatttgggaagacgtcaaagtatgtcaagtgggataaattggttctcttgggaagcataacttatagttagagtggttgacccttgcatcgaatagccgaagtacctagcaccggagaccaggaaagctaatatgagacagttgatggcaagttagaagtgaataacaagcatgatattcttatgatgacaaacatagtatcctagtaatgacaagctagtgttgacgcatgacgtgaagtggtaacttgtctgaggttgactccgaagatatgaagcatgagaagttctggaacggaagcatcactgcactaccgcaacctagtctgagtcagccaaaaggtgcaccctggtccaagtcaggtgaagagaagattccatccgcaacaggaggtcaagccaagcagttccgagtggtgaagttttgctggaagtttgtcaagacgcgacggaagaagtcagacaagaagagaagaccgcccaacctatcttcttgctagcctcctcgaatctcggggacgagattcttgtaaggggggtggatttgtcacgtcctgataaattcatcccgaaataaaaatcatcttctaaaaggaataatagaattaattaaaattcgaaaagaaattggcaaaccttaaaatacg

SEQ ID NO: 5869 - DNA, 5574 bp, Oryza sativa
ggagaaggcggggagaggcggggcggccacgggagagcgcgggagggggctaaaactggagaacttaccgagggggttccattttataggggaggatagggtgctggccacgggaaaggcggagaacggcggcggaattcgtggccggctgccatggaaggtggccggggttggcgcgggcgttcccgacgattgggggcacgaatcaagggggaaaatgggggaaatcaaagaggaatcaatggggattaattccccctatttaatttggaaggagccgacttgaatggggcggatttggaggaggaacggcgctaggtttgcacgggagagagaagaggccgtgcgggaggaaggagatgaccgggtgggtgggtcccaccagtcaggcgcgcggtcagcgcgcttgcggcgcgcgtgagggggggtggcggctcgggaggctggggcggctgggtggggcggcttgggccgggaggcggcccaggcgggaggggaggaaaagggagctgggccgagggggggggaaggggaggcccaagagaaggagggagagaaggagagggagagaaagagagggaggaagaaaggacttaggccgcgggccgagagagagagggaggactttgggccagacttggcccaaaggaggaaggaggattatttttaggtttttctttttaataaactttgataattgtttttgttgcttaataaatatttccggcgctctgaaaattcaagtaaaatttgagggctcattttagaccaaggagaatttaacaaaaattctccgggccacattcgaatttttcttgtacgtattttagtgtttgccaatttcttttcgaattttaattaattctattattccttttagaaaatgatttttatttcgggatgaatttatcaggacgtgacatggccaaatctttgtcagttattttcaaactaaaacatcggcttttaatatctctaaacctttcaatataatcaacgaaagattcattgtatttttgccttaccgatgttaaatcagagaacctatgctcaattttaccagtgcaaaaatgatcatgaaatttttgttctaattgagcccaagtataaatagaatttgccggtaaagaagtaaaccatgtaaaagcagtaccggataaagataaagaaaacaagcacaatataaaagtatcactattagcctcaccactaaacttggcaaattcgggaactctataatttcgaggaaacgacacattgtcataataattaggatatggctttttgtatgctctaacacgattcctaggttcaatcccgaatctattcctcataatatcactaatcatatcctccatgttattaggtccttgtggatttggtggtgggtttggtggcctaataggttgggtttgtggcgcaatatgattatattggccttgcctagtatcgggaggatatcccctagaaacatcattataagcattagaaatatgtgggggaacttgaggattacttgtagcagtagatacaggaggatcaaatgttctaaagtgatacaaataactagcattagtcattggatctatgccctatattgggacgactacgccggtctgaccggcccagggcccggtctgaccggcgtcatgatgcgcggtcgggccggcctgagagccggtctgaccgctgggataaaacccggtcggaccggccatctggccagtcggaccgacgggataatacccggtctgaccggccatctggccggtcggaccgacggctgcgtcgcggtctgaccaaccgtcaggctcggtcggaccggctgtgaatgccgttccgttggttttattacccattggatctataggagattgatcaacagtggtataggctttatcctttaatgtataattatccataaaagaacctagcctactccttaaaaatccatcaaccttatctttaaacattacatctaatctaatctatctttaaaattagccatagatgaatctattgtagatgcaatttgttgttggatagattgtgatacctcgtcattacttaccatgtcgggagcgagcttgggacatggcccgggcttgatgatcacaccttgacgagtcctagtagttgatctcatcaaggcctcccgtgtgagctcgttgatgtactcctccatagctttacgatcctctccttcgaagtcatctaatgtgaccggcatcacattagatggctccacctccgtcttggatgatggcttcgtcatggcgaagtcgaagtcgagttgacaatgaacggatctcgtccccagcggactcgccaaaaatcgtgttggcaactttttgtgacaagtcgacaagcacgattgtaacacctaaacgccttgcggtgatatggagtcaccaacctactcgatctagccaaagggccaaatcaagatgggttttgtagaaaaacagctaaaccggctagcggagccgatctagagatcaaaatcagcctctaggccgatttagatcgatttgaggataactaacctgtctcgtgggcaaaacggaaggttttcaggacaaacctacaaagagatgtcgcactctcgcagcggcggcggacggtttacggcgcaaactgacaaagatggactaaactagggtaaaatagaaaaacatggtaaaagaacgattcaagtaaattgtattcagggggttttacaatgaaccggccttgttccttaaataggggttggtcttgccctctacaggcccttctccacgtccaactcgggatagaaaccaaaggaaacacgaaacatgccttcctgagcaaggaaacccgagatccgacgaaaacagactcggacttggaccctgacggtctgaccgcccacataccagcggttagaccggccctactagccggtcagaccgcccatatacctgcggtctgaccggccctgtgaaggaaacccggcactttccaaactttggcagtttttccctatttcgtccataggtgccaaatttgggtgtaaacaccaggtagtgggtgaatcctgatctgccatctaattttatgaaaaacccaaagtcagctaagagtaaaacttgttttgtgaagaaaatagttcagagtaaaaatcgtatagagtttggtaaacatagcatttttatttttttgaaagtattactaaatgggaatttctcccttggccaacttacaaaagggggggggtagggcacttttggtcttttcctacagtcgtatggctctgataccaggtctgtggacccccatttttataacaggaatcaatcgtgtaacagtaccatttccctggatcaagtagtctggtacacacgagttcatagctgaaataccaaatgcacatacacgagagtctagtgcgatttattacatcaaaagcccgcaggcatagtcttagatcatcgaaccgagcggtccggaatacatcccaaaagcagagatagataaggcagcggaattaaggcagcggcatgccattgccacaggcaacgaccgtaactaagacctactgagcgccatcgtcttcatcaccctcctggtaataggcatagggatcctccgaagcttcatctccggcctctgattaagtttatatattgcaagggtgagtaccaactgtactcagcaagccaccacagcaacaatgcacatgattggaatatttcaaggaatggctatggttcttttgcgcaaagcaagttttgcaactcttttcacaagcctaagacctagcatagactgaccaaattttagtactagttcatattaagcaatgacggttctgtccaccatccattgtgatcccaaggatggcttcccgccattgagtcgtcatgtttttctaaggacgtccatcttccctcctctcggaaagtggctccaacaacataaaatcatcatgcaatgacccatcccacacaagttaagaatttagagtctagccaagtgtaatacatgtcctggtgctcaataaccgcgagcacggctattcgaatagatttggtttagtcacactgcagtggatgtacactttacctgcactccgcaactacccaacacatgagcctcgtcccaacacatgagacgcgtcacggcaaagcttttcgataacctcgcattggcagtacccgctccatgaacttttcatcctcatgcactctaggcgtacacagtttctagcagtgagaggagttctggcgcaccgtagagcccctgcctcacacatcaagaaaccactatgcatggatactgcctctgctcagctatttacgctgctaggtctatccccatacgagaagtgcggttgtacgggggtcgtttcatgcttaacttcatggctcggtccttaattgaccagggacggtactagcctttcccagataccacccacatcctccgtccgccccagtctaaaacaagtgtttaatttcattcctactttcacaaatcatgtcatcattatcatggcaatgtggcactcatgtctccacatgccgcatctcaattacgttcccaaaggtaattgcccaagcatatagcatttgataaaatatgagcatacataaatctagagtagcatttctaagcatgggtcatagttgactaaggactcatacgtaattatggttacaaggatttgaaggtaagcaataatcaaggcatggcataattcacaagtaggatgtttatcattgcatgcgatcttatttgtaaacaaaataaattttgcaattgggatcaacatgttcaaagaatagtgatgacttgccttgctcgaagtcctgcgggtcttgaccctcgctcggatccgcaactccctcaggctctacaagtgcgtgcgaagaattgatttgaattccatttgaattcaaataaaatccaataagcaccaaatcgaaagtgagcgcgggaggcgaattctatatcaactacattatttgcgaaataagattatcccttatccttagatattttgtgtttcctaagtaaattcctaagaatttaacacatttatttatctcctaaataaatctaaattcttaccgcaatttgattactcataaagtttaccaaaatagtctataatcatattaaattttgcaattctacgactataattaatccataattaaattctaattattttatattttctaaacttcttaattttactcaaatgcctatttattttctttctctttctttctttttctttctttttctttccctttttcttttctttcttttctctcccttttccccttttctctttttttttcttttcttcttcctctccctaccggcttctcccttcctctctctctcggctcttgtctccccggggcagcgacagcgaccgagcaaaaaaggagggggggtggcggcttaccgacggcggcggcggcggcggtggcgacgcacggcgcggcacacggcgcggcgcggcggcactgagggcggcggcgaggcggcacgaaggcggcggcgcggtggagagaaaagaggggagtaatatgggaa

SEQ ID NO: 5870 - DNA, 33801 bp, Oryza sativa
attcctgcagccctaatttctctcccaaaataatttttgtctcggcaactatcctttgatttgattaactgtatattttgcaagctagaaagttcgcaattgagatttttaactatatatgtaattcagtttcttttggtccaacagcggttcataccatcacccgtcgatcgacagttcggtgaaacctttacatgactaccagcaacttttgatatctgcaatcggcgttaactgtataatttcgcaagcagctccgaagttaacaaagcgttctgataaaactgcagcgagtacaacttctacgggccttgccgatttcagcatgcttttatttgttactggcgtgtacataaggatgatgcactctaccatgagcaagtttcttggcttggagacttacatcaccgctgcttccctagtgatggcagattatgcagtcctacttctgatcaacactagatatatcggagtattcatcattccagtgatcctgcttgtcttcatcgcagcactctgcaccaaattgtgggacaagtctagtccttacattcagcaggattacagaatcagcagagtttccttactacatgtccccaacactgagtggcttctgaagttggcaacgctgccgtgctggttgcagcttttgtccagcacaatactgaatccagataatgaacagcaagacgataccattgtgttctcgcagttcctcctgttcttcagctccgcactcggtgcgcttgcagtgatggttgccaaattacccgcaggtgtcagccccggtgcagctcaggttcttccagtcctgcaaaagacctgcattgttctgctgctgataacagttcacacgatggctgcagaatggattggggaagatgtcatagtagcctgcattccaggactcgttgcagtgctcgtgtggttcaccgtacatttcgaccatgacgcgaggaatgcaactgcagttagcatcgacaatgtgttgtcttacagatcgcaagccgtcaccattctcagctctaccgtagggcttctcgcatacctgactggctcatatgctgcgtacgagagggaacttgtgaaatcccggtgcaggtggagcttgtgcatggttagctcctcctctgctctttcacacgtcaacttgtggatgcttcagcactggccggaaagaacatttcacttggaagagctgctaaagctgttcaggttttgcaggaaaatttgcttgagcgcaacacttgtgctggctttgatgtcgatcggtggatgggttcgtaatctaatagccggttccatagctattgtttcagcgttggtggggtttgcgcttttcgtaaccatgggtcgtaagcctgagcctcgtaatgtttgtaggactaggaagaacgctgccagcaggtttgggcaggacgatcaaaatccatcctcgcaaagattttcgaaagaatctcggccgtccgggggtttttttgcacctgcctttgagtcttttggagactttattgacaggaaattgggaattgcaaattaagtcaactagttgccaacctggcctgtgcattgtattggctattattatgtaaatatttgaaaggaatattattcgtacgtattgttgaaaatatttcttaatttttatttttgcttcaaatgtattttacatgactgccaatcgaacaattggttttttaatgacacaaactatttaattatgttgagaatttaaaaactctatcagttatcattattaatgtaataaatcataaaaatgtagcactcggaacattgcatataatttacaatataatgactacttcagttccaaattgcaaaaaaatgttttccacatttgtatcattggtgtatgcaaatttctctctttcatggattaacatctcaatctaaaatttatagacaggtgatggcatgttgaatcctaatcggtctagtttcagatgatggacctgttcactttgatgccaaaaaaaacattaccaaattttggcatagttgccgaaattttggcaacttgccaaaattttggtaggatttcttatatagttaccaaaatttagcagcaaactaaatgtagccactttttttttgtaactttaccaaaatttgataaggttgaaaatggcatcaaagtgaacaggcctgatgtcatgttgagtcaagataatattttgctatatattatctatgtgagtaccaaaatatatgagtgttgcaacgggtttaagcaattctaattactagatgatgtcccgcgctttattgccagatatatgttagttattgaagaaatgatgaaatgatttgaattgaaatattataaaaatgatttgtacatgatgatttagcatatgtatgtttagttttagaatgaaataaattatagatataattactgtatgtttgcatgttgagctttatatgcttaatgggttgatgtgacatgcttgcatgtaggttttatgagtgctaataaatactattcttgcacgttgagtattgtgtgattaataggttgacgtggtatgcttgcatataagttttatgagtgctaataaatactgtacttgcatgttgagttttatatatttatagtgggcattaactttatagaaataagtgatatgtaatactttgtagtgcccatcaacagataaacagtcaaatacaatgatagatatatttataacttgcatatccaggggtgaacaaataatgttctaaattctttgaatgcaagtaattttgtgtacatcttacttaatactatgaaaaggaatattttaacctaggtaagaactaagaaccaaaatacataattaacccaataaacagaaaaggggctgcctatatactatcacaatgcatccaccttattgtctacctctccctcttctggcttagattgacgcgcttgagcagatttgtgcagccaccgtgccgtcgccatgctcctctcgtcttccctcgccaccactgcccccaccttgtaattactcttgttaccctcggccccacctccgaccatgcccacagctggatccatccctgtggcttaagcaccgcctcgccgcccaagaccattcatctaaggctgagagaaaaccccctcatgctggtaggttttatccattttgtaatggaaatgtacaatgtctctcccaaatataaattggctgcaaccactgtgtgcaaatatcccactgtaattgctgggaattccgaactttatgtgcaccgcacttctgaggttggtttagactcaggaactgtaatgcacgaaacttatgaattgttcaaagatggcaggcatcctaaacaagctactacctccatccaaaaaaattggacactctaccgccgggctgatgtcctgaaatttcgtttagatatttaatcagcgaaagtggggctcacatgtttctaatttttttgggtcgatagattcctcacataagagcatcaccaacagatacctataatttcctctagaaaagttgtttttcggtttcttaaattgaaaataggaagtagaaaaattgatctctataagagaacacctaaatttaattccaaaaactagaagtagacctttctgttaaactagaagacaccaccgccgctggatggcgtgggcatgcaaaatcaccgagcgtgaacattttgcctctcgtgcgggaaagggagtagaggcgcgggagcaacagattgggggtgggagaggcgagacgacgctcctcctcatattgaccgagcgagttttcgggataaggggattccaaaaattgggcacgagattaggggatctgttggagctgttttttttttgacgaaatccctcaaaattagttttgggaataaaataggggaactgttaaagatgctctaacaccgcaaaaaccttatcctcacgtgttatctcgcctactccatcgctcctcaccccgatcccaatccttctccacgcctctcctctccactaccagcattgacaatggcgaggcgggcacgcgttgagtcgccagttgtcgcggcgctcgttgattcgccggccgtagtggctgtggaggccatacgtgagaggcgtgcgccgattcaccggtggtgggcacgcgccgagtcgccggtcgtcatggctccggaggttgtgggcatgcgctgattcgcctgttgtcgcgtggcgggcacaattggcgtctgtagtggcagtggaggtcatggcacgactgaccagaagggccggacgaatgcgaagtgtggcggaagcagacctccactcagcgtaggcgagacgaggaaggcgaggaggacgcaggcggcatggtgatgggggctcagcgtcgaatcaaatcctggggacaatttggtcattttaccttgaagctaattttggctgtcaaccttaagacgccaattttttttggacggaggaagtagttatttcatttgatgaaaattgtacaaatgttgcaatatttattgaagtagttttctttttcatctgcaattatcttcgaactattctggtagttctgaacttctgatggccaaattttctaatcgtcattatagggggggcctaatgggtgatcgatcgccaggcgatcgcccaagcgatcagcccccctcccctatactccatacactcctccctcctctcccctctccctcctccctttcttctcttcctactacagtacaccacacaattttttttaaaaaaacaaaaagttagaaaaatttatgtataaaaatactatatataaaaaatttgaattcaaattaaaatttgaatcgggtatgtaaactttagacttataaactttaggtgtataaactttagatgtatagaaatactatatatagataatatttgaattcaaattcaaatttaaatttgaatcggctatgtaaacttttgacttataaacattaggtctataaactttagatgcataaaaatactatatataaaaaatatttgaattcaaatttaaatttgaatcagatataatttaaattcaaatttgaatcgggtatgtaaatttttgacttataaactttgggtctataaactttaggtgtgtaaactttagatgtatagaaatactatatataaaaaaattgaattcaaattcaaatttgaatcggatataaaaacttttgacttataaacttttggtctctaaactttagatgtgtaaacttaaggtgtataaactttagatgtgtaaacttaaggtgtatataaactttaggtgcataaatttactaaaataggaaagtaatgcggtgccaaaaaaggaaactaggtggagggagggaggggagggggattgatcgctaccccccgtcccaggcgatcaatcgccgattaggatttccgatcgttatacgctatagtatactatgaatcttaggttatttataagggcgtgactaaacagctaccggtcactggtttgtcttatccagctaccactccatccagtataaatcccccttcaacttaaaagatacaatagagtgtgtttttttaacctttttaataacttatatcttttaaatcacatattgtttttaagatctatttgcatcattgtactccactcaaaatatgtgacaaaacaagatccatattgaatatattcaaatattttattaattgaaaagtaaattattacatgttatgaagtaacttccatgttatcaggaagtaatttttacatcttatacatgattaattgtcattagttactccatcaatgttttttacaatccatcaaaggtttttgtcgatgggggatacccatagaccgaatatagagggtattggggtccgttggtacgaggatctacgtaatacgacatcaagcaaacagaagacaaggattatactatactggttcaggccccttggaaggtaatagcactaatccagttggtacgggattatatgatggaaaccatagggtacaaagggaataacagaactcgatgataccgacaagagcgtagtcaagttggtctgactagatctcccagcgacttggctcctacgcgctccggctctgtagagtgtggggggtgtgttggcagtaatattcgatgtcttaggtcctgcccagggggtcccttatataccgcgggtcagttgatctccaagtaggactcggagatataggacccctcacgatatggtaaagactcagtctcgtccgagtaggactcctcccatccgtatattttgtttctatcacgtgacagatttccttatcgtatacggaaactatccgtatacgcgtgggtatgccgtatcggtacccactgtacatccaaggatagagggtataccttatccgtaacccaaacagtagcccccgacttctgcttaaatgagctcatgttatcaatcgcgacttctgatgtcggaattgttgtcgttatcatctggtcgatcccggtgtgaaaaccgtagagacaaagagtcatcgacaacgccgcgcgaagttcaacggtcatgagcgaatttaaattgaagtctgaaaaaccaccgtccgcaacgtacccataattttctggcagcaatctctctcctttccttggaatacgcaccatcgggagtgcgcttatttaaaggaaatttgggaatccatttgaagtccgtttgccagaaagctctcctgccctctagcgctcttcgtcttctccgttccccgtaaagaaaaccctagctcatttccttcatccagttatccggcgatcctctggcagcgatggatcttgagaagtcaacttcgaccaccgcgtccatgaagaagctgtaggacgacggtgccctccccggtcgcgggaccatgcaaagggaggctggaggtacagaacctgaaaccatcttgggccgcatggatgtagtcgaagattatatttcttgcggttttcttcctccgccttccgagtttcttcttctcgccttgaacttctatggcctttctttgcttcacctaaaccccaactccatcgcctttctgagcatcttctctcatatttgcgaggcctacattggggtagtgcccttccttgatctcttccgcttttattatgagctgcgctggatggaatccaacagggtgtctgtatgcgtcggattccgacttcgggatgacctgaagtcgcgttacatccccttccagtgcccctcttctcgcagcaaatggcagacgagatggttctatctccagatagaaaactcagatcccgtcctcgtggtccctaaggaccagccagaaaaaaatcccagagtggcccgccaaacccgccctgactccgaagacggcggttgtcgggatatcattgatgatctccgaagacggcggttgtcgggatacgaagtcgctgccgacttcataggtcggcggattcaaccgctgtaggcccgtgcccatccggcctttgattactccgggccagaggacaagacccgggtctctcctcggggtatttttcttgcatttttaatattgttccgagtgcatctatttctcctgacttatcgagttcccgttctcgatttataggtctggacagtgacaccgtggggcgctgcgttggccaaataatgatcagcgcaccctcgggggcgggcgacatccccgtcccacttagcgacaaggactcggccgagcgcgccacgacgattaatgtgagtgtactcgataattcctttacattttctgctcgagatcgcgtcatgacttcacgttgtgcaggctctccttctgacggacgtcatcggacccctcgtggatcactaggcagcgacgtcactgaagaagcgcgtcaccaaggaggcatctgacgctgctgctaccaccacaagcggcagcaatgttcctaagaaaggaaggaagttctcctccgtgatcgggacccaccggaaggcaacgagcccggtggtaagcttctgtttcgcctttgagtgtgtaatcagggcgacttagcctcacatcatgttatcttactcaggactcgggcgcgtctccaccgcctcagcgaaggcagaggttggtgatgattggggagaagtaagtcaatgtctttgaggttttttcgttctcaaagtttcgattacctcgcctcatggggaagagaaaaaatcttggcagggcggcgtgggcaaaggcggcgcaaggcgggactgatgctgcttccaacgcgtcccctgcggcgacctcgacagaagtcgtggttgcttctaaggactaggagacggcaccgagtagccccgtcgtcggcctcgcgcctacccatcgtctatccgccgattccctcacctgggaggagctccaagcggagatgttgcgcatcctccgggctggcgttcgcggtgtaggccgcgagatcgaggaggccaaggcggcggcgttgtcggcaaacgaacgtgccgatcagctggcgcgcgatctggtggaggccgcgaggacctctaaaagatgagggagctggtggccggcaacaaaatgcagcggcgcgggcttgagcaccggatgtcagagctcgagggccatatgaccgacatccggggttcgctacggacgtcgttcactaacctgcaccagctcgccggggagtgtggtgtcacgactacaatcccgacacaccctgatgagttctcgctgacgtcgtcgctcgtggaactggctatggcgatggaggagatcccctccaagcatgaggccaggatcggcgaggagacgtcaaacgacatctacactggggcgtgccatgtccttgtgtgtatgaggctggcgtatcctgatttagaccttaagaaggccttggatcggggggccaccgatgacgcgcgcaaggctacaatggaggaagtcgttgacttgggggagtctgtcctcctcctttttgaagagtaggatatttgttttcccttgtactccttaatcttcatgctgtaaaactttatgtgggctcgaactgctttcagttgtttcccttgtcttcttagcatgtgattctgagtacctttatcattgtagatgtgttgctgtcgaggatgtccagcagcgtgggcagcctgatgtaccagcggttgttctggcgctcacacttgagccgcacgcgccgctggtggaagtcaataagagcccgttcgtggagacgaacatggcgatgacgtccttaggtttgtgcctttatttccttcgctcctcgtgctcgaattgacttaattagccgtgttctcgaaagagaagagtagcttgacttagtcctttccgtgttgggcagattttgagaacgcgttagctgaccgagatcgtcgaatccagtattggaagacgaaactcgaggtggccgagaactcgagagagccatggttgaggtgaagaaagaccaggccgtggaagccctccgaggtcgcgaggtgtggttcaactcatacctcaagagttgctgcacggcggtggcggaggtttgcaaggagctccgagttccccgcggagatcccgaggagtcggccgctggttatatctcgtggttgaacggggcctgcgcacagctcgaagggattggcaagcacatcgacgagaccctgaagtaggagtgtcgtcgagcgagccgctacgccggtggacatgtgctggcctatatccgagatcgtcgcccgcagctgcacctcgatttccttcgcaaagggttttcgcgttctcggaggacacctgcggagatcgatggtcttgcgcagtcaatggcgctgcttgccgagaaggttttctgctccatggatgggcgttggccgtcctggtagcttttgtatctctgggtatgttgtgtatgagtgtttttctcacattgcaactacggttagtcacttgagccattcactctccctagccccagccttgtcggagaatcgttctcggaggataaggctcctagacccttgacctgccttggttgaaaaagcactgaccctagcccctagccgtaaagttgaaaaactcaatttctgatcacacgacttggttaatacgcacggtgagaactcttacatgaccagatcttacatggtcgtttgtctctgcataattcgaaaatgccttatccgctctgggcgtccccagccgaagttcccttaggttcctcggaggccttgccaggacagcgtaaagggacatgaggataggtttcaactctaggtgtcgtcgtggtaagggatcattgggaaggaacactttgacaatattctttacctgaaatcaactttattgaaatcgcaaggtatctgacaaatatggatactattgatttatacataaagtttacgtaattgatccatgttccaggaatttgctaactcgtgaccatcgctgtctgcaatcttgaatgcgcccggccgcaagacttgcgtgatcgtgtatggtccttcccacttgggtgagagcttgttgcaccctgcttggctttgaacccgttggaggacgtaatcgccgatcgaaagtgtgtgtgctctgatgcgcttctcatggtatcggcgaagggcctgctggtagctggctgatctgatggcaactctttctcgatgttcctcaagtagattcacatcgtcgcttcgctgctcctcctgctcctcgttggaatacttctgaactcgtgtgctctgatgtcgtagctccgtggggagcatagcctctgagccatacacgaggaagaagggtttctccttattggatgttgtcggtgtggtacgcatggcccatagaacagaggggagttcttcgacccacttcttgtcatgtgacatgagtctgtcgtggacgcgggtcttgatcccttgtagtactatgttgtctgccctttcgacttgtccattgctccgagggtgagaaaccgtggcgaagcaaatctaaatcttaactcccaatccgatgcagtagtcctggaagtcggcactaatgaactgggagtcgttgtctgttatgatgcggtgaggcaatcagttttatcttcttttctcatactacatgaaaaacaaaattgaaaggaaaaaaaacaatcagtgcttaaaacagatttatagaaagttacttctgaactattcaaaagttacttccaattaacattgaagtaacttttaaaaattgttaaacttacttgtactgatatgtgctgattaaatttaatttctagatagagtcatatttttatccgtacaacgaatttacttctaatgtcgtgacaaaattactttctttttgttttaagttacttttataatatatgcaaattacttttagactttattgaatttatttttatatgtctaagaagtaatttagtgaaatctaaaagtaatttagatatattatgaaagtaatttttaatttttaatcaaaatataatcatgtgagatcttgttataaagatttaattgttacgaacataacggtgtaatcggatcgtagatcggatgagtagtttaagagaaaattttatttgaaacataggtggttcctatttgtttgatggactagtagtatgttttcagtaaagtaatggcttcagttgtgccgtgccgtaagactaaaccaagaggtttctcggtttagattttgggtatttataaacaagtacctaatcattatatggaaagccaacaaataggtaacacagtggatattttcttcccgtggaagacagtatttaattggagttcttcgtctccgttatatttggattaggtaagtagcacatcctctcaataatcacagattcaacagttgacaggattaaacttgatcaatcatttgtagattttaaatgaatcacttacagagttgagataattaatggtgatattgtcgttataatgtttttcgaccttctctttaaatcatttggatcaatagccatataagtgagtgtaggcaatagtgaatggcatataaccaatgtaaagaacttaagatcaatatttctagtgattttgcagaaccaatttgccatggtattaagaattcggaagtacaaataacgagatttcactgaaaatatcaccgcccattatcatcagccctgaacaatacaaatcttaaaaaaggtttccatcaattctcaaagtaggaagttaattttattttgtaaacaaggaaagtacaaaatatacactagattgtcttagtattgagaaatattttacagtacttgaggggtgtagcatacattctagtcataatttgtgatctctctaatttgatacattcctagtatcgagctataggaatagttaagaaaaagagctacaagaatacaacaaattaaccataaacatcacatactatagcattcttaaaaccataatcctcttacttaatattcctaaaaggaaacatagcttgcactgattttgtgagtcggtgtagtagctgacgaagggaaagaaacgattttgtgatttttcccaattcacacaccttcctgacgcacaacgactcaagctcaacaatgaagacgccatcttcttccgtgccaaccaagatggcgctgggaccttcggcaactacagccaaacacgccgctccttgccctcactacgccagatcctcacacctctgacgggatacctgtgacgggcaaacgaattggtcagtagtgaccattacctttgacgggttatacgggatgccgtcaccggtgaggcatctgcccgcggcccgtcacaggtatcccctcacctgtgacgggccgaaaggaaaacccgtcagaggtataccagtgacgagtttttcttccaacccgtcactggtatcccctcacctgtgacgggccgataaattagaagccgtcagaggtgatgggccgccacctgtgacggctttcatttctggcccgtcacaggtgagaggataccagtgacgggccgttgaatagaagcccgtcaaaggtatgagcaatacctttgacgggctttttttatctaacccgtttgaggtgtgttgggtctataaatacccccaaactgccaactgctttccatcccgaccattgtactgttcacaaatcggttgggagggcaaggggggcgattttttgctaaaattcaaggtaaaaaacacattattctccattcattctcaacatatcgatcatcatttatttttcttcgtatgttgttgatttcagatggatcgtagatggatgtactatgcgcatcgttcgtctaccgagtatagagagggggtcactgaatttgtcacatttgcggataatgacagaaaaagtaggatgagcatgcacatgttgtgcccatgtagggactgtaagaatgaacagatgatcgaagacaaggatgaagtgcatgctcatttgataatgaatggattcatgaagaaatatacctgctggaccaagcatggagagcaagaggcgcctgatgtcgcagctgaagaagtgttggatcaggatgtagagaacaccgccgcagctcgagaaggcatgttcgtaccttctcctttaggtggagagaccatagatttggacactcaatgtctatctacaatgttgcatgacattgaagacgcagaggacaacgacagagattatgagaagtttagtaagttggtggaagattgccagatgccgttgtatgatggatgcaagtcgaagcacaacaagttgtcatgcgtgttggaactcatgaagcttaaggctagtaatggctggtcggacaagagttttacagaactccttgagctgttaaaggatctgttgccagaggggaacaatttacctcagacgacatatgaagcgaagcaagtattatgtccgttgggcctggaggtcagaagaattcatgcatgtccgaacgactgcattttgtattacaaggaatacgctgacttggatgtctgccctatctgtggggcatcaagatacaaacgagcaaagagtgaaggtgaaggaagtaagtcaaagaggggaggcccagcaaaggtggtgtggtatctcccaattgcggagcgcatgaagagaatgtttgcgaacaaggaacaagctaagcttgtgcgctggcatgccgaagaacggaaagtcgatactatgctgaggcacccagcagattcagtacagtggaggacaatcgataggatttaccaggaattctcaaatgacccaagaaacatgcgtttcgcaatgtgtacggacggcattaatccttttggtgatttgagcagtcgtcacagtacatggccagttctgcttgttaactataaccttcctccctggttgtgtttcaaaagaaagtacattatgcttgccatgctcattcaaggaccgagacaacctggcaacgatatcgatgtgttccttgaaccgataatcgatgacttcgaaaggctatggaatgagggcacacgaacatgggacgcatatgcacaagagtatttcaacctccatgcgatgctgttttgtaccatcaacgattatccggcccttggcaacctttctggccaaactgtgaaagggaaatgggcgtgttcggagtgtatggaggaaacaagaagcaaatggttgaagcattcacacaagacggtctacatgggtcacaggagatttctcccaaggtatcacccgtataggaatatgagaaagaatttcaatggacacagagatacagccggacccccgacagagctaacagggacagaggtgcacaacttagtgatgggaataaccaacgagtttggaaaaaagaggaaagttggaaagcgaaaagagaagagcacatcgaaggaaaaaacagaggagcatgtggaaaaacaaaagacaaaagagaggagcatgtggaaaaagaagtcaatattctggagactaccatactggaaggatcttgaagttcgccactgcatagatttgatgcatgtcgagaagaatgtatgcgagagtttaatgggattactacttaacccaggtactacaaaggatggtctcaacgcccgacgagatctggaagatatgggtgttcggtcggagctacatcccataaccacggaatccggcagggtttaccttcctccagcctgctacactctctcgaaagaagagaagattgatttgctaacatgtttgagtggtataaaggttccatctggttactcatcaagaatcagtaggctcgtttcactgcaagatcttaagttggttggaatgaagtcgcatgattgccacgttcttatcacacagctgttgcccgttgcaataaggaatattttgcctcctaaggtgcgacacacgatccagcggttgtgttccttcttccatgcaatcggccagaagatcattgatcccgagggactagatgaactacaggcagaacttgtgaaaaccctatgtcatcttgagatgtactttcctccaactttctttgacataatggaacatcttccggtgcaccttgtgaggcaaacaaagtgctgtggtccagcattcatgacgcagatgtatccttgcgaaaggtacctggggatccttaagggttatgtacggaaccgttcacaccccgaggggagtatcatcgagagttacaccaccgaagaggccatcgaattttgtgtggactacatgtcagaaacatcttcaattggattaccacgatctcatcacgaagggaggcttgacggtgttggtactgttggaagaaagactattaggttggatcgtaaggtgtacgataaagctcatttcacggtactacagcatatgactgaggtggtgccgtacgttgacgaacaccttgcagttatccgacaagagaacccaggccgatcagagagttgggtcaggaataagcacatgtcttctttcaacgagtggctgaagaaccgaattgccaggttgcagaacttgcctagtgaaacacttcagtggttgtcacagggtcctgaatggagtgccaccacctggcaaggatatgacataaatggatacacctttcacacggtcaagcaagacagcaaatgcacagtgcagaacagtgggttatgcatcgaggctgctagtgacggtggtcgtcgtgatcaatactatggtagagttgagcaaatattggagctagattacttgaagttcaaagtcccgttgtttcgttgtcgatgggtcgatcttcgcaatgtaaaagttgacaatgaagctttcaccactgtcaacttggctaacaacgcgtacaaggatgaaccgttcgttctcgccaaacaagttgttcaagtgttctacatagttgacccgtgtaacaagaaactacatgttgttcgtgaagggaaaaggagaattgttggattggacaatattgcagacgaggatgattacaaccagcacgtccatggcataggtcaagaaatacctctagaagaggaggaggaagaagatgaagttcaatatgcacgtgtcgaccatgaggaaggattatttttgtaatttatgtacgtagtttatgtctacatgtctgttatctgtatgactctatatatgttcggaatgatcaatagtatattgcttatgaaatagtcaaataaaataattaagtgaaacacccactagaagtgaaataaaataattaagcaagtattagcattggaaataatataattaaagtagtataataatgaagtgcaattactactgttagtgaattaaaataattaagtataaaaaaatatgtagtgtatgtgaaaatatgttaaggaaaataaaagaactaagtgaaataaaataaaataaaattgctctaggcaaactcacctgtgacgggctctatctgtagggccgtcacaggtgacctcacctgtgacggcccagagtgctgggcccgtcacaggtggtcttacctgtgacggctccacggttggcgcccgtcacaggtgaggccacctgtgacggccacatagttggagcccgtcacaggtgagtttgactagggttgacctagggttggacatcttctagatcgatccagatccggcgcccactctcactcactcactctctcgaccgccgcctcgcctctctcgacctctctgccgccctctacgcgccctcctctccaccgccgccctcgccgccgccaaatccgccgccctctccgccctctccgccaccctctccgccgcctcctcctctcgacctcgacctcgacctctccgccaccatctctgccgccgccctctacaccgccctccccaccgccgccgcctcactcactctctcgaccgccgccgtccttctccatcgacctctccgccgccctctctaccgccatctccgccctctacgccgccctccccaccgccgcctcgacctctccaccgctgccgcctcactcactctctcgacggccgccgggacctcctctcagtcgccacgccaggaccgtcgtcgccgccaccgggatctcctctccgccgcctcctcctctcgaccgggacctccacggtgagcccactccccccgcctcccctcgtttactattggtcgccgattaaccccctcttctcctcctcagcgccgccgtgccaagaagccgccgccgcgccgccgtgctgagaagccgtgcgccgtgcgcctgccgggactcgtcgtcgccgtgtgccgcctcctctgctcgtcgtctcctctccaggtacccctctctctctgatgcccatgaatggaatggtgcagtggatggatgaataaatgatgcaatggaatggatgaatgaatgatgaactttggatgaatgatgaactttggatgaatgatgcaatggaatggatgaatgaatgatttaagtgccattttgacatgtaaccattcatggagtgtgtactgctttatatgttgttttgttcccttttgctagaactattgaattttggggataatgtttacatttagctgaaaaaggatggattgatagattggcaacagtgttaggggttatgttcccttttcctataaataaagcatatacagggtttgaaatttagttcaaatggaaaatacaaaatgcatggggagttttggtggattggttagtgtagtccatggacggaaccgacctagtcaccaaaatttttcatgcattttgttttctataattctttgataattaaggacctttattaggtgtagggtttgaaatctagttacaagggaagaattgatagattggccgcagatttaatgtagttccgaggttatcaaaccatcacagaatacaaaatgcatggggaattttggtggataggccagtgtagtccatggacggaaccgacctagacaccaaaattctccatgcattttgttttctgtcataatttgatgattaaggaggatttgcagattatataaacttgttgatttatataccctttttgtctatgaataggtcaattgtatgaattgttgtttatatacatgatttatatacccttgctgctgctgccacaatgattgtgggctgttttattatctagacttgcttgaattgaatggatgaattgctgtttacatgaagttagtagtactgtctccttttttatctacacccctgctactgcccctacacttgttcacttgttccttattaaatggccagtgtagagtagttatatacctctacacttgttctttttttatgcataagaacagattttgtgcacttgctctttttttatgcataagaacagattttctgcacttgctcttttcttctggattgataaatggccagtgatgaattgctcaataaaaacagattatctacacttgttcatttttttatctattcttctttttgcccctgttgtggctcaatcagtaatgaattgctcaataagaatagtttatctgtacccttattgtgggctgttttttaaatttgcatgattgactcagtggataagaacagagtatctacacttgttctttttttatgcataagaacagatttgctcttttgatgttatgatttcctctttttatcccttcatgcaaatgaatataattgatgcatatttctgagcaaaactgaggccatatctttcagtgcaactgctgctgtctatgtttgcccttgctgtctatgtttgcccatgctgctgcctatggttgcaactgttagttaagtgcaacttgaatgtggttttaagtgccatttggacatataaccattcatggagtgtgtactgctatatatgttgctagacctattgaattttgtggacttgcatttatactcctcctgctgctgttttatgtcaatcatgcaaattctgtacccttgctgctgctgttttttaaattttcatgattgatttagtggttatatacctctacacttgttctttttttatgcataagaacagattttgtgcactctctctttttttatgcataagaacagattttctgcacttgttcatttttttatctacaataatatatgcatgatttatataccactgctgttgttgcccctgtacttcttgttaaatggccaaggatgaattgcttaataacattctatctatacctgttcttttctttatggataagaacagattatctacacttgttgatttatatacccttgctgtctatgtgaatttccctctgctgttgctgtttatgtgaatttccaccctgctgttgctgtttatgtgaatttccaccctgctgttgctgtttatgtgaatctccccttgctgttgctgcccctgtggcatatatacccctactgctgttatatggccctgctactgctcttattgctgctattatatggccatgctgttgctactactctaatttcctgcacttgctcttttccttatggataagaacagatgaactacacttgttctattttattgataagaacagatgaactacacttgttctattttattttctatttcctcttttttctgcacttgctcttttcttctagattgataagaggagtatatctagacatgttgttttagttaatttgcccctgctgttgctacccctgtggcatatatactcctcctgctgctgttttatgtcaatcatgcaaattatgtacccttgctgctgctgttttttaaatttgcatcattgattcagtggttatatacctctacacttgttctttttttatgcataagaacagatttcctgcacttgctcttttccttatgattttctctttttatcccttcatgcaaatgattgtaattgatgcatatttctcagcaaaactgaggccatatctttcatagtataccccgtattacattggatctaatgctatttagtctaatggtaggaaatttataatctttttcgcgaaagttaaaccatgtcaacgcccggcgcaaacccgccctccccaacacctgcgaggatccaggaagaagcaaacccagccacagaggcagttgccgaaggtcatcccgcgacaacggcggtccaacaacccgaaattcatggtaatttataggataaattttcaccacatgaccacataaattttagctagcaccccttagcaaatattgccttctgtttgtgctgcagaattgccgcaggaccaacatacgtcgatgtcgggcgagacaagtgcaagtaggtctagtagaaatccgcggtcacaaaatatatggccgaccacagtgcaagttataagagaggttgacgctagtggtaggcccacggcgcccaggactgtcattggaagatggtctaactgctgcgggatagcggcacgtgagaacttcgggatcctccataaagatatcgggaaggtcacagaagccgagaaagagcgagcttggacggcaatggagaaatggttcacatttccagccgaagcaaaggataggctcaagcggaaggcattacaaaagatgggcaaagcttggaagaattggaagtcgaagctcttcaccgagtatgtcaacccgcccggcaatcatacgccgttcgatgaataccctcaaataaccgaagcggtgtgggaggaattctgctctctcaagaccacccaagagtttagggaatccagcgaggcacatcgcgtactgcaacagcggaatgagcacccgcatcggctgggcaccgcagggtacatcggcaaggaggcaatatgggcccaagaagatgcagccgctgcagcagcgaatgtacctgccccgttttcggacatccctgaacaaagagctcgcaactgggcgcgggcaaggggtaaggtcaacccggacggctctgtcacatttgagaacaaaagtgatgccgtcgtctatcaggaactggtgagttcactacttaacctaactaatttccgttcgtataaagtacaagttcgtataaacgactatcttcttttctagttgggcttggttgctgaacaagcttcacaaagcgaggttgagtccgcgccgaagaggcgcgaagatgacatcctcacaaaggcgctcggaaccaaagaacatcctggccgaactcggggaattggtagcgatgtgccctggaagcatggactccctcagtacagctcccaatacaggaaacggaaagtctccaaggaagagagggacgctcgtttgaaggccgaacttaaggttgaggtcattcaagaactagaagctagcatgaatgcaagggtggaagaaagggttaacaaggtgcttgccgacatgaatataccccgagtcacaacacctgctgtgcaaccaactcctcgtatacaacacgacgcgagtccgtcacagcataggagtagttgtgcatccacagaggtgccggcccctggtctcccgatcgcaccactagctgcagtggaccacatcgaggtaattattgttatccgatccatatctaataaaagacatttacacattccaatattaaattcaaactttcaccttatgtagggcgcagcacagtgtgtcctactagcgagagtccacccaactttcgctcctgaagtcgctgagggcatggctttcaagccctcggttacagacaaggtccacggcgcagacctgctagctgggtatgccaaggtgtccatcgatacagtaaaggacacctggtcaggctatccgctgcccgtgcccccaaatgatgaaatcatgactttgggcgatgcgcgcaagacattcatacaatggcccaaagaagacatagttgtgaagatgactcctcgtccaagtcgaccgacggagcttacacctcccaagtctaagctatcaattgaggctccccgtggaccggcattgtcagtacctcattctcccggtggagctgatatggacttggcagatatagctcaaagcttggctccaataaagaccacaagaaaggccgatagctccccaccacttgtcaagggccagaagcgtgaacgaggcaaggggaaggtcggggagttggcgccggagccaaaaaggggcaaggctgcgacgtcgatgccggtgagcaaatcggggaaggtcgtgagggcgccagcgcaatttgagctaggcatgccattggtggaggacaatgtgttagctgtgatgggtattgcttgccgagagctacataagcaatacatggagctaagcaatgccaagcggaaaatgagggagtcatccatagttggacatcacgaccaccagccgttcctatcgtcgcctgcctatataactataggctttgatgacctcttcgaccttttcaggatccggaagttggacactggtcttctaaaatgctactccttgtaagtgcataccttctatacttgtgatatgactggactatatctcctaattaaattagttctaatacgtaaatattttaaggttgtgttggatcgagagtcgtcgccatggtaatcaggttgggttccttgatccatccatggtgaatgaggttaatttacaacagagctccactgaggtggttgactatgtcaaccggtgtttatgggcccatcaagacaaggagtacatcatgtgcgcacacaaccaagagtaagaggacaatacccttcgtgtatattgtttttgaagttaaggttcttagtactaacgctacatgaccactgcgcaggcgacattggattctcctagtcatcgtacctaagtggagtagggttacctaccttaactccaataagtccaaagattatgatttcagtgaaatcaccaaggccttaaatatggcttggggtccatatgtggaaaagggtggtaggcacaaggagggcaagaatgaactttatcatgacaccaagtttgcatgcgcacaacagatcggagaccaatgtggtttccacgtgtgccacaacatgtcaacacttctaagagaggtgaaagatttcgaccctgaggttgttgctaatggcgaataagctcatttcaatatctacattgctattcaaaacgtgctaattaacctcttatttattaaacagaaaggtagagctggcttcaagatctcacccatcaacccccccgctatcagaggcgaattgtgcgcctttattcttgcagaaataatgaacaagaaaggacgttttcatgccaaatagactcatgaacttggctagataatttattgtgatgtaaaaaagatgtttttataatttctggcgatgtaaaaaattatgtttttatagagtgcaatgtaatttactttcatatgtgcaatatttatggtactttactaaattgtcatcacatttgatcaactacgatttatgttgtactattcatctgttttctccttttttttcccttattgacaggttgtggaggttcacaacgaacagaatacaagaaattttggtaatcatttgaggactttcatggggtatgaattgtgtgctataataaattaaattgttgcatatgtgatgttgtaaattgttgctttgtgatggatctgtgatatgtgatgcatctgtgatgttgggcagttggggaatatgtgatatggagggggggtgactggcacctgtgatgtttctgtgtttcagagggcatggctagcaattcctgaggctagccaatatttagcatttattttttttctggaattaactcatcagtgacggttcggaagaaacatccgtcgcaggtaacttcacctgtgacggactcgcaaacgtcggaccgtcacaggtgacccacctgtgacgggcttttactttcgggcccgtcacaggtgggtcaccctgtgacggctactatataccggagatcatcacctctgacgggcctttatttaggggctcgtcagagatgagacacctgtgacgggtcctaacaagccctagtctagcttagaccaacacctctgacggccttctattaacttgcccgtcagaggtggatgtcaccactgacggccggccacccgtcaaaggtgactggacttaccagtgaccactgatcactgaccaagcccaaaaccgtcaaaggtgagggtttgggcccgtcacaggtgaccttgaccagtgtagtgagcgaaggatcgtgctagggagaaccaaaagccgtatcctggtttttatgacgctgtcccatatcctcctaattataaaattcctgaatttaccaagtttagtggtgaggatagtaggactacatatgagcatgtagatcaattcttagcgcaatgtggtagggctagtagtatggatacatgtaagttgcgcttgttttctttatctttgtccggtactgttttgatatggtttacttctttaccggcatattctattggtacttgggctcaattagaacaaaaatttcatgattattttcacactaatgaaactaagcttaagttgtctgatttaacatcggttaggcataaatacaacgaatctgttgctgattatattgaaaggtttagagatattaaaagccgatgttttagtttgagaataactgacaaagatttggccaacattgcatatgatggattgcttgattctattaaagagaaattaaatggccaaatatttcttgatgttgatcatgtgttgcatgaagctctggctcagaaaagccaagtggatgataatagtttaaatgctagtttagatgatagtgcaatatcatgtatagctgagccaagagatggttcggattgtggtaataatttgtgcaatgatgccgtgacaagtatagccgaatcaaatgttggtccggattgtcttactaacttggatgataatgttacaaccattatagccgaaccaagtgttggttcggattgtgttactaatttagacaatgatggaatagccgaaccaaataatggtttagattgtgttgctagcttagagaataacatcattgaaaatatagccgaactaagtgacggttcggattgtatcacaagcgaaagtgaaatagcattgtcacctaagatcgaatcacaaatcggtcatgtggatgttagaaaagatgatgacaatgtcttgcgggatagtggtgcaatagaatccaaagtagttatgcatacatatcaaaggccgtatcctgaatatgtagattcggtcccatacccgcaaggatttgaggtgcccaacttcacgaaattcacaggtgagaatgctaggactacaatggagcatatcggccactttattgatcaatgtggtaaggccggtagcgatgatttgcttaagttgaagttgtttcccctttctttattaaactttgcatctacatggtatagtttgcttgctcctagttcaatttctacatggtcacaaatggagcatgagtttcatgattatttcaaagatgcaagtttgatggagcaaagaccgattgatacttcatcggtcacttgtgaaactatttcggttacatctatgcctaaaaccggaattgttagtgatcctctccctattagttctattaatgttgacaaaaagaaagggaaaagtgttattattggggatcctcggcccaagaataggatcaataatgcaaaggccggagatcataaaattgccaaggatgagtcatctagttcccaaaagaccaaaaagccgaagctcacttttgagatgcttatggctaagtacaagaaaggattagccggtcagcgatttgataatcaaacttgtgattcaaaaagaccaagatcatctcgtagaaagagatttggtcaaacatcaaagcaatcggagccatcaaccataccaactccatataaacctccgattgtgatgccatggtatccatatccaatgtcactatatggttatccttttatgtattatatgccatggatgcctcaaccacctatgccgtgtcatcaaggatggaagcaatcacctaggacggtaccaagtcattctaactcaagacaagaccgtttcccacgaaagaatcggtccggtggatcaaaggtgaaaaaggtgaagaaggtgtgggtgagaaaagaagccaaagctccagaggtcgttgctatcaaagaggagtctcaagatgttcatgtacctactggagatgcggtggaaaccacgcaagcaaaggagatcgaagccgacgccgtgactatcaacattggtggtctaaccgagacagctggccggtctaaccgccaatctacggccggtctgaccgaccttactggccggtctgaccgacggcttgtggccggtctgaccgggctcagtggccggtctgaccggggggcaatggagaagagtgggaaaattgagagcaacataggagcttccacttcgaccaaaaatataaagaatcattgtttagctcctggaaaataaccacagccgaagtggataccttccggcttatctcgctctcaaaagaggaggctacaacgtcttcgagtcataggtcaaaaagaagaagaggccgaagatgtggagaacaagacatgcaataatttggagcctcgaaaggcacctaggcaaatgtggagatccaaagaggtaaaagttaagagaccagtgatttcccatagtagagataaatccaatttgatgatagaaaaatcaacggtcgttagagataagtctcctacacatgatgctatgggtgttagtgcggtatccgtcttgccttcgaaatcgcgcaatctagaaaagccgattttgcttggggggcaagacattaatatgctcatcagggaaccaagagaagatgaacggcgatggatacaacatcacatctttgagccgccgtttgttggatgctaaggcaaggtatgagtttattgtgtttaccattatattatatgcctatgccatgttattagaacattgcttgttatctagcacatgtgtgtttttgcttatcaaattgatattatacatacatgttgcaaatgccagttctaggtagtagaattggtaggttggcatataatttgtttgaagtatgatttggctcatgactctttgatatttatttaaaaccaaatcatatgtgtttttatggatcaccatataagatatagatttcatatttattgcgccatgaaagttttgcttattagtaattcggctaatgtcaatggtcaatatgatgatttgctttagagtgattttctttaggaacattggcattgttaatattttacatacatgctcaagccgattacttacatttgtagtttattggaatctatgcatgtgacacatatgactttggtgattcattattgatcatacttcaattggctaagtgttttgatgccatgatgattattgtttcaaaagccatttgaattaatattcatctagacatgttagttggatgttataatttttcatatgtctagagaggagggattttggtccaatagtttgatacactaagcatttggttataatacgaagaaaggagtattttttactagaaaagccggtgcttgatttttatgtctttggatgaaattggccaaatcatagaccaggggcggtctgactggaattacacggccggtctgaccagtgatgaccagtggtctgaccggctctgcatggccggtctgatcggcattccgtggccggtctgaccgatctcgggcaaagagctggggggcacgttacaattgattaaaaggccgaattaattgtgaattcggacatttgtgcccatgagttagaaatagcttggagaattcctttgattagatatttgaaagatcctacacttaaggttgatcgaaagattcggtggcaagtgttcaaatattatatcgccgaaaaatagatggagtattacttagataatgatcaatctaaagttgctaggagagtagtacatgaagggattcgtggaattcatcaatcggccgtaagatgaattggttgcttagaagagtggaattctattggccgaaagtaattgatgattatttcaagtgctacagagggagtgaagcttgtcaatggatcggcaatgttcatttggcgtatgtcgctatattgaatcctatcattataccatggccgttccaaggtagggctttggatttcattggtcagatttatccttcgttatcaaaagggcattggctcgtgctagttgcaatgggttacttcactaagtgggccgaagccgtgccactcgacaatgttacttgtacgaaggctaatggataagccgagtcgagtaataaaacattgttgaaattgccgttttgccagttgaggtaaatcttggctctcttcggtatttcaagcaagacgacatgtcggttgaagattacaagaccttgatgggaagcaattttgaagacgtcattgacaagcgtttgaagacttcgaaggagatgaagacacttcaagacggtgttttcagagagcaattaatgggagatagcttgaagaaatacttcccgagcatttggtaagatgcttaggaagtcctatggccggtaattggattatcgccctgagataacatgttctatgcttttaggttcacgtatgttcaccaaaaaggcaggggggcatgtgtttacacccaaatttggcacctatggacgaaatagggaaaaattgccaaagtttggaaagtgccgggtttccttcacagggccggtcagaccgcaggtatatgggcggtctgaccagctatagggccggtctgaccgcaggtatgtaggcggtcagaccgtcagggtccgagtccgagtctgttttcgtcggatctcgggtttccttgctcgggaaggcatgtttcgtgtttcctttggtttctatcccgagttggacatggagaagggcctgtagagggcaagaccaacccctatttaagggacaaggtccggttcattgtaaaacccctgaatacaatctacttgaatcgttattttactatgttttctattttaccctagtttagtccatctttgtcggtttgcgccgtaaaccgtccgccgccgctgcgagagtgcgacacctctttgtaggtttgtcctgaaaaccttccgttttgcccacgagacgggtagctatcctcatatcgatctaaatcggcctagaggctgattttgatctctaaatcggctccgctagccggtttagcttttccttttgcaaaacccatcttgatttggccctttggctagatcgtggtggttggcgactccatatcaccgcaaggcgtttaggtgttgcgatcgtgcttgtcgacttgtcaaaaaagttgccaacacataccacatagtttgcacggtttatatggagttggtatggttgatggctctgattgctttgatgtttgaccaaatctctttctacgagataatcttggtctttttgaatcactagtttgattatcaaatagttgaccggctaatcctttcttgtacttagctataagcatctcaaaagtgagcttcggctttttggtcttttgggaactagatgactcatcctttgcaactttatgatctccggcctttgccgaggatccccaataattacacttttccctttctttttgccaacatcaatagaactaatagggagaggatcactaacaattccggtcttaggcatagatgtaaccgaaatagtttcacaagtgaccgatgaagtatcaattggcctttgctccatcaaacttgcatctttgaaataatcatgaaactcatgctccatttgtgaccatgtagaaattgaactaggagcaagcaaactataccatgtagatgcaaagttcgacaaagaaagggaaaacaacttcaacttaagcaaatcatcgctaccggccttaccacattgatcaataaagcggccgatatgctccattgtagtcatagcattctcacctgtgaatttcgtgaagttgggcacctcaaatccttgcgggtataggaccgaatctacatattcaggatacggcctttgatatgtatgcataactactttggattctattgcaccactatcccgcaagacattgtcatcatcttttccaacatccacatgaccgatttgtgattcggtcttaggtgacaatgctatttcactttcgcttgtgatacaatccgaaccgtcacttagttcggctatattttcaatgatgttattctctaagctagctacacaatctaaaccatttcttggttcggctattccatcgttgtctaaactagtaacacaatccgaatcatcgcttgattcggctataatggttattgcattattatccacgctagcatttaagctattgttatccactcggctttcctgagccagagcttcatgcaacacatgatcagtatcaagaaatatctggccattcaatttctctttaatagaatcaagcaatccatcatatgcaatgttggcctgtcgcgaccgagaaaattgccttttcccgaacgctagtgtattaatccccgtcccaggaaaagccggggtacaccaaacaaacatgatacaaaaggaacatctttattatatcgataatatttacattattacaaaggcacttcaggcctgacaaacaaaaataaacagcagcggactagcgggcctacggctccatcttcacaggcgctcaactggggtataagtcaggactccacctaaaacttcttctccaaagcttctcttactgaggggggggggaagatagagcaagaatgagtacaaccaccgtactcagcaagccacaccgggagatgcacgattaatacaaggggggtacaaggggtaataataatagggttgggttttgcagtaaacagcatttaaaagtcacttagttgcccaaagctattttgtaaacacgatcctagagctacacaatattattaatcaaggccgtgaaccctcacgaacctgccttaacccaaggcctacgatgattcgaaccaaactggcaacccgacctgggtcccagctcgtcccaagccaacccaggccaaccattccatattttagttgttaagcaaattttaagaattaaaccactaacttgggtacattgctaggcttgcccatatccgagggcacggctattcgaataggtttactctgatcagaggtgtacatctttacccacaagacacatctttactccgtattccatggccttggaacccgtcgtaaacatgtgacataacccttcacccatcctagccgtgaacaaaagtaccgacccaaccctgcctacggccggtatcccgggacaggcaggccaggattgagcccctagcaacaagatctagaccgggtgcgccacacacataggggtgagaccacccgcgtactagtccagtgccatggcatctcgactaacgggcactgacccgtgtagtcttcatttgcctagacatctcaattaccgagccgcagctcgcgtagccttcatttgcctcagagatatccatcgtcgcaacgacttcatccatctctatccgtgtccttttgttcaggactagactgagcaccgagttaagccttacccattagacatgtggttagtacggtagtgctttgcaacagaggcccgaagaccggtccttatagtggccgagttgctactagcaaaaccatgcacctcgaacgtagcctaaaaccattttgggagttttgaatagagggggggggtgtgtgttcaattccatcacaagccaatcattccacagtgtccaaatgatatgagcattcccaaagtctaaagttaataaaaccacctaatgttgcctaattaatcagcgaagcatctacctaaattcatactagtggaaccgttaatagagtacccactagttggggttttgtttatcctagggtgaacaaggtaataataaacaatagcaataataataaggtcataacaaaggtaaataggcatggctaaataaaatagtgataacgtgggaatttaaataaagcgataatgcattaatttaaatcaaaataattttataaactaggattcaatatgctcaaggatgatgcgacttgccttgctcagagagagcggccttccgaaccttcggcgatgaccgcgaaccacgcttcgggaacctccggaacgacagaagctacgcgaaacacacaagcaaagctacaagcctataaagaagcaataacaatacataaaaagaaagcacacggttctttaggttataacaaacattaggagacttgaatgggtcgattcagagttcgtatgaccaagatatgatcatccgaagtttaatgctattatatggagatttacggattattataattaggttttgcaactataaaacatgtggaagcgctagcctggaagagacaggaaggctgcgccgttgacatgcggaccccacatgtcaacctaaaggaccgcagtagaccgagtacacagagacggtccacgggtagacggaagcagaccccgtgtgtcaaccgaggtgagtggccgacaaacggactccactagacaccacgcgggctgcacacgtggaaacaacgcggctaccgagcgggcacactaacacggacactacacggtcaccacccgcacacgtgaacgactaccgacacaggtacacgggtaccggggtcgacagccgcacaacgggtacggggtgacaccaaaaggacgaggacaagggcgacgagggagagatccttaccaccacgcgacgaggcgtgggaacgacaacgacgaaggagcgcggcggagacggctcggggacgacggaggcgaacggcgagggaacgacttcggcggcgatccttggacgaaggtgagacgcggccggcgcagggcttgacgacacggagacgaggacgaagatgacgacggggctgcagcggctcgcttgatgaaccacggatggcgaaacacgatcgggaggacgacgaccggaacgggcgaggaggcgacgagggcagccggcagcagctgcacggaggtgaggacgacgtggaacacgccgctgcgatgcccacgacggtggcggcgcagcgagacgacgagccggcgaggaggaacgactgactggaggagtcgtcgacgaggacgaacggagacgacgataacgaacaccggcggggttcgggtggaggggaggcgaggccgaggacgacctttccgctgcgatgccggaggtggtggtggcgcggccgacggcgcacgggtggaggaagggccgaccggggaaattccggcgaggcggatggagaggccggcgcggcacggcggtgttccggcgaaacagaggagcagccggaggagagga

SEQ ID NO: 5871 - DNA, 41269 bp, Oryza sativa
gaataaatgaagcacataagagatgtaagagttgattatagtaatacactcgacaatgtgcattaagaaagaaagagtacaatcaatatagggataaaaacgggtaaggtgtttagcaaaaatataaaagggagcagggaagggagttgccggaccctaattgaggaccggaacggggcggcagggggctcaggacatcggaacggacggaagacacaagagggcgggcctaggagcggaacgttctcgcgagttgacggcactgggctcgaggcgcggcggcggctcctggcttggcaccggcgcgcggtgggcaagggcgcccgcgcaaggcaataggcacgcgacacgacgacgggacggcggcacggcgacaggcaacgcgacacggcgaggaacgccggcgcgacgacgggcaacgtgacggctacgcggcacgccagtggcacggggcgcgagacggcgagcgcgtggcgcgaggcgacggaacagcggcgcggcaatgtgaccgcgacaggcgacgcgacggcaacacggcacggcatcggcgcggggcgcgagaagaaagccggcgatggtgacggcgcgtgtcggctcgggcacggcagccggcgatggcgacggcgcgtggcggctcgggcgcggcagccggcgatggcaacggcgcgtggcggctcgggcgcgacaggcggcgatggcgacggcacgtggcaccaggcggtgatggcgacggcgcgcggctgctcggggcataaggcgcgcgcggtaggggaaagggcagggctagggaacctcgtcgagcacttacagcgcaatgaacagtgatttttttctatttttccaatttggttgtttttcctattcaaatcttgtcccaatatttctaattttcacacaagtgaggttctcccaatgtttgagttattctaatcggagggttcacccgagattaatattatccctatttatttttatataatttgcttgaatttaattagagtaaattcttatcccatcgcacctaaatttaattgttaccaatatggtcgcgataatattttatttatttccaaccttacctaatctttattttaaattatattttaatcagttattttgccaatctaattttagggtttattcctaatgaattattccttatttgcgatcggtaaactttgaaaccaaattccaataaaataggcaaataaaaatcggcatgatgcaatttattaaaaagtttttgaaggcccatatttttagagttttgattttcgttggtcgaattttcagggtgttacagagagagaggctctgcctccgggatttggacgcacgcggcttggagcgaccgagcatgggcggctgcggggcacaggcgcggcggggccgacgtggcggcgaccgggtggtcggccacgcgcgagcgcgcgcgcgcggctgcgagggcgcggccggattcaaacggcaacggcgggaaaccggcgctggtgggagagctcaatgagagagagagaaagagagagagagatagagagagagagcgaggaagagaagagagggaatggctctctcgcgtgcgcagcgcacgagcaagcacgtgaggggaggagcagcagaggggagagaaccaggctgagaggagatgggccgaaggagggaattggcccacaaaaatccgagggacgcaaaatagactttgacagagagattgaatttggagagaattggaggttagaaatggaatttggatatctttagagtcagacgaatatttggcaaggttttgagatttggaatttgaattccgaatttgattacttggactcagggaaacaaggaggagtcaacaacgggattcaaaaggggaatttgatatttttaggattgggacaatttatttggcggggattcaaaggatgcgattgacctttggaataattgaattggaattgggatcttgaggtggaggattttgttgccgacgagaggaaataacgatggatttgaattgagatccacggcacgacttagactcagcactcaaagaacgaaaattttcgcatataggattttggcgaattagtttttaacgtcccacgaaaagcggagcgttacatgttccttcacttacgcattgattttgtcttatagttgttctttgtatttgtctctcttcttataacttgatgcgtcttgtggaaaccctatcttccaactcgtctttgaggacaaaccccttacacgtccagagtgttcggcagtccccaacgccgcagtaagctggtctcgctccctccgtgggacgaactgtcctgctctttctttctcgactatctgctgcaaattagtagtcacttgttctatgtctggagtctcgaatagtatgtctccctcatccgagacttgacctgtgttgtgcgcccaaacccagttcttgctacgttccaccatggggtctaccagcagaggtttgccggccgctgcaaatctctgcttggtctcccgccattgatcgacgtgcccagcgtatccgattgacccctatctatgggtatatttgttcttcttcgcgaggtctgacattttttttcctcaaagccaatgcttcaactgttgtatgatctttaacaaacgtattccagtcagcctgcaatatatgtccaaattccgtgaacggtggcagattcttctgatcataatcccgatttagatcggatccaggagggtacacaaaatacttctgcaactcattccagagaagtgtcttgatgttgtcgtccaccgtttcccataacttgacattaatgggacaacgcgtcctgattagagtgccacaggtgttgctaaacttggaccgcactatcggtggctcgacgggcttcccatcctgatcgagagcaatcatgttgtaaatttccttgggtaatttattcttgcttctctcaccacgtctttttttcccactcccgcctgcacttatggatgtatccgtacgttcaggtgcagacgtagcagtgtccatctcaacttcttcctctctcctggtcctcgcgactttacgtttcgagcagcatcagacttccatctgcatagtataggtaactctctacaccattaggttcatgtcacatcatagttagtaaataatatatggctaacgatgttcagcacttatggcctgttccataggtatgtagtctggatcatcatcgcgaggggcgacttgtgttatttccattggaaacgggtcacttggtttgcgccacgtttctttactaaaagtgtcatgctgcttgttgctaccggattttttaggagcggtaccttcttgaggcgctattggtgcgttcgatggaaccttatcgttcgacatcttccaacttgacgtaaaaaaaaattggcataagtcccaatttaacataatttgacatatgtcccaatttgacttaagtcccaatttgacataattccaattttaacatatgtcccaatttaacataagtcccaatttaacataaatcacaattttaacataagtctcatttcaacataagtcccaatttaacataagtcttaattttacataagtctgagattgacacaagtcgcaatttaacataattccgagattgacatcagacccaatatatgtaacataagtgccaatataacattcatcccaatttaacataagtcccaattttaacattagtcccattttaacataagttccaatttaacgtaagtcccaatttaacataagccccaattttaacataattcccaattttaacataagtcgtaatttaaacaatctcacaattaaactaaagtccacaattgcacaatttcacaaaagtcccaatttaacaatccacagctaaacattctcaaaattaaacaatccacaatccacaattgcacatttcacaatccacaattaaacaatacacaatgcacaattgcacatttcacatttcttttttttaaaggaaatagtaccgggggacttgggaccggaggagccggcacggcggtggtggggaggtattgccggtggtgacggcggtgacagagaggggtaggacttcggggaggacccggcgtggccttggcggtgaggggccgggatgatttgcgaaggagccggcggtggcggggaagacttggcggcgtcgaggggccgggaggacttggggaggagctagcggtggcggggaggacatgacggcagcgacggcgagggggccagggagaggtcctggcggcggcaacggtgatggcgagggggacgacttcggggaggagccggcggtggcggggaggacgtggcggcagcgacggcgagggggccggggagaggtcctggcgacggcgacggtgagggggacgacttcgaggaggagccggcagaggacttggcggcagcgacggcgagggggccaaggagaggtcctggcggcggcggcggtgacggcgagggggacgacttcggggaggagccggtagaggacttggcagcgagggggaggtcttggggagtagccggcggtggcggggaggacttggcggcggcgacgcggcgaggggggaaattttggcagcctggcggctagggttcgcgggtgccaggacttagaaaattttcgctccccgcgctccctataagaactaaacaattagatgaattcttaggatgtaatttcaaatcacaaaatgatttaggttaaaatgacccaacaattcgaattaagcgattccgcgaactttgttgtcaatttagaaagagtgtttcgcgttcaacgtttgtgtgaattatttggatttcatttgaattctaactgaattcaaattgttccttcgtacgtaattatagagcctgagggagttgcggatcaaagtgaaggtcaagacccgcaagactttgagcaaggcaagtcatcgctattctttgaacatgttgatcccaattgcgaaattattttgtttacaaataagtttgcatgcaatgataaacatcctacttgtgattatgccatgccttgattattgtttacctttaaatctttgtaaccataaatacgtattagtccttagtcaattatgacacttgcttagaactgctattctagacttatgcacactcatattttatcaaatgctatatgtttggggcaattatctttgggaagataattgagatgcggcatgtggagacgtgagcgccacattgccatgataacaatggcatgatttgagaaagtaggaatgaaattaaatacatgttttagactggggtggacggtgaatttgggtggtatccgggaaaggctagtaccgtccccagtcaattaaggaccgagccatgaagttaagcatgaaacgaccccgtacaaccacacttctcgtatggggatagacctagcagagtaaatagctgagcagaggcagtacccaagcatagtggtttcttgatgtgtgaggcaggggctctacagtggcattgccattggtaggactgccatatgataatttaaaacatgattataacttaatgtgtgtatgaaaagctttccttcccgggtgcgccagaactcctctcactgctagaaactgtgtacgcctagagtgcatgaggatgaaaagttcatggagcgggtactgccaatgcgaggttatcgaaaagctttgccgtgacacgtttcatgtgttgagacgaggctcatgtgttgggcagtcgcggagtgtgggtaaagtgtacatccactgtagtgtgagtaaaccaaatctattcgaatagccgtgctcgcggttattgagcaccgggacatgtattacacttggctagactctaaattcttaactggtgtgggatgggttattgcatgatgaattttatgctgttggagccacttcctgagaaaggggaaggtggacgtcctcagaaaatcatgacgattcaatggcgggaagctatccttaggatcacaatggatggtggacagaaccgtcgttgtttaaatataaacactggtactaaaatttgatcagtcaatgctaggtcttaggcttgtgaaaagaattacaaaacttgctttgcgcaaaagaaccatagccatcctttgaaatacccctatcatgtgtattgttgatgtggtggcttgctgagtatggttggtactcacccttgcaaatataaacttaatcagaggccggagatgaagcttcggaggacccctatgcctattaccaggagggtgatgaagacgatggagctcaataggtcttagtgacggtcgttgcctgtggcaatggcatgccgctgccttaattccgctgcctcatctatttctgcttttaggatatattccggactgctcggtccgatgatttaagactacgcctgcgggtttatgttgtaataattcgcactagactctcgtgtatgtgcatttggtatttcagctatgaactcgtgtgtaccagactacttgatccagggaaatggtactgtttacacgattgactcttgttataaaaacgggggtccacacttttactcttaaattcaaggatatatactggttgtaaattttttttactgacaagatttaacatttgtaatatttttatactctcaaaatcaacaaagagtaaaatctttactcctgattttagatatttgttccggtctatcaaaaagtatctcgtggtaatggtacctcatgataccaaatcgttttcgatcgttggatctaacaatgaccatcctgcccagttagatccaacgatcggaaacgatttagtaccgtgaggtaccggtacctcgaggtaccttttgttggaccgaaacaaatatcctaattttatgcatgtgtagggatgacgtaaagagagagaggggaagaggagcccatcgactaaagcagaaaaggacaatgagagacaagaggtttttatttttacaaaaaaaaacttgttaaaacctcgcgcgttgcagcgggatattttgttgtgattgttggtttcatttggtaaactgtagtgttataaaaacggtaataagttcattttaggtccctcaatttgtcgtctagtccgaaattcgtccctaaaccgcgataccagatatggcacgtccgttaattctcaaaaccagtgcaaataaggtcccaaggtggtttatacaatggttttggctgatatggcacttacgtggcattgataaaatcagaaaaaacaatgggaaccacatgtcatcaattgttcagttaaaaataaaaaaatacagtgggaccaatgttatctcctctctttcacctcttctctccctcctctctctccctctttgtgttcagaggagagtggcatggcgagtggaaacattgttgagttgtgatccaaattcatttgcacttaataaaggccagcttctgccgtagctcagaggcacagctgatgcttgcttgaagtttggcaggactgataaggggcttgttggatatgtggattcagattttgctgcagatttagataagagaaggtcactcacaggttatgtgtttaccattggtagttgtgctgtgagttggaaggcaacattgcagcctgttgttgcccagtctaccactgaagcagaatacatggctattgctgaagcatgtaaagaatcagtttggctgaaaggattgtttgctgagctttgtggagttgattcttgcattaacttgttttgtgacagtcaaagtgctatatgcctcaccaaagatcagatgtttcatgagaggacaaagcacattgatatcaagtaccattatgttcgcgatgtagtccacaaggtaagctaaaggtatgcaagataagtactcatgataatcctgctgatatgatgacgaaacatgttcctgttgctaagtttgagctttgctcaagcttagttagtatagtgatttagcccgagaggctattttggcgccgaaagtgtttttttgtctttgttgtgttcagggtgaaggattgattcatgctacaagaaggaatttgtctcgaggtggagtttgttgagttgtgatccaaattcatttgcacttaataaatgccagcttaggccagcacctggggacgcctgggggatgcgggggcggagcccccgcggtatggatcgtcatcctttttagggttccaccatatatatacctattgtaagccgccatgcggtgatgtaacctcacctcagatatagtgaagatattttgctggctggcgcccgtggtttttttctctcctattttgggaggggtttccacgttaaatctcttgtcttctgtgaatgatatattgttcttttatcgtttgttcgcctatcgtttcctaacaagcatgagctcattgcggcagtgttctagtaggattctggccgccgctcgtgctcgcgccagcgccagaaccctaagacgtcgctggagccccggcgcactttattcacggcgcagagtgatgccaccatcgacgacctaggctgggccacctcaccccgtcaaacgagctccggcggatgcttgtcctggcggtcgatgtctataactcgatatatatgtgaactgacatgtctccttccaaatcaagagcagcagcatcagcttacccactctttgctctccctcactgctatacacttaatggaaaaatggtcatttcccacaagttcaaattatcaatacaaagctagttgcagtgtccagttcttcgatcaccatctaagctctagctgcagcatataattcagagctagtggccatagcacgtactactagcttgatccgtggctacggtggcgtcgctagcgagagacccgaagtggcgggtgatggggccggatggcgcgatggtgagggtggagcacaagaacggcttttgggccaccatggcgggtttggaagatcggcaccgacgaccatcggagggcggtgcacggagtcaaggtcggcctcacgctcgccctcgtctccatgttctaccacactaggcccctctacgatgatgccagcgccgccgctatatatgtgggtcgtcatgaccgttgtcatcgtcttcgagtacaccgttggtaattgtgtgaccgatcgttgactgtcagcatcacacgtatgtcgcaacgacgtagatggaatgtggcacgtgcatgcgttgcaggtggctgtgtgtacaagggattcaaccaggacaccatgacggtgaatgcagggacagagagggagtggcctcgacgaggtggaggccagcgggcacggaggcagtggagggggtagcggcacgggagaaggaagagggtcttcatcatggcgaaggtggtggaggtcgcacgagtggcggccagaatcccacaggagtgccgcctcaacgagctctgccgcctcgtgcttctcctcgctcgccgttcggcgcgctctcctctgaacccaagagagagaggacggaggaggaagggagagaagagataggaaagaaagggatgacgtgggtcccactgtaattttttatatttaatcaaacaatcattgacatgtgggtcccgtggttctttttaacttaatttgtcaacgcaagtaggcaccatgtcaaccgaaatagtcatccaaactgcttgggacattatttacattggttttgggagtagggggacgtgtcatatctggtattgtggtttagggccaaatttcggactctgtgacaaattgacggacataaagttaacttgtttcataaaaatccctcactgttgaattgggccacgatcaacttagatgggcctccagtggtggaaaatatacatgggctcatgtggtggctgtgtgtgactgggttgggttgtgtttaatttgaccatatgctatgttttttcatccaacggttcaaaggcaatcaaatctactgatccaacgactgagaattgacgatgacgtgaaaattgaggtttgagtttaggatcttaattgcagttagtgggttataattttacagtaagaagtgatgtgcggtggggttgaggtgttcgatctggaccattcttcaattgatacattaaggacgttgtatatttgcactgagaccggggtttgcacctgatacttcccgtgtataattgacacatatattgactcactaatataacctcagcaccatacaagctttaaaaggtcacaatatatttatctcaaaatggacttggtttcaccaatatacgcctacaaatgtggaaatttttagcacgaacgataaacagcagtaatatttcctagttcttacaagcatggttgacttataaatagtactacagcatacttaaagtagacaaacagtgcataaaaaaaacatattgctcccttaaacaacattgtcatgttctggcctcctgatgatcccagcatgagtgagaagtgcccagaggattgttatcagctcgcctcccctggcaatggcctttgcatgtgcctttgtattgtcggaaggagcaacatatagcatcatctctgaccaaaactcagcaagcatattccaccccttgttttcattctgaattccatcaaccagctgcttgccgagttgtacacctttgcacaccacctcattgctctttgatttttcactcagtaattgcatcatgcggtcaaattcgaaacacctcatatcagtgctgcccaaaacagagtcggtgatcttcttggcagatttatacaattcttttgaccatggagtgtcatctggcagtagctctgggcacgatgctagcaaatatgcacagtactttgacaagtgaatggcagtgatcatatcatcattctcatcaggagagctatgacgttctgaaggatcatgcatgtgcctgatctcaaagatgcaagttgcaatgtgccaaacaagaataatgtcagatgtcccttcaccattgcaagcccaacgaatatcgtcacgcagatggcacttctgcaaagatgctatgccattgctcagctgcccattgctacctttaagtgagttgatgagagcagccttcaccggctttggtatcttggtaggcttcattgctttagacagcctgaataggtgcctaatatgacctttcctcttgcaaggatctaatagagaggtcatgcccattttgtcaccccagtaattcatgagcttgcatctgcaccacagaaaacaagcaatcaatcgtctcatgattcgagacttttgccatgatggctttgctgtgtaggcgcaaaccagggtaactttggtccagttagagcaaacgtaagatatgatctcccatacctcaccaagcaaaactaccagaagaagggagatcgttggcaccaacacgaacaagatgcttccaatatcatgaaatctatcattatcttgttcaccgcatgttaattcgcaggacattaccctgtagtccttatactctggaagaattttccaagccagtgtaatcacgatgaagatgcaaaatgccatggtaaagagtgaggtcatgatgctcataatgggcaaccacttacccaaatgggagatcgggtgggacgagtaatagaaatcccaagcaaatgatagctcatctgtgataaccctgaacacagcttcaggatctgcgtctgccccatccgtgagcaatataccacgaacaaagtgaaaggccttctcagaacctgcctcaaccagtgggtacctagcaaatcgccttcgcagaagcttaaacaatgagaatgacatgcagagatgtttcagtgctggtcttggccccaaaagagcatcattcatttctgccaaatgccaaactttgtcaatggttaccaagttaccattgcttgtcatcgcacttgtcccgttctggctaaaagtgctacgtttgaagtgataaccatgaggtcctttctcaatctgttgtttgtcttctcccattaccacgagtgctaaaagcctttgtattgtcacctctgcaacttctgatacctgtagtctgtacaattcttccatatatccagcaataagactaggattttgtcccatagcgaaggagcgccgtgccctcccgtatgcaacaaattttagaataatcttgatgaaaccaaggcccagtaatgttgatatgatgatatctggcaattcttcggtttttttttgtgtagtagtacaacacaaggaagaaggtccaaatctgtcgagcaagcatcgctattgattcaaaattcccaccttcatttccattatgaacggcagtcaatattgaacttgtattcatcccaaccattggcagcagcgctgcccatagtagcagacagaatgcgcggttgtcaacgcattccaaaccgtgaaacaagttgtagtacttgtctctgccgacgtaggagacaacataggagaggattggtaggactagagtggatgctcccagaaaaagatagcggttcaaagcaatatgccggtaacgacggccataagagccagctcccacaaggatcaccaccaagaatgcattggcgacgaagagcgcattcgtcgtcagtacatctttgtttatgcgctctatcaagtcgtttgagcggaagccacatgtggtagacgacattatagcttttatagatcttgcaaccttgttgtgacaatctggtttacatatattgcacattcattagggttagactggaaaaagagttagcttataattaagaaattaaccacaaagttatattttttgtgtccctatttattctcacatgtttgaagctcttacctgacctatatggaacaaatcactaaaataaacaaaaaagaaaaggaaaaaagaagaatgtcccaaaaataccaccttgaatttcaatgttagaaatattccactctaaaacatgttctccttgatttatgccatcatagacttgacattaggtcaaaaatattttttgtagctctcccaacgttaaatttaactggacagtgtaattaaatgaaagaaatcaggtttggggtggcatatatatttttagctatgatattctgggtgacatatatcaaatctatgtattatataccaaaagtccactaaacttcctataaacgctccaaagttgtcacgtagcgcttcaacaagcattcctaggcccgccatgtggcattctacaatcccaccatcgattttatgtcgcgtcccaaatcgaccctaaaatagatcctctaaattatgcctagaataattaaaatacttatgaaatccttcaaaaattaaaatgtgcaaagttaaaagtcaaataaggcttggaggatttttgtatatttcctaaaagcctaaaatgtgtaaataaattttagtggaattttcagagcacaaataataattattaagaaataaacaaagttaaaatgattttataaaagaaaaaccttaaaatcccccccctccccctcttgggccggctcggcccatctcccttcccctctccctcctcctccccgcggcccactcggcctctccgagcgcgcgcgccgctgacgggcgggcccgcccgccaccctcactgacgggtggggcccacccgtcatccccgacctcccgccgctcccgccgctccgcctgcgccaagcgccgccgccgccgtcgaatccgccgcatcccgccgtccccgcgtgcatttaagtggggggaatcactccccgtgatcccctctccctttccccccaattttccctccctctctcccttggattcgtttggaaacccctcccctaatcccaccggcgccattgatggagcccgagaacgccgcgccggtttccttcctctctcggccgccctctctctcccctgccctatttaaaccctccccgcgcttctcccgtccgtttccgcctctcgccgcccttcctcctcgccggattcgagctcgcgccgtcgctctctctctccgccgtcgccgccgagctccggtccgccaccgtcgtcgccccggaccgcctcccacctcggcgccgcctccttcagcttcgccgcatccttgccgacctcgtccacccctccgtttcgctcgccgaccaccggagcaccaccgaccccgtcgacccgagccgcgccaccgcctccctccgctccggccgcctcctccgccgccgccgtcgccccggggtgagccgtggaccgtcgcctcctttcccccttccctcccctctctcggccgccgctccgccgcgccagtggtcgccggcggcgaccatcggggcgcgggcgccgcctcccgccggccgcgtcgacgtggccaccttcgggcgcgccgcgcggttgccgcgtggggcccagccgtcagccgcccgcgccctcggctgcggctgacgcgtggggcccacggcgccggccggagtgagcccgggtgcacccggtccaccgtggaccgtgaggctgccgcgtggttcccacccccgtggacctggtccgcgcgcccctctctcccggctgacacaataaatcccttttaaattaaaatttaaatgaagaaattcgtaaatattcatttaaagagcatataaacttcaaatggccataacttggctatttgaactcggaattggaccgttcaagtctctaatttttccttaagaagtcaagaacccatttttgtgctttgttcctgcttgttatatggagtttattagagtaaaagcccttttcttttccgttgctcgtgtagacgctgcagcttcggaagatccgctcttcgtggaggttgaagccgacgtttgggaaagcgagcaaggcaagtcacatcatctttgaacatattggatcccagtttgtgaaattattttgatttaaattaatgcattatcgctttatttaaattcccgcgttatcactgttttatttagccatgcctgtttacctttgttatgaccttattattattgctattgttattattaccttgttcaccctagaataaacaaaaccccaactagtgggtactctattcatggtgccactagtatgaatttaggtagatgcttcgctgattaattaggcaacattaggtggttttataactctagactttgggaatattcatatcacttgaacattatggaatggttggattattgcgaaattggatgcacacctccccctctattcaaaaccctcaaaatggttttaggctgggctcggggtgcatggttttgatagtagcacctcggccacgtaaggaccggtcttcgggcctctgttgcaaagcactcccgtacttccacatgtctagtgggtaaggcttagtttgtggctcagtatggttataaacaaaagtacacggatggagagggacgaagtcgggggtcgatggacatctctaggacaaatgaatgctacacgagctgcggcccggtagtcaagaagtcatggcacaggcctggtgtcctgctgctaggggctcagtcctgcctacctgtcccggaggttccggccgtaggtggggttgggtcggtactcttgtctatggctaggatgggttggaaactatgtcatgtcttccgtccatatgccatggtggtatgtggcacgtggttgcacgtgaggaagacgtgtcttgtgggtaaagatgtacacctctgatcaaagtaaaacctattcgaatagccgcgccctcggttatgggcaagcctagcaatgtacccaagttagtgttttcaattcttaaaacctgcttaacaactaaaatgtggaatggttggcctgggttggcttgggacgagctgggacccagggtcgggttgccagttcggtctgaatcatcgtaggccttgggttaaggcaggttcgtgtgggttcacagccttgtttaataatattaaatagttctaggatcgtgttttaaatttagcttcgagcaactaagtgtcttttaaatgctgtttactgcaaaacctaacccctatactataactccattgtactccctcgcatttatgttgcacttgtgggtgtgtcttgttgagtacggtggttgtactcagtcttgcttaatttttcccaaacccagaagaggagcccctggatgatgaaggctttggtgtttagctcgtgcttgccgtcaaacgcctgtggtcgtcgccctagtcttccgctgtttcccgtttgtctttgtgtgagctgggccttcgccgcccatgtaataattaactatttacgcttccgcttgttaaactctgaattgtatcaacttttggtgtaccttgcctcctgggacaaggaataatacacgcacgtaaggaacgcccgttgggttatttccggtcgtgacattttagaaggactggatctatgtcaaaatcgcgtgcacaagggcgtctcgggaccaatcagacatgcgaaaaattgtgcgcaaggacgttgtgggcccaatcgtggaagcgcgcaaaggcgcgtatgaaaaatgggcttaatcgctggcctgatcgctgcatgtggcaaggggcacatggaaacgtgcaagcccaaataattcacgcacgtctcagataagagggacactttggcgtaagaaaaaagaaaaaggttttgacagaaacataaaattaaaaacaaaacataaaaataaaaacgattcaaacacgatgacgtgccgaaattccggtgaaaacatcttcaatttttataatagtagattgaagttttaaaatttttataaaatatctataagatggtaatatgaaaccattgtaaaaaaagagaataaaatattttctctcactattaccaatccttgaactcaggatctcttggacaaatcatttttgtcttcaataaactaaccaacttaacccgtgtcattaattgtatatttgtgccttgagtattgtttaacaaacttaccaaattattttgcaaaaaatgtattatttaacagtttgaaaagcgtgctaatgaaaaacaaggaagttgatgtttggtgttgaagaaaagaacagagcctcagaaatatctctacagagttttaaatatttgattaaaatgcctttacatattgttgacggtcgttatcgatcagtttcgatcgtcaatattaccaaaatagaagagaactagtgatgcttgcaatgcataaatatgttagaataataatattccactagtattaggtatactaaccttttgcagagaatgacactaaagtggaggagaatcgacatcaacatggaagataaatcagtctgacgatgtcgagaatcagacttatgcatgaatgggccaagaactcagaattaacacgtcaaactgggccaaaattcataagtctacaaaaaggagcaacagaggtggccgccagccgaaaggtgggctggttgggccggcccctagttcgaccgaacctccctcgcctccgttggatccaggttttggctggacggttgagatgaagccccaatgacggttggagggtattaccgaccattccaaccgtcacaaccgtcatagttcagctataaaaggagctccccttctcacttcactcacacaccttaagcaatagctctctcatttctctcaagtttagtatagtagtatctagctggtaaatagaattagaataggaatcaggagtccggaagtcttcggaagagtttgggtatggctctagtagcttttctcttctcttttgtaagctttgtacttttattagaatactcttctaaatacatttatggtattgaaatactttccgagtatatgagtacctactttacattatgttcatgttatgctgaatatacggctagcttatctgggagatgctttggtgcgggtacaatgtttgcttatgcaattactctatgttatgatgatgatattagagtagtatctggtagtttagacgtggtgtctagattacgggatatcattatttagggttatatattgcggatgagaggtgggccgctgatggtgacagttcagtacgggtattcctctgcgctggtatataatcctaagttaattccctggggagggtatttctccgtatttagctccggttgtatggtcatgacaggctgtcgtaaggaactcggcagtcaggggtggcttctcgaagtaccaggagggcattggatcgaaagtattagctagtatatcagttaactagaatgtatgtatactatgtatattagaagtataggaatagattatctttctcttttctaaccacttagcttagataatatattatgagaatgagtagttaatgcttgtgtgtcactctacctttaaattatcttaacccttgcttagaatatgattataacaagtaatatataaattgttagtcaagttctctctacatgattttcccacgtgataaaataaatacgatacccttggaatattctcgggtgaaatgctacaatggtatatctgtgcgcttgcggatgaactctgtaaccatactataccaggagtatttctgcgccattgttgggaattatatttctagtaatgtcgttaagaaataccaacacttattaggcgcattttaaagtgtaaaaaaaatgcctctataaaatgtgttgaaaatatctctacaatgtctctagagtacacattttctaggcaatttttaatgtgtctataaaatgtttggggtaattgtgttcttgcccttgctttccgattcaattgtacttttacctttttagggattgtgtttttacctttttttcaaaatgaagtagctgtttgaccttgatcatgacgaaaaatttgataatttaacactttttttatttcccaattgttttagttagcacttgtgaggataacatgtggtaccatttgaacgattaaaagtaggccaggatgtcaaataatcgaaaccaattttaaaaactgttaaattatcaaatctctagagtgtggccagaattttcgagtaaaacaaatgggggagaaaataaaaaatgattttgtaatttgtgaatgactgttatacctctcgtgagtaaataaatcactcaagtagctgtgtgaatcaggctccgcatcccaaaaccctagaggatttggcggcggcggcggcacgaacaaagcggcggtgacacgaacaggtgacggggaggcacggcgacgacgcgacgtagggatgaagtatcaggcggcggcgaccgtggggcggcacgaaggggaggcgcgtgcgccgcggaccgtcgccaggactacgggcggacacaaaggggaggcgcgacggggacaacgggacgcaggggaggcgcacgcgcggccgaccatcgtcgggactgcgccgcggaacagcgctgctggaggcaagtaggcgcagaggtggcgggcgggtacggtatcgacacttcgacagcgaccaagtcggccacaacattttgccgctgggtgcatcggcggaagaggaaggtgtcgaccgcatcgtctcatgcgaatcctggacctcctccttgttggatcccagctttgctcaaagctagctaccgctgccaccgaggaactgggagggtttaatcagtggcagatgtaggaggggataataggggtctgaataaactatataaagctacaaccacccttcctatttacatatagcaaaaaaaaaaaaattagcggggctgaggagactgaaatttactccatatttctatatttttcatggattatttgaggagactgagaagagtgggttttgggggcagacctataacattttatacttgttgggtatttgaaatttgttctttggaaaaaagctttgagaattagttgaaaggtctgcgtatatttgaatgtatgatttaatttcaattaagacacttgagtggagtatattgttgtagcaatattaaaatattaatatcatgtactaaatacctcgaaggacacgtgcagatagtggtaatcaaaatttggtcgattaatgggaagtggaaattatattctgaatattgtacaggcaattgcacttgttttcataaagtaaaaagctagagtgaatcatcgttagcataattaggagtttagtgtgtcaacagatttataattcttacgtgtgttaaatgggcacattagttgatgcatacgtacgtcggtacgtgttatgtgtgtgaggtggtgcgtgtgcgtcttccacatagtactagcattttattaagtcgtatatttgtgcaactctaaccttctctccattagatgtgtctacatgttaattataataataagcttaaatttgtactaccatcatacaatgcaagcgtaacatacttgacagaaagtacgtgttgcttgaaaattaacatttttttatcatgatttgcaattaataacatcaaatagcttccatacaataattaccacaacaattgtctctctgtattgaatattgtaaatagacttgtaatctgaaatgcccaattcatgatttgttgaacaaaatggtgagtgcagtgcttagggttaggatttctattcatcttctgtattaccatttcccctttccatgtgttccgttccgccttattcgttgttgcttgagttgccgtcttcttgtcatctccgctggtgcacgagtcttgtactcctctcatattttgcttattctctacttcgtacatatatgtattatgtaatagaataggtgttcatagatgaaatctagttccaacgcaaatattttttttgagaagggtatttttttacccggcctctatatccaaccggatatatacggccattgaaatatgaaacttagacccaaacaacccaatctgaaattcgctccataggagatttgaactcaggaccttgggtactacttcggtcactgtaaccactaggctagatgccctttcgttaataactaagtattatcattaacaactaaatattatcataacaataaataattggttatcattatgataaatttctgaaatttagcgtaaaacccaaagttatagaatttagctgtgcgtaaaaatatattccttcacaatatatttttcaaatacaattggttggcattttgtggtttataaacctccaaaatgtatcagcttataagaaacaaaacatccacgccactccactctgtttgtgtgatctctctgagaaattttccactgtgacaaagagaggttaggtgtgtcagggtagaataaattgttgttatgagaatgcgtgaacagtgtgataatgtgattgaatatttgaatgggcacatgaattactacttttaactctatcagtatacacgtcaccttctcttgctaatgacacctcatcattcttttccacactttatttcctttctcattcgtgcatcccctgcttgaagggtctagaaccctctgctttttacctctagtatttaagttcgatcgaaccgttaaaattgatttcacgttttttccttagctaatccaacggctatatttctaagatgatgtggcacattcttgtctcatttcactagtgaagattcgaaaagaaagagtacaactagagaggatcatctttcgaatcctcggtcctgactactacttctgacacaaaccatcttaaaaagatgattagcgtggtggataacgagtcagccctgatcgttaaggttcgacttaattaggcttggttcgatcggattgttttaacaagccaaaggtaattaactcggttcatctcgtgagctagctcgtgaaggttgttagattcattaacacatttatatcatctttataatctgaaattgaccactttatcatatattaacacaataataaacactagctaatataaagaaatcacaaaatagatagtttggaaataactagctaaatgactaaattaacaatagctaaaaagcactaaatatgcatataaagatacgaaacgatctaatcaagcagcttaagagcttaaagtctcatcatgactataagtttgagctgataggagacacgagattcgaactttctttttaccacttaagtttgtgggagatgtagctgtatatttttcttcactccatttattttttttatatataatgtcattgacttttgatatgatgggcttatttggtttggagccaatttttgccctaccaaaatctaggtagtaccaaaacattggtaaattttggcactaccaaattgggtagtattcaatttgatctatggtgggtaaaatttggtagtaaaacaaacatctacttgctactattgaagttgccaaaattttagtagggtagtaaattggtatcaaaacaaataagcccgatatttgatgattcgtcctatttaaaaattatataagtattatttcttttgtcgtgacctttttcattaaagaccccttaagtatggcatgtactttatcatatttgcactaactttttaataacataaatgctcaaatattgttataaaagccatagatagcaactattgagaaattaaggaggtagtatttaattaattaatttttatgagcctacagttttggtagctgagaagcattttaaggcattcctaaggatataatgggggtgcaaaccagaataaatgacagtgggtgtatgagacccactactacacaaataattttcctgtacaaacacttcaatagattgtagatagatcataagtgttcgcgtctgtaaaattttattttcgtatatggccctcttaaggtgtcgttgcaaaattaggatgattttccagacgagccacttaagaggtcacacggaaaaaaatattttcgtagacgagcttcttaaggatctgtccataagtctgatttacctcctcttccttctcagcacttcattttttttttaaatcatccttatctcctctcctgtctcctcatactcctcgctctatctcaaactcctctctcccggacagaactctctactctctctctcccggaccagacggcggcagcggggggccctccatggcctagatccgcgcggatctggctgcggccgtcccctgccctgaccagtagcaggagagcccgaccagctagcattttgcgattttcttttcagattttttatttttgcgtgtggacgacagaagcacctgtacggaaaaaatgggattttcgtggcgtgtgggtcacccgtatggaaaaatagcgattttcgtagacccggcacgtgaaaatcacttttgactcgtatggaaaaattactttttactagtgacggatgaattgtaccaaggattgagcctgcttaccgtgtcaaaatcgcgatgatcaatgtaacactaacgcagtatcatgaagccaacatatgttttccatcaaagaaataactcatatttaacttggagaaatccctacaaaagattggattacattgtcaactctcaaggcaagtctgcctgaaggaaaaacactctcaagactagtgtgaaattgatcatctcaacaaaaacgcatacattaattagaaaacagaaatgggcaaaaagaaaagaacaggagaacaaagatagagattaattacacttcatcagtgttttgaaagaatctgctttccgatcgaggaacttcaagggcagtagtttcagcacgtacgggtaacatatttatactgaatgatcaagcaagaaggagagcaaacaacgcccacagcgaagtcgaaacgacattggatttgatgaagtgaagtcaacgttagccacagttgcaaaaataatagatcgagaccggtattctagaacaaagtggcttggctgtaagtctccagatcttttacggtgtagtatccatcattaacttctaaacagttaattaggaatagaaactaatattagcacgtgtagtttagtaattcctcaatcaccatccctcggctggcccaacatgtctgtctaactctagtgaaagaatgaacgcagcgagtttgcgggcgaggagcagcggggaggcaccctcaaggcctcaactccctcacgcaggcacgggtcatgggtgttgtgaatagaattgattgagcgagagagattgagtgagagagaattgcacataagaatatagagaatgaatgagcgatcatttattgataacaatggttacaatatataggggggagagaggcggcaacagaagacgcgataatttgggaaccatcgcgtccgttgttagaatcgccgtgaggcgagaagaggtgtggggcacgaccaaccatcgtgtcccagaatttattgctgctctatctatatagatggatgagatcacccaaatatttcagaacactctcccttgatcgaatccagctttgatcattactcatttagtgttccagatatctgtaaagataatcttagaaataattatagttaaatacatcacgtaaaactactcgaaaacccagtgggaaaaataaggagagaaccgtgatatatattatggactattttagatctatgagtaaagctcatagtttgatccaaaatagtataatgtctatagttatcatttagtaaaaacccagtggggaaaagccaaatgataagacatataagcttatattgatattacctcgttaaaaactttggatgagaaaacctaaagggtaaaactcatacaaaggaaaaagagtataatatgacgaaaataggttattttccagaggaagatactccccctgaatcctgcaaatttttaagtcgtctcataccaattccttcgacacatttaaagaatgtggagtatggtagagattttgtgaataaatcagcaagattatcacatgacttagtttgcaagatgtttatctctccatgttgctgaagctcatgaggataaaataatttatgagcaatatgcttagtgatgttgctcttaatataaccagtttccatctgaacaacacaagcggtattatcttcatagataatggtaggtgattccaatgaaccaataccacaagatgttaatacgtggttaaccattctgcgaagccatacacattcacgtgacgcctcatataatgcaattatttcagaataatttgtggaagtggctaccagagtctgtttagaagacttccatgaaatagcagttccaccctgtaaaaatacgaatcctgtttgtgatctggcgttgtggggatcagatagatagccagcatcagtatacccaattaaagtcgaatcctggttctttttaaagaaaagtccaagatctcttgtgccattaagatatcgaatgacattcttaactccagtccaatggcgtttggtaggagcagcgctgtatcttgctaatagatttaccgagaaagcaatatctggcctcgtactatttgcaaggtacataagtgcgccaatagcactaagatatggaaaatcaggaccaagtacatcctctccatcttcctttggtctaaatggatctttctccacgtctagagatcgaaccaccataggggttttggaaggatatgacttgtccatattaaatttctccaaaattttctgggtatatgcactttggtgcacaaggattccaaaaggtaaatgctcaagttgtagacctaagcaaaatttggtttgactcaaatccttcatttcaaattccgtctttaaatgatgatgtgcttcattaatatcttgtgtattgccaataatgttgagatcatcgacatataccgagataatacaaaatcctgtgggggactttttgataaagacgcacgggcaatcatcatttttagtatatccctttagtgaaaggaattcacttaatcggttgtaccacatcctgctcgattgttttaagccataaagtgacttctgcaacttaacacaatacatgttacaatttaccttctgattcgggatgtcgattccgccaggaaccttcatgtaaatatcagaatcaagtgacccataaagatatgctgtcactacgtccatcaactgcataaatagacgattttgtactgccaatgatattaaatatcagaaagttataccactcataactggagagtaagtttcgttgaaatcaacgccaggtttttgcgtaaaaccttgtgctacaggccttgctttatatctcaccacctcgttgttttcgttccgtttccggacgaaaacccatttgtatcccacaggaaagataccacgaggagtaggcattacagccgagaatacatctcttttgtaaagcgaggctaattctgcgtcaattgcgtccttccatttgttccagtcagagcgcttttggcactcttttatatacctaggttctggatcaacttggaggcactcagcaatttgttcagaaaaattagtgtcgacaattatagctcttctatcaaaagattctccagtttcagagtaattgatggcaatttcatcaacccttatagactcattgtgatctcccgaaacaatgtgtctatggtcttccgaattcctagtctcagcattgtgcaccaccgagctaggttgtagactatcacgatctgcttgacatatagtatcaatttggtgtgtaccaactaaaggttggtttgcatttaccgtctttctttgcttattagcaattgtttctcgctgagtggccatacttcttcctctctttttagtgagtggaagttgagtgcttttatttggtacctccactctttctggcgcattctgagcgggaatgaaagatttagtcacacctttataattggtaaatgcatctagcatgttatttgcaagtctttgcaaatgtataattttctgaacttgaagttcagtttcagtagtacgtgggtctgaggctggaataccctgggcatcccaatcaatttcctggcattctttttggtacttgaattctccccctaatgccgggaaatgttcctcatcaaagatagagtcagcgaaccgggcggtaaatagatcacctgttaagggttctaaatactttatgatcgacggagatttgaatcccacatagatccccactttcctgtgtgggcccatagcggtacgctgtggtggtgagatcggtatgtatacaacacattcgaacttacgcaaatgggaaatacttggaggatttccacgtactagctgcattggggaagtttcatgatatgcagttggtcgtagttggacaaggtcagcagcgtgcagaactgcatgaccctagcacaacgaaggtaatttgcaattcattaataatggtcgagcaataagcttaattcttttgatcaatgattcagccaaaccattttgtgtgtggacatatggaacagagtgctgaacctgaattcccaatgccatacaataatcatcgaaagcatgagatgtaaattcggcagctttgtccatacggattgattgaatcctatgttcagggtaatttgccttcagccttataatttgtgacatcaatttggaaaaggcatggtttcgtgtcgatagaagacacacatgagaccatctagtagatgcgtcaatcaaaaccataaagtacctgaacggtccatatcttggcacaatagggccacagatatctccttgaatgcgttcaaggaatttaagtggttcggctctgattttgagataagatggtcacaaaatcagtttcccagtagcacatgcagtgcatacgaaatcagaggatttgagaaatttgtcagtgatcaaatgatgaccaatagagttgccaataatttttctcatcatcccgataccggggtgcccaagtcgatcatgccaagtgtggaatgcatcaacattttgaaaaattactttgtacgcaacatgtgcaatgggcttaatgtatgtatagtacaacccgatgtgagagatggaattttctcgcaaatgcgtttgccatatccgttttgtttggttaagagaagaaattcttctcgattatccatatgggtttcaatgtgaaacccattttgacggatatctctataacttagtagggtacgggttgaatcaggatacaataaagcatcctcgattgtaatttgtgtacccattaggagtgtaataattgctctttctgagccaactatcacagtatcgcgcccagcgatagtcaaactttgccttctctctttttgagagtttgaaagtatttgatctccctaagtatagagtttatggtaccactgtccacaagacataattcctctccaatcggagcgatatccttagacatctataatgaaagaagaattgcatgattaagaattctttatccaatatatatacatagatacaataattaaaacatcaaatacatagtatgacgtttacatatgttaatagtacatactctaatgactaacaagccatacaaccttacaatacaagggagttcgtacttatttacttattacaaccaatattatttggcaaacttataggatatcaatatactgtttcaagcacactgagataagggcagcttcatctccaagtgggacgcatcgagatcattgcaaatctccaagtgggtccgttgagcagtattcgatgaacatatcatccatcgtagagagtggagcgacatcttctgggagaacattgaggttgctctctggttcagcaggagcctggtgagaacttgcaacctcagggtgctcttcatgtgtaatattgaagtgtgcttcaaatcttgggttctcagaagattttttgtccttgagggatttttggtacaagaggataagatgtttcgggatgcggcagtctttagcgacatgagtgtcagatccacacctgttgcaatgcttgttgccattgctacgaggttgtggtgccttacccttcccttttcctttctttcgacccttgaatttgcgcctgttgttgttgcgtttgcgctttccagtcagattcttatgattattcgaagaatttcccttgaatcctttcttattctcagcattattctgtacattgaagtgcacctcaggtagtggagcagagcccggtgggcgctgttgggcattctttaaagaaagctcatggtgtctttctgcctgagtcaatgtatgtataagcagagaatgtttccagaaattgttagcgcgatactgttgagtcagtatcctgtcctccggaagcatagttggatagagttttttctatcttttctgcctccgttggctcttgttcgcaaaacttcaacctggaacaaatgttatgaacagcatggttgtattctgccacagttttaaagtcatgtaggcgtaaatgaacccactcataattagcctcaggccaaatgagttccttttgcttatcataacgctcttttagagctttccaaatgttgagagggctcgtctctaacatgtattcatgtttgagatccttgtgaatgtagagtctcaaaagaaaaagggctgtattgagcttcctgggctcaattgccggatccccatcattgggttcctcaattgtctttagaatcccccgagaggcaaaattgattttgatatcagaaacccatatgggatagttagtcccatcgagggcgagttcgtcgaactcttttgtttccatgtccctacaatcatggttaacattatcaatttacagaggtaaattaataaaaacatgatattaaggttgtaatctcaatgcgaaatgtaaaacttcatattctgtaatgtttcgaaagatgtaggttatggacctgacaatttttagttagaattcgaaattaggtggcacaatgtggataatcttcaagtaattaaacagtggagtagatctcttaatagtgggcaaggtatacttgctgcctaaaatacggtctccaggcaaatatattatggtgaatataccgtagccaatgtttagaactccactaccttgtgttcaaccaaatttcaaataatctcatttctcaaaacatattcttggaaaagaacacatgtgggtaatcatcgtgagatgtagacctctgtgagatgggcgaggtgctcgctgcctaagttatgaccagtgcggccaatttctagggctccatcgggtaatcatctcaaaatatagaccactttatgatgggcgagatactcgctgcctaagttatggtcgatatgaccaaagtataggactccatcgacatgtgattaatttccaagttaaagtgtgaagtggaacatgcattaaatcctccattaattatgttggacataattaagagaatttgctaaatcaaaatacaaaatttatagagaaagtagagcgtgtcttgaaataatatgcaaaaggcatgttattaagacaacaaataaatttagtgaaacaaggtatttaaataaacacctatgttaataaacacataacatcagtggtctataggaccattacataattgtttgtacaactgatgaactgtttcgactaaattacataaaatatagggactaaagtgaaattgctgctgaaaataaaaaataaaaactaaatttaaggggtaaatgggtggtgggccgaaatcaataggattcagcccacccccgctacagtgcaaccggcccattgggcccgaggggaaaagggggcgctggaggggcgtgggggttagggttaaccctaaccgcccctgcagtttgtgccgccgccgccgccatgatgccgccgagtcggcgccgcctcctccaccttgtctgccgccgtcgtccgccgccagttcgccgccggttcgccgccgaccgccgccagttcgccgccgcggacaccgccgtggcgaagccgccgacgccgccatgggggcgccgccgtgggggcaccgccgatgcagccgccacctccaccttttccgccgctgccactcgcctccaccgccatctcccatccaccaccacctccaccgctgccatccaccatccgccaccgccgcgtccccctcattggccggcggcatgccgacgatcccgactccttatcggagtcggagaccggccggatccgaataccgttcccccccacgccgtttggtatcgtgcggctccgggagccgtggggaacagcgatgaacgtatgacggaggccgggacggcgtgcagcggcggctccagcgtggcgatgtgttggagacggtgtaaagagaggcggctcccacgtgcgcaccgccatggttccggtgcggccgaatcctggtgccgcgggagtgggggagcgtcgaaagctaggcgtcggttgcgatgttgatggaggtggggaaggagcggttggtggtgatggagtggcgacgaacggggccaacagcgactccatctccagtgggagttcacacggctcgccgggcattgtcatcaccgccgtccatccatggtaggcacaatactgtaccccttgcacaaggatccagcgaggtgcttcggcaaccggaggcggaggaggtgcgacagggatggggggggggccacaaccggagttgcaggcacacgacgagggtagtggcggcggccaccaaccctagccctgcctccgcgggatccccggcgcgtcctcctcatcgatcgacgaagaagaaggtgaagccggcgtgcgcgctgatggcgagggaggccgaaaacggcatccatgatccaatgaaaggtaggcatcgtaccttctttgttgattcttctgttcgcttttctattagatcaaaagcgatgtttcttcctttcacttcgcgatctccttcgcgagagcgaaagtgatgataacgtgttgtgaatagaattgattgagcgagagagattgagtgagagagagaattgcacacaagaatgtagagaatgaatgagcgatcctttattgataacaatggttacaatatatattcgggagagaggcggcaacagaagacgcgatggtttggaaccagcgcgtccgttgttagaatcgccgtgaggcgagaagaggtgtggggcacgaccaaccgtcgtgtcccagaatttatcgatgctctatccatatagattgatgagatcacccaaatatttcataacaatgggggctcgttggttcaaaaaaagatcagatccggtgttacggagcaaaggtgaagtgggctgccatttcccatgatttctggccagtgaagaataatttttctcttctcttatatttctgagagaaaagatgaacagtgtattttcaaaaaaaaaattctgctgcaacaccaatatcaaaaattcatattgatagtacaaacttgttgcaattttactgttgttttttatgtgcttttatctctcttttttctagagaagcccggcttctatatccaactggatatatgcaatattttttaaattgggaacttcgctcctatgaagatttgaacttaggatcctgggatgctactcaggtcactgcaaccactaggctgctcaggtcactgtaactcaggactttaggatgttactcaggtcactacaaccacttgagaaattgatgcgcttagtttgaggaatccgtagttaatcgctaagcatttaattaaccaccgtatgaacatagaaatgcctccaacacactctatcgggacttcgcattgcaggctggatgggatcataggaggaagatacgcttttgtcttccgcaaaattaaccacggtatctaattaccattttaaccaaccacttttcgtacctggcccaattttttcatacctttttataggtataccttttatttttgtgcgttagagattaagcgtgatcatgagctcaaaccaccgaagaaagtttcgtaagtcgaacaatgaaaacaagaagtttcgtaagtcgaacaatgaaaacaagactgatgagcagttggctcaacttgcatagcgcagatacatatataattacttaacttatgcttcactgctataatgaccgtcacagatataaccttaaaggtttctaataaatcatttgagtttttataatgtgtaacggttcgaagtccatcggattgtgattgtgttgggaactatatagtatgaaccattagtgaatagtcatcattttgaaaagaggttagagatcattagttctcagttcgtagttacgaatgtttgctgcttttatgtaattatatgcacacaatatgaatccttgcaaattaaacaaaatttgcaacaatatcaatccttggaaattaaataaaatttgctactgcctccgttccaaaatattgcaatataggatagaatttaatttatcataaaataatgtaactaaactgaaccgatttaacacattctgtaaccataaatctcgacataggttctatccagattcagtggcggatattgagcctaggcaaacctaataatagagaagaactacaattaaatccatacaaccacgtgcccgatttagcatagatcgagttctaatttatgaagaagacaaccaatgcacgaaattatattgatgaaatgaaactcgttaatggttaatgttgaatacttgacattatatgtatatatagctagtcattttgctagtttatgtgctgatccactgatctgacaaccattattggaactagttaattaaacatgtaatttgctattttactcaaatgtacgtggctgaacgcctgaacttgtatctaagtaattaacgtaaactgataactactgcatagtacggccacatccggcagagcccgggcacctgccgaggctagccgggtcctagctccaccactgtctaaattcgttattttaaaatgggtcaaatcttatcctgaatagcaatattttagaatgatagagtaggtgacactctaaaatatattatttggcgaaggacgatctaaaacgtaaatttgctcatggattaaaaaaaaatatgattctttgctacataacaccaccagcaatattttatcatttttggctacttgtgaaaaaaaaaaagagtaatgaacagaatgcccgggaaaaaaaaaggcttatcttatgtatccagttcgcccaatatgtcaattgtcacctctcttgaatctcttagaactgtaatcataagaaagtagctgtgctaatggctatcacaacgctcgctactacagcttcagtttttccacgtggccaaaatcaatattttcatgcggacgggcggaccgcctacgcccaaaagtctgcaaaattcgtatttttgcatgtggccagcgcaaccgcatgcgggcgcttaagccaacggccggcatgcgaataggaaaaatcgtgaaaggaatagaaattatgaaaaacaaaaactactcagaaactctaaccctagaatcctatcgttgttgctgccaccgtcgtatttgtccttccgtcgtcgccgaaattgtcgtcctcctcccatagccaccgctgacaaatccgcgcgggaataggaggggacgcgtgatccgggctggggagggccgctgccaccatatccaggttggagagagcggctgccgccagatcggcgcggggagggtcaccgccgccggattcaagggggggggggagggtgtccgccgacgttgcccacgcccgttgtcactgtcacgtcgtcccatcgccgctgcctctgtggcagcggcaccgcccgaggtggtcgaaccgcccgcacacggccacctccttgtctgctgcggaaccgctcgagatctctgagccggccgctgcccgccaccggccactagaaggagaggagagaaagagagaagagaggaggaggtgaaaataatattaggaggagaggaggtgaaaaaatattaaagttgctgagaggcaaaagagagaggaggggagaaaaatttgtggagagggggtattttcgcacgtggaccatttaagaagcccgcatgtgaaacgtcttaggaggaccgcatgcgaaaataggctcatttttttatgctgccattaaaaggctcatcagagaaaatatgtttttgcatattgtcctcttaatgaagccatatgcgaaaatggaggttgattttttttttgttcagatgagaccaattacgagcccgcacaacttataagggttattggatgatcaatcttctccctaggggcattctggtcattttaaaattttgctctctccaaattaactagccagaaatgataaaatattttatgcggtatatatcttgcagagaaaaccatttcgatcagaatagggagcagccatgtttcttgctgatcaagctcgacagagggtgatttgttgctattttatttaaaattttgggtacttgacgctttccccggctctaaattgtcttcgaaggctagtaacatactccctcctgtttcatcaggttacagcacgttttgactttggtcaaagtcaaattattttacgtttaattaagtttatagataaatatagtaatatttataatattaaattagtttcattaaatcataataaatttgtcttgggtttaaagtgttactacttttttctacaaacttagtcaaacttaaaatagtttgactttgactaaagtcaaaatgtcttatagcctaaaacagagggagtagtagatatcctttactctattgttgtgttaaataatatttcaactatatagaataatcatttttaatcgatatttattttctagatcgaccgtttcacaatataagactttctggtattacccacatttatatagatgttaatgaatctagacatatatatatatatatatatatatatatgtctagatgaatataggcaatgctagaaagtcttacaatatgaaacggagggagtaatacgtatttgtctagatatattaatagaattcactttatgtatgcaaattatcgacgggggataccagtagaccggatatagagggtattgaggtacgctggtacaaggatctacgtaatatgacatcaagaaaatagaagacaaggattatactggttcaggctcctcggaaggtagtagccctaatccagttggtatgggattatacagtgaaagccacgaattacaaagggaatagcagaactcgatgataccgacgagatcgtagtcgagttgatccgactagatcacccggtgacttggctcctgtaggttccgacttcatgggttgtggtcgttgtgttaactctgagattccatgccttaggtcatcccggggggtcccttttatatcgcaggttagtggtctccaagtaggactcggagacatcggaccctgcacgatacagtgacgacccagtcctatacgggtaggaatctttccatcagttaacttcgtgaagaatttgcttagcgtatacagagaacgtccgtacacgtgcaggtataccatattgccgcatagcgtatatccaagggtagagggtataccttatccgtaaccctgacacaaataatatattagattttatgcatcaacctaagtaattaaaacatcaatcatggtggatataacttattagtatatgcattaattaagcttctcgtctttcttttttcttttggaatatagatggatcgacgatgtacaattcaaaacgtggtaatgtagagtacattaaaggactcgtaaaatctataacgagaggcctttgatctggtcttacgcagcgacgcctagcacggccatccgatttagtcgagaaacattagagtttagaatttgagagaagcatcagagtgttagacatccatgtctttttcccttctcataaaattgtctctcaaattacttatccgatctacaatccggttacaccattatgttcgttgcaatgtaatctttacaacaagatatcacatgatcatattacgatgaaaaattgcaaattacttttataatatatctaaattacttttagatttcactaaattacttcttagacatattaaaagtaaattcaataaagtctaaaagtaacttacatatatttataagtaacttaagaaaaaaagaaagtaactttgtcatgtcattagaagtaaatatgttgtaggtataaaaacataactctatctagaaactaaattaatcagcagaaattatggaattgactaaaaacaataataaaagtaatcaccacgtaacattatgaatcaaatctaaaagtaatttatatatatgataaaagtaacttagtatataataaaagtaatttacaaacataaatacttttttcttcataatataatcattaagatctcgttgtacagatttaattgtaacgaacacaacggtgtaatcggatcgtagataagataagtaatttaagagaaacttgttttttgaaatttagatgggttacgaggatgcaagtggcaggtgctactgcttttagtaagaagggtaacaagtggatacacactgtactacttttggtaactccctgtagccgtgtcctaaaggactagatgcatttctcatcgcctttgaggaattcaggttgcaagtaaatgcaggcactactagaaaacgcattatcgccggcagtggaaatcggttttcgcaggcagggccgacctctgcttgtaagcaaacgacggtgaagatcatcgatcttcgcaggcggggcgtccgtccgcctgcgaagattattttcacaggtggacgttagctagattgatccgcctgcgaaaatatgtagaagccgactgcaaaaaaaaaacatccgcctatgaagataggtagaaaattttgaaatttgatacaataataatttgcccataaattacttttttattatttaatagaaattcttgcaggaagattattatatacatatattggaaagattatcaagtatttggtactgagaaatctagatatattgcataactgaaaagtgttgccaaaattatatatattacaatatttttttacattgtcacttcaaatacaccatctagttacattatggcatagtagtgctccactctcgaaatttcttgaattcgtcacttgtagatagggcaccctctgggtcgaaaaactctcctttcacatgacaacactcatggtggatgaattggcacagatcgcgctggacattcgtgatgcttgtattgtcaaagctcgttcgacgttctattcttagcaactgcatgcattgaagataaacaatatattagtatcataaatatgtgaagctgtctaatgcatagtatagagacttacatcctccgcgttaaccttgtacctcccattaaccctgaggaattcgtacgcgtaatacccgcaaaagacagttcctataggttgcttgtgacacttcaggacatatcataggaaaaagagttaaattttgcaattagtgaaacaattggaatacattaagtgagtgaagtattaccggccaatatgtatgtactagcagcttctcccttgttcgggtctgttcttcacccttgaacttgtagtagttgtacacactgtatggatgtcgtaccgtttcgcattaaggaggatatttaattataaaacattcatataaaaatgtaagagtcaatcacttactactgtaagattgttagaaattctttgtatgactggtgtatgtaatcgagagggtccaagactaccacggttccatccttctggtggatgattaaatagatataatgatcgctacatattaaaaaacaacttagttagttagtaccggctaaaataagacacatgtgtagaagttaaatgtaccggacttacttaaaattataagcggccatgacgactctcttattttgaaagtgcaagaaggctcgtccaatatactatgcgacaataatcactttctccttgtgcaagcccttcttgtattcagttatctcttgtggagtcttgcccttcagctgatctgaccctggtgctagcctcacggtatgttgtgtttgacagatccgagttggatccaagaagctgataggtttatttttcttcttagcatccatgtattgcatcctacagaagaagtttgttagagtaagttcaatagtatagccaactactagcttcaattcatctatagccaatctaatagctcattcatacaatagttacatactacactattaatacctggtcccacctgtcattcacacactgtgtcttggagtccgtgttacagctggctacaaatctgtagcccgctgcccttctctctcctcgtttatcttcttaaaatttgtttacagctggcttatagcctgctattgtacctactcttagtaataattacatggatttgtattgtacatatttttcatgtaattaattaaaattcatactcacatgcacctaacagcaacatagttgacgttcatcttgtcccgatgatatatggcatggagatcttcgaaatctagccatacgtaacattcgccgccgaaacaatctgccggtgatcgagctgttatattgcccaagcctttcttgctggcatccatgtagaaggtatgtaaccttctcatctcctatggtccttcgtaaagtgcccaatccggcaagagtgctttcccattttcgtatttttccgagcaatcatcagttggcaagtatggcctggctagtgcagcagccttctgggggtcatcatctctgagtttggcacgttccttaccccctctgaagatggttaccatgaacttctcattgttctcatctttagacttggagtcgtggctcataagcactttaggcaccttagaattgtcagtggccttctcagggaccggggtttcttgcacctcggggtctttcgcaggagaagggtcttcaaatatttctggctctgtaccgtcccattccaatcgtactacttcttctatatatgtcccgactgatgccacaatttgcacctctggttctgccactgtaatctccattgggacaacggcactacaatctccatgggcacctccggcactgcaatctccggtggcacttccggcactggattttccttatgcatctcgggttcctccgccttacctgtcacctgcctcttcggaggaggtctcggaggtttttccacccctagttttggcaccatgggttttcgcgtggcattggtgcacaatccaaaggatatgtcattctagtgctagagaattacaagttctgtcgcgaccgggaaaattgccttttcccgaacgctagtgtattaatccccgtcccaggaaaagccggggtacaccacacaaacatgatataaaagacacatctttattatatcgataatatttacattattacaaaggcacttaaggcctgacaatcaaaaataaacagcagcggactagcgggcctacggctccatcttcacaggcgctcaactggggtataagccaggactccacctaagacttcttctccaaatcttctcttactgaagggggaaaagattgagcaagaatgagtacaaccacagtactcagcaagccacaccggcagatgcatgattaatgcaagggggtacaaggggtaataatataggggttaagctttgcagtaaacagcatttaaaagttacttagttgcccaaagccattttataaagacgatcctagagttacacagtattattaatcaaggccgtgaaccctcacgaacctgccttaacctaaggcctacgatgattcagaccgaactggcaacccgaccctgggtcccagctcgtcccaagccaacccaggccaaccattccacattttagttgttgagcaaattttaagaattaaaacactgacttgggtacattgctcggcttgcccataaccgagggcgcggctattcgaatagattatactctgatcagaggtgtacatctttacccacaagacacatcttcctcacgtgtagccacgtgccacataccaccacggtatacagacggaagacgtgacatagtttccaacccatcctagccatagacaagagtaccgacccaatccccctacggccggaacctccgggacaggcaggcgggactgagccccctagcagcagggcaccaaccctgtgccacgacatctcgactaccgggccgcagctcgtgtagccttcatttgccctggagaatgtccatcgacccccgacttcatccatctccaatccgtgtacttttgtttataaccagactgagccacaaactaagccttacccactagacatgtggaagtacggtagtgctttgcaacagacgcccgagcttaatccttatagtggccggggtgctacttcccacaactg

SEQ ID NO: 5872 - DNA, 3515 bp, Oryza sativa
catcaccaaagataatcgattcagtcttagatgccttctttagggaggagaaccaatttttatcaccggtcatgtgctgcgaacaaccggaatccacgatccacacgttctccttctttgtcaccaaagcctacacacaagcagaagtcgaagcctcagtacttgggttagatgataataaaaatttaggaatccagtactgagacacacgaccagaagatccaataggcatatatccacgtgcaaaatcaattttagaatttatggaaaaattcctccgaggccggtctgactgagggtgtgcagccggtctatccgggggcaggtatgaccgaggcatcaccgctagtctgactggtggtcggtctgaccgaggctgttcagccggtttgataggtcacgggtccgaccgcgggacccaatttggtctgtccggtttcctcgagggaaaaccagatatttgccactttgattttgtaaaggcaattctctctcctttgtgtggttatgagctaatctgaaacaaaaaccacaatatgtccatctttgccccaaaaaagaacaagtatatttttcacgatgattagacacattggtagcactagtagatttagcaacatgagcaacatcaggagattttgcatgcacaacattggattttgaagaagatgcattcatagtagatatgataccagcagatttaaacacagttttattagtatcaggtttaaccaaaatctcaccacttctagcaccaacacctaacacaacaggtggatgtcaagaattatgagcataaggattaaaacctaaaccacggttatgtgtgctaatctttgattgatccaaaatcatgttgaggttcttcctggcattattcatagctcgagcaattctgttagcaaccaaagccaaatcctcctcctcaatttgttcgagttgatcatcggatgtggcattaaaaatagcaagaaaagaagacttagatgaagaagcatcaacatccaaagaggaaaccaaagcactcgacttagaatcaacttttcgagaaagaacattcatctcatgtgttttcaattttgtataaagtgaatccaaagtcaaagtagacatgttaacagattcctgaatagatgtaacttttatctcccaaatagacatgtcaagaccattcaaaaagtggtgagaaatctcagattgtggataattagcatcataagaagaatcaacagatctaagatcactcaaaattttattaaaccgagaaagatagtcatccaaagcttctctaggtttcatctcaaatttaatatactcctttttgaaaagatcacgacgaagttctttaatattatttgttccttgatgaaaattactcaaagcagtccaaatctcatgagcagtttgaagatgagcaacacgattataatccaaacgagaaataccactcaaaagaatattgcgagctttgcaattttgttcaaaagcagttttttcagcagcagtattaatagtttcaggaatcacataaggatgagaaacttttctccaatatcataatcttcagccataatataagattgcatcctactataccaatgagaaaaatccgttccatcgaaaacatgaggcttagttgaaaacctagcgggagtagccatggcaaaaactctagatcgataaaaatccaaagaagaaaacaaggctctgataccacttgtaggatcgaatcacaagaactaagccaaccagagggggctgaatggttgctatacccaaaaaccgaaaacttttagcggaaataaaagttaccctcaatttcgatgagatcggtctgaccggagtagattagccggtctgactgaagcgtagccgccggtctgaccggtgttgaatctccggtatgaccttcaagatctgctcctgacgcctgtcaccgacgccggtctgaccgccgtgtacccgccgatctaaccaccgcaatgccgtcgatctgacagtcggtgtgtcaccggttagaccggcgaaaccccgggaaacacaaatcgaaaactcttacagtagatgacaactttattgattctctctgtatttacaaaagacaccaacaacactccttacaaaaatttcaactaaaactgaaaccctaactcaaaactcaactcaattgctctcaaaagcgataccgggaagcctcacgctccccctctatttatacatgaggtaggcaggctaaagccacgaaccaaactcatactaagagtcctaaacacattaggaaaccctctagtacaagaaagaaactttacataaccaatcgtaccaaatttggactccttccaaatttgactccgcatcccatatgcacacaataactccatcgtatgccatatggaatctccattaaccacgtgcatcaactctagcctaagtatcccgcatgatctctaaccaccacggacgtcgcctcatccctaagccgactcccgatccatcaccgcaaatactctcccgagacatcgagtcacctacacatggaacaaacaaagaaactatattccgagaccaagctatctccaacttgactcattagtagcaaacaacagtattacatagtatagtatccatctagaagtcataatcatgaaataatcacggatatccaaacaaacaacccgaaccgaaacagacacagtgtcggccggtcataccgcgggctagccggtctgaccgcgcgcataccgccggtccgaccggctaccagagcccggtctgaccggtcacatgaaataatgaatcctgcgatcacctgtgaatctaatcatctccaaaaccacttcgtgaatacattccaaataacaaaaccaataatctccaatgcccaattgttcatcaaagaataataatcaaaaacacctttgattttacaatctcccccttaatgaacacattggcaaacccataaaaaatgttttggtgtttggaaaaataaaaacaaaagtggtaaaaagcacacttcgtacaaatgtacacatcgtgctcaaaaatccaaaagaaaacttctccccctttttaaaaagaaagaaattcccaattgaaccaaaaacatgctcttctcaacaactctccaaaaattcgccttgcttctccaaaaatccaaaaattttcacattacttctccccctttttacaatgatttcatcaagaataggaattatgttcattaatgttcaagagcttagcatacatatagcatatcaagtcatgtgttgcaataaaaagaagataaatccatctataatataacaagcatgcattaaagtataaccatgaaccaaagattttacaattaagcttgaatcaacaatctaaattcatgatttcatacgatttataatgcaacatcttaataagcacataggttgaaaaattaacactaaacatatatacctatggcatttatcactctttctcaaataaccttagcacaaaacaaccaagagaattttttaact

SEQ ID NO: 5873 - DNA, 31368 bp, Oryza sativa
  unsure (1)..(31368): unsure at all n locations
tcagagcaccggtactccttacagacctggttaacggaccaactgggagtcgcctaacaccaggaagcggcggatccccagtccagctgccactctgagtcccgcaaggagtccctcgtactccgccatattgttggtcgcccgaaagtcgaggcggaccaggtatctgaggaagtctccgctcggcgaggtcaacgtgacccccgcaccagcgccctgaagagacagggagccgtcgaactgcatcacccagtaggcggtgtgaggcagctgcgaggggcccgagctggcctcgggggcggagacgggctcgggcgctggggtccactccgccacaaagtcggcgagggcctggctcttgatcgcgtggcgtggttcaaagcgcaaatcgaattcagagagttcgattgcccatctcaccacccgtccagtaccctctcggttatgcaagatttggccgagggggtaagacgtaaccaccgtgacccgatgcgcctggaaataatggcgcaacttcctcgaagccatcagaatagcgtaaagtatcttctgggcctgagggtatcgggtcttggcgtcccggagggcctcgctaacgaagtagacgggccgctgcacctttcggcggggccgatcctcttcgctaggggccgcatctccagggcgctcttcgtccgagaggccacgcggggcgcactcggcttctgtgccgacgacctcggggtcagagggcgacaggcgcggccttcccgcagtggccccggggccatcctgggggtcgggggcgcctggcaccgtcggacaagcaggcggagggccagctccggccgttgggggccttgggccgccgttcggctcgggggcctctcctccctgctctctcccgggtcgagtcgacacagggtggggatgcgcggagtgagggttgtcctcgtcgcgctccacgaccaacgccgtgctgaccacctgcgggggtgccgccaggtagagtagcaaccgctcatctggcttccgggcgaccaagaccgggggagaactgaggtacaccttcaactgagtgaaggcccgctcagcctcctccgtccaggtaaacggcccggagcgtttgaggagcttaaataggggtagtgccttctctcccagcctcgatatgaaccgacttagggcggccatgcagccggtgacgcactgcacatccctaagcttgctgggggggcgcatccgctctatagctcgtatcttctcggggttggcctcgatgcctcgggcagagaccaagaacccgagaagcttgcccgcaggcacgccgaacacgcacttatcggggttcagctttatgcgggcagagcggagactttcgaaagttttcgctagatccgagagtaaggtctcttggttgcgcgtcttcacaaccaagtcatcaacataggcctcaacattgcgtcctatctggctacccaaagaaattcgagtagtacgttgaaaaataggacctgcattctttaacccgaaaggcattgtcgtataacaataagttcctatgggggtaatgaatgcattttttcctcatcctccctagccatgcgaatctgatgataaccagagtatgcatctagaaaacacaaaaggtcgcaccccgcggtggagtcgacaatctgatctatgtgtggcagggggtaagggtccttaggacatgccttgttaaggtcggtgtagtcgatgcacatccgaagcttgccgttcgccttgggaacgacgaccgggttcgccagccactccggatggatgacctcacggatgaatccggcctccagaagtcgcgccacctcctcgcggatgaaggcttgacgttccggggcctgccgccgcactttctgccggaccggccttgcgcccggccgcacggcgagacgatgctcaatcacctccctggggaccccgggcatgtccgccggtctccaggcgaagacgtcggcgtttgcccgcaggaaggagacgagcgcgtcttcctatttgtcgtccagaagaccaccgattcgtgtggtcttggacgggccgtcgcccagggcaaccttcttgaccgggacctcgtcgcacgtgaccatacgctgccttggggcggccgggacggaggtgctgagcctctcgtcgccacccgcgggcttggacgccgcggcgaggtggtccgcgcgctgctccataggtcgccatggacggtgatggggccaccggggcccggcatcttcatctggagataggcgtagtggaccgccgccatgaacttcaccaactgtcgcgaccgagaaaaatacattttcccgaacgctagtgtattaatccccgtcccaggaaaagccggggtacaccacacaaacatggtacaaaaggcacatctttattatatcgataatatttacattattacaaaggcacttaaggcctaacaatcaaaaataaacagcagcggactagcgggcctgcggctccatcttcacaggcgctcaactggggtataagccaggactccacctaagacttcttctccaaagcttctcttactgaaggggggaaaagattgagcaagaatgagtacaaccacagtactcagcaagccacaccggcagatgcatgattaatgcaagggggtacaaggggtaatattataggggttaagttttgcagaaaacagcatttaaaagtcacttagttgcccaaagccattttataaagacgatcctagagttacacagtgttattaatcaaggccgtgaaccctcacgaacctgccttaatccaaggcctacgatgattcagatcgaactggcaacccgaccctgggtctcagctcgtcccaagccaacccaggccaaccatttcacattttagttgttaagcaaattttaagaattaaacactaacttgggtacattgctcggcttgcccataaccgagggcgcggctattcgaatagattatactctgatcagaggtgtacatctttacccacaagacacatcttcctcacgtgtaaccacgtgccacataccaccacggtatacagacggaagacgtgacatagttcccaacccatcctagccataaacaagagtaccgacccaaccccacctacggccggaacccccgagacaggtaggcaggactgagcccccagcagcaggacaccggccctgtgccatgacatctcgactaccgggccgtagctcgtgtagccttcatttgtcctagagatgtccatcgacccccgacttcgtccatctccatccgtgtacttttgtttataaccagaccgagccacaaactaagccttacccactagacatgtggaagtacggtagtgctttgcaacagaggcccgagcttaatccttatagtacccgaggtacgactaacaaaacccaaccacgcacctcgagcccagcctaaaaccattttgggggttttgaatagagggggaggtgtgtgtccaattccaacataagccaaccattccatagtgtccaaatgatatgagaattcccaaagtctaaagttataaaaccacataatgttgcctaattaatcagcgaagcatctacctaaattcatactagtggaaccatgaatagagtacccactagttggggttttgtttatcctagggtgaacaaggtaataataacaatagcaataataatgtcttaacaaaggtaaataggcatggctaaataaaacagtgataacgcgggaatttaaataaagcggtaatgcattaatttaaattaaaataattttataaactgggattcaatatgctcaaggatgatgtgaattgccttgctcagagagaacggccttccgacccttcggcgacgaccacgaaccacgcttcgggaacctctggaacgacgaaagctacgcgaagcacacaagcaaagctacaagcctataaagaagcaataacaacacataaaaagaaagcacacagttctttaggttataacaaacattaagagacttgaacgggccgattcgaagctcgtatgaccaagatatgatcatccgaagtttaatgctgttatatggagatttgcggattattataattaagctttgcaattataaaacatgtgtaagcgctagcctggaaaagacaggaaggctgcgccgttgacatgcggaccccacatgtcaacctaaaggaccgcggtagaccgagtacacagagacggtccacgggtcgacgaaagcagatcccgtgtgtcaaccgaggcgagtggccgacaaacggactccactagacaccacacgggctgcacacgtggaaaccacgcggctaccgagcgggcacactaacacagtcaccacacgcataagcgaatgactaccgacaccggtacacgggtaccggggccgacaaccgcacaacgagcacgggcgacaccgaaaggacgaggacggggcagcgagggagagggatccttaccaccacgcgacgaggcgtgggaacgacaacgacgaacgggcgcggcggaggcggccgggaactacggagacgaacggcgaggggacgacttcggcggcgatccttggacgaaggcgagacgcggccggcgcaacgcttggcgacgcggaggcgaggacgaagacgacgacagggctgcagcggcacacttgacggacgcggacgacggacaagaacggcttgacggagggacgaacaccacaacgaccgggaacaacgagaggacgacgacgacgacgaccgggaccggcgaggaggcgacgagggcagccggcagcggctgcacggagacgaggacggcgcggaccacgccgctgcgatgccgacgatggaggcggcgccgcgagacgacgagccggcgagaatgaacggtgaagacgacgacggacaccggcggcattcgggtggaggggaggcgagggcgagggcgagggcgaccttgtcgctgcaatgccgggggtggtggtggtgcagcaagccgacgagccggggaggaggaaggggcggccgaaaggacgccggcgacgaagaggatggagaggccggcgcggcgacggcggtctccggacgaatcagagagcaggccggagtggaggtcgacgcggcaacgacgaaggaggagacggcgcggccagcccgcacctgagcagcgtggcaggggcggctggaggtggtacagtggcggcaacgccactggacgacggcgggaacgcgcctccggcggtcaccgcgcgaaacggagggcaggccggtggagaggaggcggctgcgacgctggaggaggcgacggcacagccggacggcgctcgggcgaggagggagaggcggctggaggccggccggcaccggagagagagaaggagaaggcggggagaggtggtgtggccacgggggagctcgggaaggggctaaaacgagagaacgcaaagagggggttccattttatagcggagggaagcaagccgggcatgggagagggcggaacggcgacgggaaacacggccggcggccatggaaggcggccgggaaagacgcgtccgttcccgacgattgggggcgccattcaagggggaaattggggggaattgaagaggaattaatggggattaaaaccccccacttaattttggaatccccggtttgaatgaggcggatttggaggagggagcgagctagggagacgaccggcgcgtgggccccacgcggtcgggcgcgcggtcagcgcacgcgcggcgcgcgtgtgcacggctggctcggctcggcctggcttgggcgcggcttgggccgggcggccggcccaggaggagaggagggggaggcggcctgggggaaagagggaggaggagggagtgggccgaggggaaggagaggaggcccaagagaaggagggagaggacgagagggagaggaatagagggaggaagagaggacttttgccgcgggctgagagagagagagagggaggttttgggccagacttggcccaaagggaggagggggattatttttagattttctttttattaaactttgataattgtttttgttgcttaataattatttccggtgctctgaaaattcaagtaaaatttgagggctccttttagaccaaggagaatttaacaaaaattctccgggccacattcgaatttttcttgtacgcattttagtgcttgccaatttcttttcgaattttaattaattctattattccttttagggaatgatttttatttcgggatgaatttatcaggacgtgacaccaacgcgggcctccccaggaccgcgttgtagggcagactgaggtccgccacatcgaagtccacccgctccgtgcggaagttggcggaaccaccgaaggtgaccgggaggtcgatatgacctagcggccaggtgtgccccggcgtcacaccgatgatcggctgggacggccggagcaccatccccggggccttgatggcgtcaaaggctgcgggggaaaggatgttgagggctgcacccccgtctatgaggacacgccccaacttcacattgcaaacggtgggggaaaccaccatcgcgatctgtcctccccgggcaacgcacggcgggtggtcggtctggtcgaaggtgagggcaacctccgaccaccgcgcccgccgtgtcgcctcatgggtaggggccgcggccagaagctctcgcttcatggccttgaggctccggcgagaagcgtgagcgcacgctcccccatcgatggtggcgatggtggcctcaggctcctggaaccccaggtcatcgtcgccatcgtcgatgtcctcggcggtggccttctgcttggcctcacctcgtcggttgccggcgggagccgccggggtcttgccctcacggcgctcctgcctcttctcctcctcccacttcctcgtccgctcagccaaacttttgaccgcgcggcagtccgcgaggtcgtggaggaaggtgttgtgcacggtacaccacttgccggtcgggcgctccctgctgggagcgccggcctccttctttttgtcgctcgcaggcctcccctttcggggggcccgcgaagcgccctcgacggcgaggacatgaccctcgtcgtcggaacgggccgaccccttcttcctcctcctgtcccgccgccctgaccgagcggcggacccgggggcggccggagttgccacaccagaaccggaggagttccaggcccaggcctcctccttgcgagccacacggtccgcaagctcaaaaagctgcgcggtggtctggggctccttggaggcgatcttctcgagcatgcggttgtgccgcacgccccccctgaacgcgtagatcaccgcgtgtgcggggatgcacggtatggtgttgcggacttgacagaaccgctgaatgtacgagcgaagagactcatcgtcccttcgctgtaccgcatgcaagtccgcttcttcgcctgggcacggatatatgccctggaagttcgtagtgaactgctggcacaaatcctcccaagagtggaccgacgcgggtggcaagttcattagccaaccccgcgcctgacccttcagggccatggggaagaaattcgccatgaccctgtcgtcacccccggcggcctcgatcccggtcgtgtagatctggagaaactcggtggggttgacgcttccgtcgtatttttcggtgatggtgggccggaaccttgggggccaacggacgttccgaaggctcgccacaaaggctcgacagccggcaccgccaaccggggacacggggggccggcccccgtgcccggaccgaagtggcgctccggacgaggaagtgccctccgttgcgtgggcggcgcgacgagcgtcgcgccggcgctcgatatcgaggcgggcatccggccccccacgcacatcttcttgggtcggaggcgttgacgagggaatggcggacgaacgacgggtaacggccgccgctcgccgcgccctccgcctcgacgacatggagccggcggcggcagcgctagaggcctcgatggcggaggaccgcccgccggcgcctaggcgctgctgcgccgtcatgaccaagtcggccaagtcatccagccaacgtcgggctggagtctctggatcggggacgacgggcgggtgacgcaggagcgcgcctgcagcctggagcgcgccctggggcgtgccgccatcgccgtagacgaggcggcgacgcgccccatctcgccgtcctcccccgtcgcccgcgggcggcgaagtcgcggatcctccgacctccccgagcgcctccccccgcccaagatttcggcgagagggggacggtggggtgcgagcccgacggcgcgggttctgctccccgtcgtcaccgctagcgttcggagagaggctgtgcgccactgcccgttcggccattgggctgagcgggagaagcttggcgcacacgaaagaggacgagggcttagaaagacacgcgcacccctacctggcgcgccagatgacggagcgtggggctcctcaccgggagaccgcgcaggcccccctttgccggttcggccgggggcgctaagtgaggttcctcgccctccatctgaggaacgtcagcgagagaagaagtgcacaagacacgggcgacgtagacaggttcgggccgctgagaagcgtaacaccctactcctgtgttctggtggatctgtgtgtgaaggaataccgagagccggagagcgagagagagttcagactctagaacccccccttcctcccttttttcttttcttccctttttttcccccttttttttcctcctttttttttctctccctcctaggcctgggcctcctttttatctggtcaggggtcaccacaagggcctctagctgcctaagaagggaaacatgctttttacaatgagggctagtctacagccggaagtgacctctgacaagcagagcccacgcctcctgccccgctcgcccgcttttccggtggacgcccatttcaaccttcatttaatggccagcgacttccttgccatacttgcgctgaagcctggaatggatctgaccgggactgacataccaactccaggagttagcacaccggctccggctagggacgagagccaggaagctctcatcattccgacgggacggggcaaggcgtgtgacaggccgcctgttgccacctaacccgcgatctgaccggtctgtgaccggtcacacaccgcgaccggtcacggaccggataagcgcgcgctgcgccgcattaaatacggcgtggcgcgctcgtccaacctgctataaatgcggttaggtgagccccgctgtgctcacctaacccacacacgtggcaccaaaaccacagggggtcggggcgccccagccctcggggccgaaacgggagcggcccgacccctcggggagacagagggaggggtggccacgtcaccctcgggcccgacccccccgagggggtcaggccacgtgggtgaccgcggctacccaagcctctagtcacgatacccccggccccatgtcaccgacaacgtatattcacttatgtttcattttttctttattatgtttttttcagatttacctcaatggctaacccagctatatcattaaaagatatatctgttggacagcaaaactgcaaggtttttggacgtctaataagattatgggatgctataaacatgagatcaaaatctgcagatcccctcatcagcattgacgtcatcctattggatgaacttgtatgtcattctcttatgtgttccaccaaatattaatactagattctacttctttgctatacttaatactagccatatcaattgttgcacaataatttttcagggctcaatagcacagatcactgtgccaaaaaggtttgcaaagcaattccgccccttgctaaataaaggatctgtctacctaattagtaatactgttgccattgatgcaaaaagaaagacctatatctaccagtgccagaactatattctctagtttaaacatgacacaagaattcaacccctggaatctagaggattaaccataccaaagttcctttttgacttctgcccatttgatgaagttctagggaaaagtatcagttccaaacctctcataggtaatgctatctttaattccacattgaatcatacttattacacttcacattcttttggcttattcctctagattttttttgaatgaatattcctccagatttgattggagtaatcagtcatattggtccatatgattttgcgagcccaacatcagacaaaaaactcaggagaattaaaattcaaaacctagagtacgtaccttttccaaacctgatcgttaaaatcaatgctctcattaattacttttgtgtaatctcagcaattgtttatatgcaacattttttgtagggaacagactcaagatgtcctactctggggacaatatggagaatcattcaacgaagatgcaacactccataaatcaaaggatggaattgtagtagccatctttgctggccttactgcaggaaaattttcaggttcattctttgacccaaacaaatgccctcccatacaaagaatgcaaaacatttaaacttcactttcacctgcagctataacaaaagcatcttcaagctctgctactgaaatatatattgacctggacacacctcaagttagagagtttcgcactaggtaattctctttaaccccttcaaaccatttgcacttgaatattcctgttcaatatgtattatatttcacgtcaaaagatgccaacctatctctttgcaatttgaagctacaaatgggaacgtccaactcttgagcaacaactccctaaggttatacgtttaaccccgatccaagcagcaggaaaaatgtacaccttaagtgagatatcagctatgcctatttcagcctttcaggtacaactcaatacaaaagaaaaaaaaactatattgttattaccatgccatggattcctttcgccaagatttaatactttttattacataagggtggagctacatacagtgctactgcgaaaataactgccatactgtcatcaattaaatggtattacataggatgccatcgttgtgataaagggtacatcaacaattctgattcaccaagatgtgcttgcgaagtttcattccgcaaaccaatgtacaatctcctactcttatacattcattcgaagaactaaaatagtttactgtaatgctaaccactctagatgtatctaactaatgtacaatgcttcaggtacaaactccctgtcacgattacagatgaatcagggagtttagatgcagtagcattttcttttgttgctgaagatttggtagagcttgatgcagcccaagcttcccaaaacatgaagatagacccggctgatcatccaacaacactcaataatgccattggtaaaacaaaaatttttgctatagggatgaatactgatacatcttctaagttccctatcagctatgtgcttaagaagagtttcacaattgagcctactatgtcggtccctatgctcacagatggagaggttagtaaatactactgttccatattacttcagatatcctattccatattacttcaaatatttcaaactaattaaattaaaatataaaactaatcaagcctttgaagaacaaagaggtactacagcttccaccacctgcaccacatacagataacccaaggtttgttattctatcaaatgttctattcattacatttgtacaacaccataattttttttagataaaggattttcattaaaacccagcctctacatcacattggatatatagtactaactgctgatgccaaataaatttcagcacaactattcataatacaggagcatcaagcaaaagtacacctcctgaaatatctttggctgataaaactccaactgaaaaaaccaggtaaatatacaaaaaaaattatgcttaataaaatcattcatatgattattatccattactgcagctcaactacaaaaagagccattgatttcactaaagactccattgaggaaaccagaaggtatattttataaccccatttatattgccttttctgattaacaaatatcaactcacaaccaaccttggaacatttttccttttacactaccaaaaaactagatctccctgttctcaaacattacaaagaagggcatgtactactttggaaaatacatagaataacataactcaactataatactgactacaatatttttggaactatttcatgcaacaaaaaactacagcatacagagggaaaggctgattttcctgaagactccattgagggaaccaaagggtatacattattttataacaccacacatttcattatttttatattgatttttgtgatagataaatccactcatgatttgcaatacttttgcctttaacactaactgcaatatcttatgaaccactccaaacaacatagagctacaaactgcattgcataccaatctgcctgaccaatctacataataaaattggtacttattcttcacattcctaacgatttactctattatcttacaagcacatccctgttgtactactaatatattctccaacacaaaatacaggtgaacacatgctgtctgacctacggtgatttcactatgcggaagacttattatattttccttccatatgaagacttcattatgtcatatgcataagacctgctatattttattagggtcccattctgttctccatcttgcagctatagcattatctctactacaattctataatatcagtactcctcgattacaaaaacatataagagatttcccatattttcagaatgtgtttgttcatattatcacccttttcaaaattacatagttcggtattactttttatactcatatccctaatcaacgcgcggggtatcttctagtttatatgtttttcctctccaaatcgaagtgttctcgtagcttaaaaaacacgctaacaaaaaccgtgataaaatctgtataagtcagtcttgtcctgtacagtcaatgtgcgcatcttcccccttttggaatcgcccggtccccatctccacttcgaaccaaacccggaggcgcgccgcgcgcctccccgccgccgccgtcgagcgggaggggatcggagcgcgcggccgccgccgtcgccgagtccgtccgacctccgtcccccgcgccaacgcagcagcagagcagcagtgtgggaaggaagaagggaagccgctgccgcgagcggcgagcgggagtgggggtttctccattgttaccatttcaggccagccgccgtcgacgccgaggcggggtgggccccacctgtcactggccatgttcgcctctatatatatacaccgcgccgccccccttccgccgccaacctgagccgagcggggagacgcgtcttcctcctcctcctcctccattgctgctccccctcccccttcctcctacaggttcgttcgtcttccccctctcctcctcgttgtccagcccgcgatttctctactcggattgctcgatcccctaccgcccatgggttttctcgcgatttttttttttaattttttggggatggaaatggttagctcatgcgaggaacaaccgattagggtttagtttaacgcctcgctatcctctcgaaatgcgaggaacaaccatttcatcttgccctctcttccttgcttgttccgctcgcgatttctctactcggattgctcgatcccctaccgcccatgggttttctcgcgatttttgttttttgttttttttataaattttttgggatggaaatggttagctcatgcgaggaacaaccgattagggtttagtttaacgaatccttatcctctcgaaatcgatttagattattaggattgtggccgttttgtttgcgctcctctccggttgtagtgttgtctccatttctatgggtttagtcgccatgtgagagatgattcaaagtttcaagctatgtggtatgggaatccaaacttctgttgggatcttcttccaaactttgtggtatggcgatttttgctttttttttttgggtgctggaaatggttagctcatgcgaggaacaaccgattagggtttagtttaaggcctcattatcctcttgaaatcgatttagatgattaggattgtagccgttttgtttgcgctcctctccagttgtagtggtgtctccatttctatgggtttagttgccatgtgagatgattcaaagtttcaaactatgtggtatgggaatccaaacttctgttgggatcttcttccaaactatgtggtgtggccatttttgccttttttttttgggtgctggaaatggttagctcatgcgaggaacaaccgattagggtttagtttaacgcctccttatcctctctaaatcgttttggatgattaggattgcgggcgtttagtttgcgccgctctccggttgtattgttgtctccatttctatgggtttagtcgccctgtgagaggtggtggattcagactatgtgtggtatgggaatccaaactttttgttgggatcttcttccattatatgttgagatagataggatttttaccattacgcaatatggggcacccttcttgggttgtgttttttttgtctccatttctatgggtttaatcgcacccttgagttgatccaaacctgtgggggatggaaatccaagtttatgctgctataagatactcatcgcgctatcgtctttgtttcttgcaggggcatgcgattttggaagcggagttgatacttgatcgagatggtaatggagggcatctgtgctccctctattatttagctctctctattattttgtgttttttgattttgttccgtctctcactatatgctggcttttattggtacacaaaggttaaagtagaagatgatgtggagggcagtggcatcaacgcttctgttggtgatctcagggatgctgctgtcaatccacagcctgccctgctgcgtgctactgttaaggaggaggtggtgattttgcttccaaaccttctggtgtattaatctttgcttggagtagtgttttgcatggcatgctaaactatttggatgaatcgattatgtatattacattattaaaacaagggtgaaaaggagtcaccgtattttgctttccatgcctagaagttatcatgttattcacagaaaaaaaaagtatctatgctgttgactgtggtgtggggtccatattattatagttgaggttaaaacaaagtctccatgtcaaatacgattaatgagtaatggcaattacgcgggaaatttgggcagttattattttagggccaggcgggttgagcgcttctcatttaccacttgtagagtgtggttttattatggcggcaatgtgctgtctgttatgtcgtgcttgaagtggaaagcaaagctataattttgtgcacaggcttccagttgctaatcgctatatgcacctgagttgtttgcattgtaccaagaagttatttcttgaaacaacaatagaatcatctgtgtctttgggcactagacccaaattcaatataattctagattgcaccccccctctcccctaccctgtgagctactttctaactgagcctctttttttggtattgtgctttgatttgaggcgaacacatctgccaaacaccaaatcaggatgacttacaaatacaaccaattttaatagacttgacgtttgttttggatgtaatctatattgacagtagtacatctaagatgcagttgattgatggtgttaagtatttgaaagtaactgggtgttgacctaaccataggtatattgctaacaaccagaggtccacaactttaaatagttaatactccttttgacatgttaacttttcctttggttccttttaatattttattttatttatttttgcgggggttccttttaataaagttgtgataccaacaaaatgttcttcacatatattgtaggaaggacagccaagctcttcctccagtcatgtaagatcacaatttattggcatggggttttcaccaatgttggttgacagggtgcttcagaaacacggtaatatcctatgacatgccttttcaaatgcatgtagtgatataaaacttttgcaccagttaaaacacagttaaatccaaacattttatacaccttagagtttacgaactgattacatttatctctctcatgcaggtgacagagattcagatactatactggaggctcttttgtcacagtctgtaagtgattccccagctgcatgtcaacatttgtcccgttaatctcaatattctggttttctttctttaggaaatggtttcctctcctaaccttgatgttacctatttatatttttctgtgttattgttttatgactcgaatagtttaccattaaagctcccattatgatcctccatttactttaatgttgctagtgtaattttatcttaagtacaccttcatgtagttggattgatgtttacttaaatgactgatattcaatttggtatcaggaattttagtttccatctaattttgttggcattgctacagtagtcaataattgtgttgtaatgagttgtggaattcacaatacttgaatttatttttcaattttcatatgttataggctcttcaaaaatctgggtctgaatcaggttcattgggagatctctttgattctgataatgaagaaaatagttctcattttgcgcctaggaaagaagttatccaagacattaaggtgatgttctggttcaaaatgttaatcatggtactattcattttgaactccttagaccaatctgcacaacatttctatttttaggttgaagctgattcatcctcagaaaagagatcatatctactgagtacaatgaacttctcgcagcgagaagttgatttggcactcaaccagctaggtaggtgatgctgcattgacttgtgcaattagcaatttatctttttaattgtctagatcttgtactgttgccttttctttttttttttggtgttgatatcagttcaaccaattgtactacacaatttttaagacactgttgaacaagaatgtgttcaggacacattttagatctgtttgatagtcattctattctttgtcatatccagcatactgtaaacttccagacctgcttggtttcaggtgaggaagcatcattggaacagcttgtagatttcattgttactggtcaagtgtcaggttgctctggaggaaacgaaaatggagatgcttcaaatgaggttttcgccagttcttttgttttctgtttcttacatctgactaacattgtctgagtacatgaagtaaatattgagctcgctgctccaagaatctttactcctttatgaaatgtaaaacacacttttctttttgacattaaatgtaaaacacacttaataacttttaataatatgtagctttgtgaaagactcattattcagtgaactggtgttactgctatgagactagtagaacattgtacattatccaactctggaaaagttgttccagagtctattccgtacttatccaatcacaaaaattggtgctccaaatctctctagtttattatgtgttgcgtccagttacagaatatccttgttcataccagattgtcacttggacattctgcttcatactatcccagctatgaaatcgcagccaaattttctacttatatttcgcatcaacgacaattgagaattctccttttaattctgtgtttttacttggtagtcgataatgtaacaacatgtaaaccacaggatcacattattttgtgcttgttggtactcacattgtcttgtcagccatgctttgtaggtctcctattgtgtaccctagaaacttcttactacagtctgcagtatagatgtttaattccttttgatactacaatgacatgaactatacttagcctggagcatgcatcatgtttttcttcagtcatgcttatagttatatgtgttctttctttgacattctatttttgatagatgggatctgtatcatggttatcaatcatgtttatgatatttttgtgttctttctttaacactaattttgataaatgatatttgtaattggctacaaatgagcaacaacagaactgtatatttaaaatcacatttgtttcaggtaaaggatgaatcactgtttggagtaatggataaaacactacatttactccagatgggttttacggaggaagaagtgtcatctgtcattgacaaagctggtaagtgaaaataaaaatgctttaaaaaattactcagatctgtgagcttcatgaccacagtccacagcatatggtgaagtactctctccggtcaaatttatttgacgctgggtgtactaagtttagtactcccagcatcaaataaatgtgactagagggagtttcacaaagtgaaatccttaaaatctaataccacagcatgcaccagtacattggcacctgatctctgataatactgtacctgtcaacaaacacttgtcattcttgaacctttaccattgcaaagcttttccaagcaatcttttggttttattcaattggactagatcgataaatctttgtcgcatcaaatagatgattggggagcatgcaaaaaggaaattaacaaggaaaaagttatgaaaaatatgctttggaaaagcatgagtaacaaaatatatgaacgattgaaacgatcagttctgacaaatatttgtaacaaagggtgtttttattcatgttaacagtatacttaattttacttattttaccgaatcctaaccttgctcatagattttgtcaaggacgaacctttcagactttctatgtatgattcatgcctgctttgtacataaggtggctccccatggatacatatatgccattttaagctaaaaggactgtaaattcaatctcatgtctcatccagagcatctgattgcacgcacatggcatccgcaggtgcctcactcatgtacatggataaaacgttgcatgcaagtggtaaaagggaattcatatttcacattgtagttatagttttagcccccaaatttttggtattaaaaatttcaatcttccttgtaatacatttgattattttctatatcaatattccattctctcattagttaccagtttctatgttgtatgtactagaatatactgttttaatgagttcctacctctagcaaacttaatgccatatttccttgttcctaccttttcaggtccagaagcaacagttttggagctggctgacaccatttttgcacgtagaattgccagtagcattgagcagaaagaggtaatttcgtcaacattttattcttacagctataagcttgtattgtgaatttacagtcatctgttgcttggtagcattgtccatgacaactgtgcagagcgcacagcagattagtaggaacctttttatataaacaatttgcttgaattacaaaatatccctctaaccaaacacttataccgttctcagcaaaccaatgtttttctttaaatgctgctcatatggctgtacagcatattgttatacacaagtcacaactgttatgatttctaatttgtctgcatttgcattcttgtgcacaggtgaaagttgagcctgactttctagatgagacagaaaccagctattcagcataccatccctcaaattctggtctaaggtactatgatgacgaccatgacaacataaggattaaaagggctaagcatatgtttatagatgacagtgcgggttccagtagtcgtgctggaaatcaacctaacttagatccatggcttaaggatcaccgtgccacaactagtgatgggtctgtcaaggaagaatttgatgcaatgacaccaggcatccgtagaaatgttcgcagtgatgtcgccaatcccccatatttcttatatggaaatgttgtagaaattcccaaagctacatggcgtcagctgtcagagttcttatataatgtggagccagagtttgtaaatagccagtttttctcggctctctcacgaaaggagggttacattcataaccttccaacagagggaaggcgtaacctggttcctaggtcaccaatgactatcgaagaagcattcccattcacaaggcagtgctggccatcgtgggacacaagaaaacaacttaacagtgttgctacagaagttgcaggaatagagcagctgtgtgagagactgggaaagatggtaagagactcaggaggttatctttcacaagaaaagaaaacgcacatcatgcaccagtgcaagctggctaacctcatctgggttggcccagataggttaagtcctttggatccacaacaagtggaacggatacttggctacccacggaaacacacaaacctgtttggcctgaatccacaagatagaatagaagccatgaggtacagtttccagactgacacactcggctatcttttgtcagtcctgaaggacctgtatccagatgggctaagggtgctatcaatctacagtggaattggaggtgcagcaattgccctccatcgcctagggataccactacagtgtgtagtatctgttgaccaatctgatacgaacaggaaaattttgagaaggtggtggagtaatactgaacaaaaggggcaactgaggcagataaataccatttggaagctgaagattaatgtacttgaggacctggtgaaagaatttggtggttttgacataattattggtggaaacttcagttcctgtaaaggtggtacaacagtaaactcatccatgggcatggattccaaccagttttttgagtatgttcgtgttgttcaaagagtgaagcatataatgggtcggctccaggtgagggcgcatgaatctgctcgacatcgacatcgctctccatcaaattgacttgtctggccttgtaggatggtgtagcattagcatagcatcatgtggatctgtaggtgatgtgtcatggagcagttgctctcagacaactttaaatgttatgttgatctccgcagaaacattgcgatggctgttagcattcgttacattgcattaattaccctttcatgttcctggtattcgtagcattatgctccattctttgattataattgctttctatgctgcttctagagttgttttatgtttgcctggttgtaatcgctcagtagattgggactaagcgatcagtttgctgggtaaccttacagcaaaattacattcgtttttcagcttctaaatgctcagttacaattgaaattgcttctccatccttgcacaatatcacagattgatcagtttgcatgctgtacttgtgttgtcctggcaaaagtttgttcatagtagcaaagattcatcatacctttgctgatactggtgcatagacagcaacacatcacctacttgctttctttcacaagcttctcagaagattactgatatgtaagaacatgtagcagcaagtacaattaaatgaatagcctctcgatccatgtccaaatatttggaccgaacgaacattgccatacaaagtgtgcaacatccttccttgcatgttgctacaatcttgacaaaccgatcgaattcagttttcaacctgattttacactcttcttcatcaactttacagaaccgtggatgattttttggttacaccggcagcagcaaagtgggaggggggaaaagaatacgcggcgtcagaatctcggacaaaaaaatgtagttccacttccatatgcaccagctttcccaaatggctgcacacagggttcatctctgctttctaatggaggacggtgaagaaattctgaactagttttcatgctgacctcagaaatcaccatcctacaaacgcgcattgctttcgagcatgttcggggataagcttcaccaggaattccattggcatacccttcagttctgttcaaatcggccagattagtagataattataagttgatcggtggttcagaaattttcgtctacgcatgtcatatgtcagccggtgttgcaagcttaccatggggcttgaagttgaagagaggaggaaggaaacggccgttcggtaagcgggtgtttggatcacggagttcatcgaagaagggatggatcaatgcttccgactgtaatggcaaataaagaaatgcacaatctgtaactactagtacttggcaaggcagtgcatgtttgtatgatgaagtaattagaaaaatgtaacacaatagtgatgccaagaactaaaactttctctaaaaaatggtgttggctcaaatagtgcaacgacaacactcacagcagtggaccggaggtatggtgaatactgcaaaagcctggagacgagatcgactgcttcagcaggcattcttttatggaagatctggtggtaaaaaaaaaggaaagctacattaggtttcaaccctaaaataaaaaataaacagtccaacataagattattttcttctaccttgtgccatgggtgagctttgatttgcggaaatttaaactcggtgtaatttgggttcatgcacttaatctcctctcgtgtaggggtacccagaacctgagagaatagtcagttaagtaggaggtaaacaacaaaaagggagtgatttcgatggaagcaagatataatttaccttgatgatttcaacaagctgatcaacgccactgtcgccagggaatagaggcttttaaaacaaaaaaaggataaagcttaggcagacagttgcaatgagctggatggtccaaaagcctcatgtaaataatgtgatctcttacctgccccaggaggagttcagcaagcacacaaccggcagaccaaacatcaatcgctgttgtgtattcagtagcaccaaatatgagctctggagctctgtagtaccttgaacagatgtaagaaatatttggttctccttttacctataataatagaacaaaagattaggtacaacagacaatggcaatgttcgtgtgagtatctggtaatgagtgatcataccaagactttcgcgctgccgaagtcacataatttcagctgatgagtatgtgggttcacctggaagtaataatcttttagcaaccatctgactaaacaaaacttagtacttgactaactccacaaagcttcaataagtggaaaacagattataactaaatgcaagtatgtaacataccagaagattttgtggcttgatatccctgtgacacacgccaatggtgttgtgaatgtacgccaaagctctgcatatctgtcaattataataggttttccatgttatactcaatgcataattgtgctaggatagattagaagatctaggtgtgtaacgttacctgatacatgtatagttttgcatatatcaatggcatgcgttggttcatcttgttgtaatgtttaattacacggtgagcagtctctggcacatactcaagcaccaaattgaggtaaagctcctccttctcagtctttgagaaaaaacaatgctttagtgacaccacatttgggtggtcaagaactcgcattgtttgcagctcacggttcttatatctcttgtcttgaagaaccttctttatagccacagtctcaccggtttccaggcacttggcctatacaagatcattcaagaaatgaagggttcatcaatcgccaccagaacacacaaattaacacactgaacaagtgcaacataaatcgatctgtctaaagacaaacctggaaaacagttccaaaggatccatgacctacgacacgctcggccatgtagctaatggtctgcaatgtagatagataattcagtgaacaaaaacttattgtgttcccaggcaacactaaatggacacaaaaggatcagcataatatcacttgtgcttgttttgtgaacagtacctgtttagcctgtccatttcttccatcaatgcttgtcacaataacatgaccaggttctgtcccattgccattgacaactatgtcgtcaatgtcctgcgacgtttgtgaatcaaatcagcaactgacaatacagcaaaaggcaactatgatccaccactcttaggcataataccttattatcatcccttatactcatattgctcatctcattcggaagtcggtcggcatcgccacttgtacttgtttcgttctgaaaccccaaggaagaacgcaccacacctaccgaggccatactgttgaaaggcacacaaggctaatgttcaagaggctttcctaaagatgagttgtagttgatccacctgcaaacaacagcataataatggtaagtcaaagtcacaacagtgtttttacttaagaaagatgtgatgagattaggtgccagaagcacattcacagacagtttgtgttggcaattggcaggtaggcttgaaggtacaggaaaagaaaaaaaaagaagaaatgaaactttgggaatccatgatggatgccgagttgttatcaaaactggagtgttacttttctagctcaatcgaaacacagaatctgaagatattagaatgctaatctgtaccaattaccccccgtttatcatgatattttcaaccacgatcattgggagattatcccgaggcggtagctttcaagaatcaaccagttcatccacccatgcttgctatccataacagccaagagaagggaacatttcaccgatccagagaccaccaaattttgcatcaaccaaactaaaccatctttcccccatcaactcatctccctccaatcacacgcatcatccaaatagaagaaagccaccagaatcaccgatcaaaatgcaaaatcagcaggacgaacaagtatccgatccgacctcggaaaccgccaccatcttccccacccccaagaaaatcacaagaacaaacgaacacacacaccaaaaaaaaaaaagaaaaagaaggaaaaaaaaagaaccagctttcccttccaccccttgaaaaagaaaaatccaaccaagccacgatccaagagcaaccacggccgcgtcaaccgtcgaatcgggcaagaacaagcagagagaagaaccacgggatccaagaaacagaggcgagagggatttaccacgggatcaggcggggcggagggtcgccggagagaggacggagcggggctggcggcacgatctggcgctcgctggattgccccacctccctcgctggctcgctgtccctcctcagctccggcgcggaatgcgggggaggattcggagggagagaggaaggaggagcttcgctgccttctataatacacaggaggaagaagagattgcgacacagaaaaaataaaaaaaagggaaatttttatgtttactcttagtattaattaattaattaattaattaattgattattaattgttttaagtaattaacttgtctgtttgaccgttgaaaggttccggtcccgtggcgccaatctcatctcgtgtggggcccatctctctgatttttgttttttttttcatttcatggtcatttttacctttgtactagtagtagtgtattactgaattttgtggtggggaaatttttggtcttgtaaataaatttgctgtggttggctgtaaaatttatttgtgtggtgacagtaagtagaattgtgaaatatgaatataccctggattatgtcatactgtgagttcttgatgttgaaatagtgttattgtatcactgtatgatatatgaaactctgggagcaacttctttttcgtagtttttaacttagcagtttatttcccatgtccttcgacaatggcctttctgaccgttgtgttatataactaaaactttattttctctaatataataacgtgtaattctttcacgtctgtatgatatatgaatatagttgttacatgttgacatagagttcaaccggtatgaaatagaatgtgccctgaatattgcagtgtcattaaaactggttcctaagataggctatcggcgagatgaaacctttgataggagctaaaccttaaaaaagaacttggcagatagttttcaagatatagatatttcattaagtaaataaaagcatatagtcaagacaaatcttccatgttatttttctcttatttaaggatgatctttcatgttggcgtagcagaataatgcagcatgttatcatactaatgtgaaaataggtatggttgttcgtaacgtaatgtccatcatattaaaaattggcaactctctcctttgcactttttcattgctattttatttcccaataaaagccaagtttgttatatcattgtgtgcaataatatgatcatttgtcatatttaagttgcaaatagatatcttaattaaaaaatatgcaaggttaaccacatgtcccaaatccatgaactagtgccaaaccacattgtatttgattggatgcactccaaaagccaaatctacacaaatactccatcacagaatcaaatcatacatatctggtggtttggtaacaaaaattgcgtgtatgcatgatccacaaagttgagcatacaaaaatctctaaaactgttgagaatattgatgaccttgaagaaagcaaaacaaaacaaaatgaaagcaaatgattgggggtctgggacagactgtcatggtcggagcatggaacccactctgcctcactgccagcaggcaacaaaaacaaatacacctcctgcctaattaatatatgataaccatccgcctaattagatcactattggagcttaattagctctaggtggccatctactactgctgctgctacctccatttcttaagtcgaaatttggtcgggatcacagagactatgaaattaaggggatggttcgttgatcaaagaaaacaaccatgatatgtactcccccagttagcatattgactatgattaatctaattttgattgttgcttttaatcagcacaaaagcatgcacctccaaatgtagggtattagtaaagtatttttacttataaatctaccgagcacgtttgtgctacactgttatgttttaaaaaatagtttaatcgaattttaaactgacaagtatcttcgatatacatctttgtgaaacatgagtttatgctcatataaatcaacaagagctgtgattataaatcaggagtaaagagggaaccagtaatcaaatttcacaggcacaatttacattttgaaaaaaaaaaaactgtaaagggagggttcagtgattggtatgcatgctactctagaatccaaggacatcttttgagctagctcatatcattatgagtctccccctttcctgcaattttattatatttgtaaaaatgtattttatgtatctatcttgtaaaggtagccgtcctacctatgatgatgctggccgatcatgactgtctgagaaagaagatgtagcactatagatcactatacacttagcactatagatcactatacactttcatggcatctttacaagaaaaagttgtctaacttgaccctaattttaattcaatttgcaaagatatcaatgaattatatagcattctgtttccagctgcattctcatccaatttacaaatctaccataatacttatgacaaccataatcaagatttgaagttagacatacctccctgttgcagacacattctagtttaagttttaattggtcagttgtcacatctaattttttttctagataagggagatgattacatccccatctttgcatttagaatgcacacaactataaagtttgagttatgacaagaacttcctatgtaacatatagtagtatcatattattttttttaaaaaaaattgccgtaataaacatgtccttaatcataacctatagcaaggagttggaacgcaaggattctattcataattaatgaactttgtataattaagagccttgcgtgccgtgttgtttgtcactcctcacgaatacggagtatatacacattgttttttgtacaacgaataatatacgtcaggccaatacacacatacataatacacctgtatatttgagtaaaccgtacgtcgtcttcgatctgtcagtaattgactaaaatatattgactcttttaatcatctcgataaacccatggaatcctgatatgcctgcagcctaaccaaccaacaattaatcaattaatcaaagtatactaattaacctgacatgatctaactgaagctgggcgtcaggctgcgttcgaatgagaagttgtgtgaactttttaatagcgcgcaaccgagataaacatgattaattaaacattaactattacatgcttgaaaatagatttatttattttttagaaaagttatatataaaaggtttatactccatccattccaaaatataaggcacaaccacccttaatccaaagaccaagaaataattattattatcttgtagtttggatcatcctaataaatactaatgcgtgcatccaataggattagataacatgagggtggaggatttaaaaaaagtaataatttaatagaaaagatgtcatagttaattgcatgcttgtatgtatgctttatattatggaactgtaggatcgaatcgaaagaactaagccaaccagaggggggggtgaatggttgatatacccaaaaaccgaaaacttttagcggaaataaaagttacccttaatttcgatgagatcggtctgaccggagtagattagccggtctgaccggtgttgaatctccggtctgacctccgagatctgctcctgacgcctgtcaccgacaccggtctgaccgtcgtgtaccccgccggtctgaccaccgtgatgccaccggtctgaccgtcggtgtgccaccggttagactgccgaaacccggtgaaacacaaatcgaagaactcttacagtagatgacaactttattgtttctctctgtgtttacaaagtacaccaacagcactccttataaaaatttcgactaaactcgaaaccctaactcaaaactcaactcaattgctctcaaaagcgataccgggaagcctcacgctccccctctatttatacatgaggtaggcagcctaaagccacgaaccaaactcatactaagagtcctaaacacattaggaaaccctctagtacaagaaagaaactttacataaccaatcgtaccaaatttggactccttccaaatttgactccgcatcccatatgcacacaataactccatcatatgccatatggaatctctatcaaccacgtgcatcaactctagcctaagtatcccgcatgatctctgaccaccacggacgtcgccttatccccaagccgactcccgatccatcaccgcaaatactctcccgagacatcgagtcacctacacatggaacaaacaaagaaaccatattccgagaccaagctatctccaacttgactcattagtagcaaacaacagtattacatagtatagtatccatctagaagtcataattatgaaataatcatggatatccaaacaaacaacccgaaaccgaaaccgacacagtgtcggccggtcagaccacctgaccacgcgcataccgccggtccgaccggctaccagagcccggtctgaccggtcacatgaaataatgaatcctgcgatcacctgtgaatccaatcatctccaaaaccactaatctccaatgctcaattgttcatcacagaataataatcaaaaacacatttgattttacaggaacatctaagaaaattggttgtgccttatattttggaatggagggagtataaaatacgtactcgtttatgcatccgtcgaaaatcatgttcactgaaaatgagaagtagctaagcattaagctggtaatgatgtagcctaagacaaattaatcggaagcaatggccgacatgacaggctgttggacggccggcaggacgctacggctcaacaggtccaaccgacccgatcaaaccaaaccatcttaatttaattactcagtctaatccacattttgtgtcattttttatttggtgtagcaccttaaatcggtcaaatttcagaccaaatcatgcagttctaaaaatattgaaggtttggctaaaaatacaaaagctatctttaccatggttgtctctatatgattggccatgtatagtactcacatgttcatgtgagcatacagtcaatattaatttgataaagtctgcatcatgtagtaattaattagcagtagctctagtacttactacggacgaactgatcagttccttggatttgaaattttcaactcgttggtgcaatgctcaatgaatttgtcagctgcgtgcaatcaatgtgtgtggggatgaaatgtatacacggtttgttgtttcaaactttcaaaacctattgaagtatttctgacatttgattggtgagaaatttatgcggtatgcatatatgggccagtgtgagtcggtctgattcaaactccaaaatttgaatggattagttgaatatagcagcttaattggacgactttttattcaagtacactttggtggttagactcttaatatcaaaaatacacgaaacttgacaaaaggaaacacgctcatagactttttgtgtgtttttctcaaagtagtcaattaaatggattaggttgctaaggagttactactagcaagaagctagtatgatgtaaaagtgagattggactttgtttcctcctgtttaatactatgaaatattattatgccattagataataagttgatcaatgttattatcctctaaaaagacaatgatataaaagaaatttgcagattatgcctgagcttatgctattgtactccagtggtgcacaatgtgagatagacttaaatcttgtttagggcaagttatgaatttatttttgggctgggctgtgggctgggcctggcctactgactggtacttatcattcttgatatgttgacatactcatgtgttttgcatagtattcatttattgctaatcccattgcattgcattatctttttcacaatggtagttagattgcgttgtcatatgatgtactcctgtaacgttttcagattttgcacctattgctttcaggtgtggcttgtaggatacaatgaggaatgcatacctacacccaacataaaacattaaaattggaaagaaaccaaaggaagactagaaaaaaaaacttttattagtgaaccaaaaacaataataggtttcnaaatgaataagctggaatccgaagacctcccaaccctttnnntnggggaggagatattcagngtntcagtacagccggg

SEQ ID NO: 5874 - DNA, 74571 bp, Oryza sativa
  unsure (1)..(74571): unsure at all n locations
agagtgagagagagagagaagctagataagagggaggagaaaggctaactgacctgtgggtccgatatttatttttatttttactcactgatatgtaggtcctatttatgtttgtttttattttaatggcacgtaagcactacattgatgtcacatggaatggaatgaagactaagtcaatctgacacgtaagcacacgtacgtaggacaaaaccgcctccaaaaccgtccagggaattgatttgcaacggtgttaggaatcaagggataggttataattatacccggtttagctgttgagggatgcgattcagctagagtcatgagttgagagttgagggaggcaaatagacttattccaaatttggaacacaaaggcagcccgtctatgttcaatttgaggcccagattttgtgctggcatactgaattactgatcagtgtctaggtcacttcagaatttcaatccacgtaagtacgagtactagttaagggtagatgacttatgaaaatcatttcctaagtagtactccgtactgtatagtactgtaccaatcaaagtgtgttatgaatggctgacgaaagtctgatctaaggacgagaatcgtgacgtattccgtattccctccgttttataaaaaaactaggtgattctccacgctttgctgtagaaatttctaagtaacttttaatattttttaataatcaagctaaaagtaaaaattatatccgttattaacaacaaataacattggtttgtccaactatgttcagagagatatttagtagactatatatgagattgtagatgaaatttgatatcatacactttgattatatggatgaatatatgttaaggattataaaacgatagatatatacatgttaaaaatattgtgaaaattaatgtgaaggaagatgattggatgttgatttgtacaattcaatgaattatagatgatgttgcatgcttgcataagttttgcatgtaattattgctagtggatgatgaggtggcatgtttgcatattgagatttatggttagtgggttataactttacagtaagataggatacgactaggtttgttttgtatgagctacatgtatcatatccaatactagatttggtttttgaagataacgggagtaatcccctcgcacataaaatagagcgacttattagcacataactgattgatttatagctaaaaacatgaaaaatggatcaatatgattttcgaaacaactttcttatagacttttgtttaaaaaaatacatggttagcagttcggaaagcatatggcctaggcatagagagagaagagtacatataggtagcataccagataaaaacactacatacatatagctatcatacgcgataaaaacactgcacctagaaataagaatcaacaagaaaaaaactttgtttaaaattagcaaccatcaagtttgtttcttgatacccctctgtaaccatcaaagatcattaaagtggctaatttctctaaatagcaggcactgagaacaaagaaattcctagaactatcgttttcctatagcattaatataatttattagtatgagtacttcattaaaagctcgtttggtatagctcctacttcaacatttttgtctcgtaaagttggagctgtacctaacacttccaagctagtgtgagaatatagagtaaagctaccacacagctcttaaaaaagttgtaccaaactaatgctagttaaaactactgaaagaataattagcaaccatcaagttgtaaatacgagcgccggtactaagtctagtacatgaatccggatggataggttctaccacgtggaatctaaccagttgagctagctatactcactgatgcatagtggtttagtaatttataagcatgtaataattaaacatgaaattaattaagtcatatgtgcatacttgcatatgtgcagcaacgtagttggagagatagtgagatacagaggatatctgcacatgcgacgctatgaaataaacgcaactgcgcaacacaatgcacatgcgacgctacgaaatatataatgacgcgttcaatacatatactcagtacgtgctactcatgcctagcgtcgtattgccatcataggacggaccaggacgacccaatttttcaaatcaaataatttatgggcttaaacaaacaaagtacttctgaaatagggctcaatcggaaaacaaaaatggatcgagttgagtcttcctggtccctatacaaatgtatatgttacacgatgccgtccaactaccaaacatcacaaattcacaaaacattggcatatgcttagtttagcagtgatgacctccaatatcacacttgttttcttgttgatgatgtgcttggcagcggcagtagcagcagcagcaacccctggagtcgccggaggtaatgggctcttgcatacaatcccttccaaaaactctctggctcactgcccttctacctgcggcgacattggcttctcctacccatttgggatcggccatggctgcttccggcaaggtttcgagctcatctgcgacaacaccactcatcctcccacactgctcctggcaaacactacaactaaggtcatcggccaatcaggccggacactagaggtgatagaaatcccagccattgccttcaacatcgcgatgaacaacagcagcatcatcgactacatccgatactgggtttctcctgccaatggtttcaccatcgtgaacgagagcaccctgttcgttatcggatgtgggatcgaggcgtgcctgttcgatcttgacacgaacgagaccatgggttcttgcatcaccatgtgttctgacaatttggggatcatggagatgcacgatggggattgtaccggcatcggttgctgccatatcatcgtgagaagggagctgcgtcggttttggttaaagcttgatcatccggatgatagaacaacaccgcgatcatatcgggtgttgtctcgtgctcaggttttcatcctgccaacaattaacagctatcaattcaatacgaatgatcttgtttcgtccagctggatgaacacgagctccattggtggtactcttctccgtggtgccatcatggaccaggagacttgtccaggtgcatcagcgagcaaagcaacctatgcttgcaccactaacaccaattgcttcaatgctacaaatggaggatattactgttcctgccgcaatgatgtcaccgatggcaatccttacgttaaccttggctgcagtgacgaccctggtacgacttatatatattctttttctatgtatgcatattacccgtgcgctgcaataggattctaattagataaaattatcattgacccgatattaccatattttttcacaaatattatttcttaatttctgtcctttgatcgcacactatcctttttcctttcaaaacgaaaagtacaaagttgcaggtggtggttgacatgtgggccctttgtcctaatagtgtaattttccctttcaaaataaaagtaagttggtgatgggggtggtggtagattcaccactactccattctaaaggtccattttaaaggagtatagatgttcctattttgtattgcctagtgccatgcatgtgcattgtaacaggattggaattatgaggtttagtttttccccttttttggttgatttttcgtgtagaaactggttttaggtgggtggctatttttagtgtgcggatttttaagtggggaactatgatggtggaaaaggaaaaaggacaacttcgttttcaaagtagtaaatttataagaatcaactaagtgagataccctagataacatatatactacatagtaatagaaacagtaaggcacacattggtaatctttctatatactaatttagaaacccatggaggagagagaaaagtaaggccagcaactttattctagatggttcagaaaggctagaagaatctcattattaataagaaatttttataattctcatattgatcaagaaaacctagatacataacacatccaatttgttttactaatgatgaacccatgcatccacatgatgagctactaccattgtagaaaacatttttaagcattagaaataatacatatttgtagttgcaaattcaaagtttacagatattatgcttgcaatatgggggcaagaaattctgaagggagaagtctattttaggatgttggttttccccaagtccagttttcactctatactaacaaatcattcatttttttacacatatatttcaaaatcggaccagatatcaacccaacgtgagctaatctcacaatgctccaaacagtgtcgtgcttatctcctcttggatctggcaagagttcacatgccatctttaaagatagagttttcatatgcacattttttaatgttctagattttcaaatgattaatgtcaattttaacttgtagaacttctagactttcaaattaatgttgaaatctacttttgttacctactggtattaatataggagcatgcaggagaatatagtaaagggtgaagatggattgctttattcatttcaataaccagcatactgcacataattgttactgatgtatggattctccagctccaatgtttgttttttccttccaaaaaagaagggagttggtggtgggggtggttgaacatgtgatcctctggtcctacagtttttttttccttttccacaaaagtagcaagtttgtggtgggggtggtggcaacactactttcttttaaaagaatatagattatacagttctaatattatagacatgccatactgcgtatactcgcacttactaacactggggatacaacatacctatttttatgggtaaaggtattactaagtatggataaatatataatttcatccacttaagaaaggaccatgtagtaattctttatcacgatgttttacctttggctaagttttgtcatatgtacttgaaccccgatatttgtctctaaaattaataggttccactttgtttttttgcttccctactatttacagatattgagtgtttaacaaaaggaaaatgtacggcatcagctaagagacacaatcttattgtaggtaggtcacttcaaacaaaatatattcaagtataattcataaaatgcatgacgtcttcatgaatacaagtgttattggatgaacaggtataacaattggaattgggtgtggccttggctcaatcattcttgcactcggtgcaatagtactaatcaacaagtggaagagaggtgtacaaaagagaattcgaagggcacacttcaagaaaaaccaaggcctactcttggaacaattgatattagatgaaaaagcacaagataaaacaaagatattctccttggaggaactagagaaggcaacgaactactttgatgctactcgtgtacttggctctggagggcatggcacagtttacaaagggattttgtccaatcaatgcatagtagccattaaaatgtccaaaatagcggagcaaacagagatagatcaatttatcaatgaagttgctatattatcgcaaatcattcatcgcaatgtggtaaagctttttgggtgttgtcttgaagcagaggtgcctttattggtgtatgagttcatatccaatgggacactatatgatattcttcacagtgatgtaagtgttaaatgcttgctatcatgggatgaccgtattaggattgcagtagaagccgcaggagctcttgcttacctacactcagctgcagcaattccaatttaccatagagatgtcaaatcttctaatatattgttggacgacaactttactacaaaggtttctgactttggagcttcaagaaccatgtcacttgatcaaactcatgttatgacaaatgtacaaggcacatttggttacttagatccagagtactactacactggccaactaacagcgaagagtgatgtctatagttttggagttatacttgtcgagcttctagtaagaaagaagtcgatttttataaatgaccaaggtacaaaacaaagcttggctcattactttgtggaagggcatcaacaaggagtagtcatggagatcttggattcgcaagttatggaagaggcaaaccgggaagaaattgatgaaattgtctcaattgcagaatcatgcttgaaaacaaaaggagaagagagacctaccatgaaagaagtagaaatgaggttgcagtttgttagaactataagacaaagaaagtgccaacaatttccagtaacagaaggagaaattgagcatttcccattcccaaatactagtaactcttcagatggcaggttcagccattctactggtttaacttgcgactctgtctctggaagttacagcttggagcaacaattttcttcatcaatcaatttgccacgataaccattggtgcaacaatacatttgacttgtaggtgcttgttaagatgaatttgagtcggttgccctatgttttagtttcattaaataatatatttgctctatgcatatgttcttccaacatattttcacgatgtggtttgtgtaccaatctataatcccatacatataatgcataattattaaggtttgatatgctggtgaagaaaaatattttgtagtgttctccatacttcatatccagaggtcagaaactagtctgatctgatctggctgtgttagctgtccctttttttttttttgagaagggtacatactcaggacgcacactcacacacaccacactcacaccacaacacacgcacacacacgcgtgcgcgttcctaacacacggtcacactctaggattgagattgaagacactaggccacagtgtacgggaaacgtgcagtcccactgaacgcgcacaagtgtgtacccttttacctaaccaggaccaaccgaagtgagtcccggggaaagggataaaatcccggtgcgaaaggttcaagcccaataagctcgaggccaatacttttttgggccatgagcccatgaccaacctgtactccgtatttggtttcaggcccgaacgttataaaaccatccagcccacagtatttcgaatttggcccgcatatgaattcatcttaaacatttgggccataatctcttcaaattggcccacaacggctgcctgtttcggtataaattcaggcccatctgaactcgctgaatttgtgcacaaaggaatcatcgaacaaattaaatttacatttttatttgataacagaaatggtcaacatcttcaatctttgttgttcggaacacagccaaaggaattataatttacatgcacaatatggagtgaagcaaactaggaaaatgactgaaactcagttctgcagaaaccagaaagtaaaatgttttgattgaatctgatcactgataaggctggtgaccaacttggtgcaaggcttcaagagttccaagactgttgggcctttcctacaattgggcctttccaggatcaatagaacggcccatcaaagcccaacggactcgagcccaataccttcctggcccagcatatttgatgaaaccatttggccagcaatctttcattctttcaaatctgttccatgatctaaatttttctgaacttttttggcacataatctctcaaatttgaagatattcaactatcttccacttttagatatggtgtttaccaatttgccgcatgaacttacatgtcatagatacaggatttggcccataactgcaacctgcttcagtttaaattcgggcaatagaacgagaaaagtactaaccactgtaactgatcactgaatattcaaagatagtgaattacaattcagttttacaacagcaagaatcgatgcaggtaactacggagtacaaattaagagatcaaaataacaaggaatatatatattatgtggtaatgatccagccgatcgctggagaaagagaacttgtagcttaattatcagctcgccgtgttggtggcgaagcagaccttcctgacctcgccggcgttcccggtgagcacctcgacgccgcccatcttcaccatcgccgccgcgaacctcgccatccacgccaccgggttggcggcgttgtcgtcgaccatcgccttggtgtcgtcgcggctcgtcagcgtctggtccgacgtgaacatcacctccccggcggccacgttcttgaagtactggttgctcagcacgttggggtcggtcacctggttgttgctcaccgccctcccgccgccgccgctcgccggcggcgggcacagcttcttgagcgccgcggcgaacgtggcgttcatggtggggtcgacggtggggtagagcctgccggtgacgaaggcgcagtgggtgaggccgaaggagtgggcgccggagaggatgacgaggtcgtcggcggtgaggcccttggcggcgaagctgtcgacgaggtcctggaggtggaacgccggggacgggatgaaccgggcgacgtcggaggcggaggaggcggtgccgtcgcggcggccggagggcatggcgaaggcgaagttgccgttgacgacggcggagtcgcgcgcggcgaaggcgaggatgtcggcgcaggagaccttgccggggcagacggcctcgacggcggccttgatcttgttcacggcgtcgtagccgcgcagcgggatcgccgtcttctccggctgcgtgtttctgctcgtcgggtccagcaggatggacgcgtcacaaccctattattgcaaatacaatttcattaattacttttttaattagatagttaacctttgtcttcaaacaggtagtttaagtggttttcttgattttaatcgagctatgattttataattcgagtcatttgatttgtaatatatgtgtaataattggatgtactttctttaaaataaagactggaatgaattttattgttaaaacatagttaaagaaatagtgttgggtaaacatgaatgtaaattgttattattaaattgaattaaaccaatccaaatatgacacgttgatgaatttactacgaaacttatatgttttataaatgatagttttgtacgtaccctgacgaagcagtcgtggaagaagaggcggatgaaggcggcgcccatggtggggtcgttgaagatcatcggctcgacgacgttcctcaccgtctcctcggctttcgggcacgacgacgagtagaagtcgtactgcagcgtcgtcgtccccgacgccggcggcacggagctcatcgtcaccgcagccgccatggcgaacgccatgagcatcactgcaggccttctgcatgctgctgtcgccatcgccatgtttcagagactaaactcctcaaattaattaagctatttagttaaccaacaagagagaatgtctgattgcgactgtggtgtgtgtgcatgtcctgctcatctctgcaggtatttatagcatgacatcgactggaatgcagtgttaaccatgcatgggtgatgatggatggatcaatgattaggaggtaattaattaagctagctgcaacaaattattggtatagctgaatgagctaattaattaattaagctagctaggtatatagctgggttgacattgccacacacaagagggtacttgataattatcttgttcctatgggattagacaagagttatctggccggatatatgcaatgttggttagttagcatttgactctatggaggtatgaacactagttacaactgcaacagaaaatgttatcaaatctggctagctttggacaccaatatcctagctaattaagttgatgactttgagaacttttagctagctaccggcagttaagattaacagaatgaatagaacatagtactaattaacccgacccccaattatctaaaaaagcatggttaattttattttgtaggcctggaaatgtccctagctcctcaatttaattttggactcatgatgatcagttcacaagttgaattagtagggaaacgaattgaatcctgtattaaaaaaaacacaagacaatttattttaagagtaaatttaacaaaactacagatactttgatcaaactattacaaaactacagatttaagaatgtatttcacaaaactacagatttagagtcaaatttatcacggaactacagatttaaggtattatatcacaaaactattgatttaacaactattttatcacaaactacatatttaaaaactattttatcacaaaactacagattttataactttaaataaataatagtgctatgatctaaactctaaaatatgtaattctttgataacttcatcactaaatctgtagttttgtgatatggtgcattaaatctgtagttccgtgaaaagtttgacgctaaatctgtagttttgtgatacacattcttaaacctgtagttttatgataatttgatccaaattatctatagttttgtgaaatttactcttattttaatttctatgtcccagcagaacatcaaataaagtcttggatggaaataaaatggatattctagtctatgcaaatgttactacatatatacatgcatgattaaatggacttaatgcaagtctttcattgaaggaaacacggcttgtcgacattctctgcactaattaaggtgtctgtttgtccacaagaatgtcaacttgataggtacttaattactggcagatatactccataccatttttatatgtcttttcggtgtaacagacagtgtatctactatttgctcatactgcacgttgtgctgcatttgtgcatacccaactgaaaaattctcgagttagcgaatattgtgtcgacctaactgataacagacaaattaaattaacaaggatgacatatatatgtccatgcatgaatgaaaaggttgttaattatatggacatatatgcatgcgtgatttatatatgaatgctgctagctgagcttgacgtttattgtccaagcaaaaaacaataattttactacacttgcgagccaaaagatgggtggacatccacccaagtaattagaatccatctccgttacaagcaggaaatacttttaatcaggtggccatccacccatttgttgcatgctcgtgagggtaagtacatttcggtaggtggctacattaagccattcgtctgtgaaaacgaaggcatttttataggctgacgccgagctcgccgtcgtcgtgctcgatgcatggcacgcacgcatcatcgccgggtcaggccactttcaccgcgcaaagacgcgggcggaagaagcgcgggagtatcatgctggccgaggcgttggggttgagctggcacacgcgcgccacaacaaacgccaaaggtgaggagcagcattatccaaaggagtaatatctactatgattgtagggttcggattcgaagccgaatcatgtgtgtcaagtttccaccaaatcgatagttaccttcacttgacggaagatcgggcatcccgttgccatcaccagccgacgccgccgaggaagcccgcgttggagtagacgccccggccgcaccttggcccaaacatcatacatggtggcggaaccgatgctcggggggcgagaaggtggttgacggacaggacgacggttgagcgcgtcgtaggtgcgggaagctgcgcagaacagtgtgaaaccgccgccgtggaagtagatgacgatggggtgcggcgacggcaagcgctccgccacggcgttgaagatggtgatgtccgtggtccgtccagccgacgccggtggtgtccggtcggaaataggccggtgctttccgccatctctatgccgcgtcacgtcgatggcgggcggcgacggcgcggatggtggctagctggtggcaactcgctggcttggaggtgacgaggaaagtagtggaggaaggagaggtggccaatgacatgtggggcctacactattttttttttttctgactaggataccacgtcagctaaaacaaacatacctccaccctactataggacctgatttagactgttttgccgagaagaggggtgaagatttctggtaatcaattaagctaaactcgcgtgaagatgagggatttcagtggacttattcctcatttgggccgtaaccaggcaaaacagctggtggtcggatgtaggccaaaagttacctgcacctaatcaaggcccatatacatattcgtctagacctataagcccatacggggagaggaacgaaattgaactattattcaatttgggcttaaaaagtaggtctaaattggacaattaatttaagcccaactttagagccaattttcatccattacagatttcaaaagctttgattttgtgaattttgccgcttgggcaaatctatgcctagattttcatgcatccgatctaaatctttaaagaactattaatattttaactttttttaatgtttgacttgaaagatgcgtgtctaaactccaaaataatactcactccgtttcatataacaagacgttttgtcttttttttttaaagttaatttttttgttttgactttgaccaagtttaaaaaaaaagcagcaacattttcaatccaaaacatatatagtatcaaaatatattcgacgttagatttaacaaaactaattttgtattgtaaatattgctacgtttttctataaacatagtcaaacttaaaaacgctcaacttagaaaaaaaacaaaagtgtcttataatatgaaactgaaggagtatatttatgtgaccagtggtagtatagcttttggcgagagcgcacccgcgtactagtataaaaagtaataacattataaatttagaatcgaattacttgcatcccaatttttttttgaatgtgtggcagtacaacgaattgaatttaaactacttccttcgttccaaaatgtagctacctagtacaggatgtgacattacctattactaagaatctgaacaggaggctgtccagattcctcctgtccagattcatagcactaagtaatgtcacatcatatactagatagctacattttaggacggaggaagtattagcagtggaaaagaaggacggaggaagtagtagcagtggaaaagaataaagtacaatagagttatagggatcatatcagagtcaaacatttagagagagagagagagctactgcatcgatcatcttatgtcatcgtcgtcaatggtggtagctgttgacggcgttgcacttggtcctgatctcccccttgctctccgccggcatcaccaccagaaactattttaatttttgaacaaaatttgaacaaatatttccaaattcacaaaaaaatgttttctttaaaaaaaattccggccgaaataatatgggcgtgcgtccggaattacgtcctaagcgtagaaagagacagagcgcgtgcttgtataaagagcaatattagaaatttacaattgaactactttgcatcataattattttgaaaagtttgcagtacaacgaattgaatttgaactagtactcacgcgggcgaaggaacaaaaaatacaatagagttacagagatcatatcatagtcaaacattaattcaaagctactgcatcatatatccatgagatcgttcgatcgatcgatcgatggaaggatcgtcgtcgacgtcaatggtggtagccgttgacggcgctgcacttggccctgatctcccccttgctccccgccggcatgggcagcttgctcagcttcaccagcgcgtcgccgaagtccacgttccacagcgtcgcgttcttggcgtactccacgacgtgcccgcgcgcctccttcccggtgagcagcgcccagtccgcgtggaacgtcaccgccatggcgaggttgttgtggtagtagctgttgtccaggtagtccctcgccttcctcaccctcgccgcaaaccccggcatgaccctcgccacggcggcgccgtcctcgtcgcgcacgttgttcaccacgacgtggttgttggccggcgtcggcgacacgccgccgcacttggagacgaggaggctgcggtagcccgggttgatctgggcgtccggggcggtgaggcggccggcgaaggaggtgcagtgggtgacgccgatggagtgcgcgccggagaggatgacgagctcctccacggtgaagttcttgcggcggaagttgcggacgaggtcggtgaggtttgcggcggcgtccgggaggaacgcgtcggcgtcgcggctgcgggagaccacgccgtcgaggcggccggcagggacggggaagtcgacgccgccgtggctgaggtacctggacgcgtcgcgcgccgcgtacgcgatgatgtcggcgcacgacaccgtgttggggcaccgcgcctccagcaccgccttgatcgcgtcgatcacgtccatcccccggatcccgatgttcgccggagattccttctccggctgcctgttcatctcgctcttctccagaagcacggaggcgtcacacccctgcacgcgacgaagcaagcaactccattaatcatcaaacccgccattgctgcctagcgagcgagcgagcgagctctacgtgcattgcattgcatgcacgcatggcgttcggtcaaatgactagttcgatcgatccttaccctgacgaagcagtcgtggaagaggaggcggacgaggccagcgcccttgccgcggttgtccttgatggagttgacgacgatggagttcacgatcttctccacgtccttgcacgtcttctcgtagtacccaaccttcagctcgcgatcggctccggccatcgccgccgccgccgccatgaacaccaccacaacaaagcacacaagcttcaccatctccgatgatgatgatgatgatgatgtgtgcaaccaatcaagaagaagatccgagtgtgagagatcaatcgatggagggatggatgaactccaacgttgatgggtgcatgtatatatactgataatttgggaattttttagcatgtagtggttaattataatttgtgaacaactgatcatgcatgcatatacatgcaatatggtgatcatgcaacatctgattagttgaggagaacatggagatgagcgcagagatgcagtgttctcaactggaatgtcgatggaaaaaataactaaacaaaatagcagcagcaggttgaccttacccagttggagagtttcttatgtctgacagcagcagagagggaatttaattgcattgtctcttcaaaatagcccaaattcattggccatgacagtggaatttgctcaattaattgcagatagaccaagagtttgttactgtcgaaacaagatttcggcaatactaaaaaggggtggctatcaagcttgaaaagtggatgggtttggagacaaacgatttatataggttcaggccttcttattcaagaagtaataccctactcctgtccggggtggaaaccgccgagtgtattattgaatgtatgatctcaaagagaattggtgtcccaggaaggactcggacccctccttatataggggaaggagtccgtattacaaggtataactcatatccttatcagaatacgagaatacaaataaaatacaatcgtaaccgactaaatctcaggatatttccttgacgtacaagttaagaaacaaacccgagatacaaataaagatattctatctatattcggtatcctatattcagtctaaatataaccgccgtgtagatatggggtatccataatctccacagtagcccccgactatatgattagttaacaaactaaacatgtagtcaagaataaaataattgcataatcatgcatcatatgacaaaagcatatgcggcgtccaacaagacattcagccgactgctttccagccatagtaaaaaaatccgagtgaataacactctaaaaggttcacaaatgaacacatttaacaaacatccgagtaaaaaactctaaagataatccatcaaatgttataaaaattatggtaattaataagtctaatagcctaggctatgactctcaccataattaaaataggcatataacacgccaagagaatgaccattgtaaaaacaagtcatcttaaatcaacccagacagcttttgcagcctaaaaaagcttacaaaaatagtataacacttttctgtcgggtacctttcaatttgcattgcaataattccaaagaattatataaccgcattaaaaaggattttatcagcattgggccacaccattgcgagcataaattgccaaagcaaaaatgcctaagtccctaaggagcacaacgggccacgctgttaataatattgggctgaagtactgttcaggcctaggcccattagcacccccgaaacccttaacaaaaaatcccgaagtctaagcggcgcttcgtcttccccgccggaactctcgccatttcccccattccttgctatagtacaaagctgcgccggcgaaactagggttcaccattccgctccaatccacctccaaaagttcaccaaaatcctccacgcaactcattgcttcaattccacatctctccccagccatccctcgaatcaaatcaactcattcggatcaaatcgatggcggaagaaaaagaaagctttgaaagccaatgggcgtcgtccgacgtgacggaggagaacttgaaggagatggtggcgcacggcgttctcccagcaaaggagatcatcggatggtggccagcatttggtgaagctttcccaacccccgatacacatgaggttgtgggtttttctcacttcttctatggcggatttgccctttcaacctcgaagtttttccgtgggatattgaacttctatggtatcaatttacatcatttgaatccaaactccatagtccatattgcaaattccgtccatgtctgtgaagcttttttgggcattaggcctcattttgctctgttccgccgaatattcttcctcaagccccaaccgaacaaaagcaaaccatgcgtagttggaggggctggatttcaactgagagggaccttgagccaaaagtatttttctatgcccttcaagacctcaaacaaaggatggcatgccaactggttttatgtccaaaatcccgagcccgctcttcccgagtactcctgtcttcccctagtataccaagatacttggaactcacttcccatgggagatgaagctgcccaagccttagaactgatggagcgcatgttgaagctcaaggagcaaggcttacagggagagcaaatcactcggcatttcattaagtgccgattagctccaatcaaagaaagatcccgcacagctttcgagtttgatggtaaacatgatccaaaccgtgaagacccagattctctggactttaagatcatgaaggagaggatgtacaagatattctcaaacgccatcgttgtcagttattcgcatctgctgccagtcgtgccatataatgcattcaacccacctccgctggtatgtatcagaactcttcaaaccgtgaccaaaacataattttgtcttcttgttgaattaactgaccatggaggcatttcattcaggaatttgctttgatgaagtctgaccccccgattgctcaacgccgatctcctcgtcatcagaccattcaggggagtggaggaccaaaaatcaggtcagactcccaatccaaaactcccaatccgactgggcaatcagattctcgcaagagaaagcttgtgccgagcgacgacgaaggcgacgacaataataaatttggggataagggatcacccaaaaaattaccaaagcacactgctccgaagaagaaattgtctagccgccccatgccaaagttcagaaaatcctccaggtataaaccattcggtaccatttcacttcgacatgcctctctcatgaagataatattgaaaactggaagaaaacttgcaggaaaccgtctgacatagatccatccgggaaggactctgatccagctaagacagagacaggttcatccaaagaagctgggccgactactgaggaccacccgactggcgctcagacctcaactgataatatcaacccaagcgactagcccccgactggaaaccagtcagcagaagcggaaattgcaacaagccaagagcccccgactggtaatcagtcggaagtatgtccagatcaagaaattcctgaagttgaagttcaggctacgacttcccaaggactggacgctggtaacgacccaacgcctgggtccccagataaagggcaaggatcacctcacgctcaaccggaaactgcttcaggtaacctatcttctcaagtaatgctaatctgaataactccgatttgcttgcctaatgtctggaaatacatcaggaccactggccggtgacagagaagaaatctctcgcataaaggcaactgctgattctcgtccccccatcttaatcaattggtgggacgacaacttgcaacctgcaggcatcgtcataaatcgacagaaagaagacgaagaggtgcgccagctgaagaaagcactcggagaagctacccgcattgtaaatgtaagtcttccaggtggctgcctttggcgaccttgtttccttctcagcaagactaaaccgtgaatcattgcgcagagaatccatctccgtaatgaggccaaaaccacaactttagaaaagctggttcctcatttagggacccttgaagcggttagggatcagctacacgaagccaaagagcttgctaaaaagacagagcatgatctaagggaccgtgacggagctggtggctcctcaccgggagaccgcgcaggcccccctttgccggttcggccgggggcttagggtgagatctcaagctctctctgtgtgtgggaagattgcgtgccaggaagaaacgcgagacacggacgatgtatacaggttcgggccgctgggaagcgtaataccctactcctgtgtttttggtggatctgtgtaagagcaagttacaaaaacatcaactagccctctcctctcccgggaaaatccagcccccgctctttgtgggcatggtcctccttttatatcttaaggggataccacatgtacccttccctttccaaactggacttttcttctctttatggacggagattggtatggttgccgtccgaatgacacttcgatgggacagcccacacctacctccactcccggcggagacaggcgcaacgcgggatcgtggttgtctgatgctgacgcgaccagtgtcagaccggtcacagatcggtcattcttgtcctctatgcgtcagttcagcgatctgcatgatcacccttctttttgtagcatcctgcctgtaatggttgggatgaagcctggtattcatctaaccagggctaacgtgccatctctaagaggtaacacgctagctccggctggagacgtgtgcctagaggctctcgtcttgacgggacggggcgaggcgtgcgtcagaccgccagtcgccacctaaccgttgatctgaccggtctgtgactggtcacagaccggataaaagagcgcgctgcattgcgctgcatgcagcgtgacacgcttgaccagaccgcaataaatgcggttaggtgagccctatcgtgttcacccaacctatgtacatagtgcaaaccccacagggggtcggggcacctcggccctcggggccggggcaggagcaacccgaccccccctcggggaaatcaggaggagggcggacacctcaccctcgggcccgacgtccccgaaggtgccaggccacgtgggcgattccatctgcctcaagcctccgggcgcaatacccccggtcccatatcaccgacagaccggattacccaactccaggattcaaactttgaactgagtggctcatcaaaaggtaacctcaagatctgccccattaatttgtgctgttataattgtaccctcaactatctggaatcaaaacagtacaagctgccaagatagctcaactggagaaacgaatttaggccttagaaagtaacaaggcagaattggctgcacaaagggactcggctttgaaggaggttgaaggtattgtcagccaacaacctgagtttctctctttgatgcagcagatcattgacatgaatttgttattgtagaccgcaagattaagtcccaagcccagttcgacgtcctggttggcaagatcaaaagacttgaaggagccagggatgaggttgccaatgccgctaccccgcttgtccaggcaatgttctataataacaatggtccgagtagattcgatgcttccgaagtgtttgacaagctgagaatcgctccggacacctatttcaagaacattaaagaagccggaagcatgggagtaggtttagcactagcaatgaccaaatccctgtacccgaagatcgatattgatgccgttgatggttttgcggacgggacaagcgaagaggctgcccttgatcttatcaacgacgctcaaaaagcagccgacaagattgcaggtgctgtcgtagatcggtttcaggataccgaccttcggccgactggtaacaataactctgatgatgagaagactgatactgattgaatgtaaatgtattggatgacgaatgatggaggcacaatttgtacaataccggtgtatttatgctgtgcttggtgtttcttgcttagctgttgatttcttaaaaacctttatcaagctttgttgagcctaaaacccgcaaaagctattaaaaacttttagtcctcgtaaactaagtagaaaaatcaaacaaggcaatgatagaccaagtaagcaaattgaattgataaaaaatcacactccattattattatggtagcccccgactgacaacctcaagaagaaggcttgatgttgacagtcaagatagggaaatacatagataaacttaagcgtagaaacgacgaagatgttcgatattccaagaattgtcaacaagtgtaccatcttcgtgcttgagtcggtaggaacctggccgggtgacttcagagattataaatggcccttcccatagaggagataacttgtgccgatctcgtgtagtttgaattttcctcaaaaccaggtcgccgactagaaaagctcgtgatcgaacgttgcgattatgatagcgtcgcaacccttgtaaatatcgggccgactgaattaaagctgcttcacggacttcttccaatcggtgcagatcatccactcggtcctcttcgtagcgttcttcgcgaaaattgtgaaagcgcaaagattcgaatttaacttcactaggcaacattgcttctgccctgtagacaaggaaaaaaggtgactggcctgtggcccgactgggtgtagtacgcaaagaacaaagtactgatggcagctgttccacccattttccagcatagggttttagccggtcaaaaactcatgcttttatcccttgaagtatcatgccgttggctcgttcgacctgtccgttgctcatggggtgcgctactgaggcatagaaaattttaattccgaagtcgtcgcaaaagtccttaaaaactccgctagtgaattgtgtgccattatcggtgataatccgattaggcactccaaacctatgcacaatgttgatgaagaaatctcgagctttatctgctgtgatggtgacaaccggtttagcttcaatccacttggagaatttgtcaatggccacaaagagatgcgtgtaaccgccgactgcctttttgaacgggccaaccatgtcgagcccccaaaccgcaaacggccaagacagtgggattgtttgcaactcttgagctggtagatggatttgtctggtgaaaaattggcaaccttcgcacgtgcgcacaatcttgtcggcgtcggacactgcagtaggccagaaaaaaccctgccggtaagccttgccgacaatggtgcgtgcggcggcatggtttccgcatattccagaatgtatgtctttcaacaattgtctcccttcctctagagatacgcagcgttgcagaattcctgaagggcttttcttgtataactcggcttcatgaataacataaagccggcttcgccttgaaatccgctcggcttcatctttatcttgagggagttcttgagaagttaaaaatcgtatgaggggctctctccagtcggcttcaatcatggctatgtcttgagtgtccgcaacttgaattgtttctttctgaggtacggtcggctcataaaggtgttcgacgaatacatcggagggggccacctcgcgcttggatccaaagttggcaagtctatcggcggcttcgttgttgtgtcggagaacgtgactaagctcgagtccatcgaacttgtcttccaatttgcgtacctcttgtcgatatgccgtcatgttgtcgtcaaggcaggaccactctttcataacttggttaacgactagctgtgaatcccctcgaactattagacgcttgatccctagggaaatcgcgatccgtggtccatggaggagcgcctcatactctgcgacgttgtgggatgcggaaaaatgtatccaaagcacataacttaatctttctccagttggggaaattagaaccactcccgctccagtgcccgaaagcctttttgatccgtcaaaatgcatggtccagtgctccatcttttctcctggaatatcctcttggcactcggtccattcggcgacgaagtctgctaatgcttgggacttgattgaggttcggggcttgaaggatatgtccaaagacattagctccaaagcctatttagcaatccgtccgtttgcttcgcggttgtgcagtatatcaccgagcggaaacgatgtaaccaccgttaccgagtgaccttggaagtagtgggataatttcctagtagtaatcagaatactgtataacagcttctgaacctgaggatatcttgttttggagtcggctaggacctcgctgacaaagtagatcggtcgttggactttctggatgtggccttcttcctcacgctcaacgaccaagactgtgctcacaacctgggaggtggctgatacatatagtagcaacggctcctgcaggtgtggtgaggctaagactggtggctcggtgaggagtttcttgaagtcttcgaaggtcttctgtgcttcgggtccccactggaaattgtctgttttctttaatagcttgaagaagggcatcccccgctcgccaagtcgtgaaacgaatcggctgagcgccgccatgcatccagtcagcttctggacgtctttctgggagcttggcggtttcatgttgaggatagcggtgactttctccgggttggcttgtatgcctctatgagacaccataaaaccaagcagcttccctgacggtactccgaaggtgcacttttcagggtttagtttcatcctgaaagcgcggatgcttgcaaaggtttcttctaggtccgagattaaatcatccttctgcttagtcttgacgactacatcatccacgtaagcttcgacattgcggccaatttgcgtcgagaagcatctctgaatcatgcgttgataagttgctcctgcattttttagtccgaatggcatggtgatgtagcaattggccccaaagggcgtgataaatgaagtcttcaagcagtcggattccttcagtcggatctgatgataccccgagtagcaatccaaaaaactgagtagctcgcagccagcggtcgaatcgactacctggtcaatgcgaggcaacccaaaaggatctttagggcaagacttgttgaggtcggtataatcgacacacatacgccattgcccagttttcttccgaactaggaccgggttagccagccagtcgggatgaaggacttctttaatgaagcctgctgctaacagcttggttaattcctccttgatcgcatacttcctgtcttgtgcgaagcggcggagtcgttgtttaataggtttagcgtcttctttgacgtgcaaggagtgctcaatcacctctctaggaattccaggcatatcagatggtttccacgcaaagatatctttattattttgaagaaaggtgacgagcgcgctttcctatttacaatctaactcggtgcctattacagcagtcttagtgggatcagaaggatctaggggaatctttttagtcttggcttcgctttctccgctcttcgagaccttggtcgcgggcacttctccttcacttgccgtggtcgcagccagtcggatatcttctcgggcagacgccatctcgcgagtttgggccatctcgcaactttccttgtcgcatgtgacggcttgcttgatgtcgctccgtagggataggactcctcggggaccgggcatcttcatcattatgtaagtgtagtgtgggacggccatgaacttggctaacgccgggcgtccgagtatggcgtggtacgctgtctcgaaatcggtgacttcgaagcagatattctctgtgcggaagttttcccgagtgccaaaggtgaccggaagggtgatctggccgagtggagttgcagataaccctgggatggctccgtgaaaaggcgcattgcttggtcttaactcggagcgaggaatctgcatatcatccagggttttggcgaagaggatatttagtgcactgccaccgtcgatgagggttctgcgaagcttgacattacggaccactgggtctagtaccagggggtaccgccccgggtggaccactcggtcgggatgatccgagcggtcaaacttaattgctgtctctgaccatcgaagatattggggtgtgtcgggctgaacagcgttaatctcccgttcagtcaacttttgctttcttttagattcataagccaaggggccgccgaagatgtggttaagctccttgcggtggtcttggaaacctgccggggggtcgccatcgtccttcttcttcgacgtgctttgttcttcgtcggagttcttccgtgtagtcttggtgtattgttccgcgaaatgcttgtagacgaaacaatctttggccgcgtggttggagttagggtgatgcgggcattgggagttcatgatcttgtcgaacgtgttgacgagcgagcgctgtcgagaagagtgagtagtggttgcaacaagttcctcaggcttacgcttgcggtccttatggttgttacttccaccccctcccgtagccggcgtatccttttttggcttccaactggagcccgactgttttgatgcgatgacggcgtcttcagctttggcgtactcgttggctttttcaaacataagtttgactgttttgggaggcttacgcccgaacttgccgaccaattcttcgtggtgaattcctttggtgaatgcggcgatgataacatcgtcagtgatgtcagagatcttgttgcgttgttcagaaaatcgccggatgtaatctcgaagagattctccggacttctgaataacattgtaaagatcgaattgtgtgccggggcgctcgaaagtgccttggaagttggcgatgaagtggtcgcgtaattcggcccaagatccgattgtaccacggggcaatccatggagccaggaccgggcggaatctgctaaagccactgataaatagttcgccatagctttgctatctcctcctgctgcgcggattgcgagaccgtagacggtaagccataattccgggttggtggtaccgtcatacttctctattccagccggcttaaagccggctggccaatccactcgacgcaggtcgttggtgaaagcggcaactacgtctaggtcgtcgtcgtggcgatccggcgaatgatgatggcctcgggctgcccggcgctgtatgatcgtatcgcgaagatcgacggggcgacgacgaggtggcgaacgaggtcgttccactcggcgctccctatgatggtcgggaggcgagtggacagatcgctcgtcgtgacccctgctcctgcgattagatcctgcgccagtgatgctgaggcttggctggtggtagtcgtgagatcgaagatgggggactcggctgccacttggcgtgcggacgcttccggagttaactgggaccgaagacgcaatcatggtcttggtctggttcaagatgttgacgacgtggtcagactgattgagctcgttctccttgaggagggtgtcgaggagggtgatcgcggcaacagcattctgttgtggggtgcggaaaaccggtgtcccctcaacgtcttgttggccgataagatctcgcgctcggcgccctgcttccaaggctcgtagccgccggtcttcagcctcctttgcggcccgctcacgctcctgttgctcacgccgtagccgttcttgttcttgtgcttgacgctcctcctccagtcggcgtcgttcggcctcgcgtcgtgcttcggtttcccgggcttggcgttgctcttccgtctcgttatcggccataaagacgccgaaatagagaggggtgtagttgtcttctaggctttcatcgaagtcgtcgagatccgggtcgttgttgcgaaagccgaactcattgtactccatgatctcggtcggacgcgagtcgatgccgggagagctccagtagccatccagctggtccgtcgaaactgagccgagtggctggaggatgacgccaacttccctggagctaggcgagatcggtgttgaagccgacctccgcctaggcctacgggatggggatgtcgtggtggtgaagacggccgccaaatcgtcggggagcttcattaggatcggtgggtaagccccatcatctcgatctgatgacgttggagaagatgcgatctcgtccgagtggtttgaagccgactcgattgagatggacttgaagtagatttcagccgcgtttggaactccaaacgggaccgagatccggctctctcccgactggtccgattccgagtcgaggagagagatcttgccgaagtcattggtgatgaagtcgaggctgccgaaccgaaacgcctgcccgggtgggaagacgaggtcgtcgatgctggagacggaacccattgcactggtcggcgaaaagcttgacgcaccccctacctggcgcgccaactgtcgaaacaagatttcggcaatactaaaaaggggtggctatcaagcttgaaaagtggatgggtttggagacaaatgatttatacaggttcaggccttcttattcaagaagtaataccctactcctgtccggggtggaaaccgccgagtgtattattgaatgtatgatctcaaagagaattggtgtcccaggaaggactcggacccctccttatataggggaaggagtctgtattacaaggtataactcatatccttatcagaatacgagaatacaaataaaatacaatcgtaaccgactaaatctcaggatatttccttgacgtacaagttaagaaacaaacccgagatacaaataaagatattctatctatattcggtatcctatatccagtctaaatataaccgccgtatagatatggggtatccataatctccacagttactttattaatccaacacacaatcgatggtacattctgctttggatataatactggcctttgaaatgtttttttagtatacatacatgtatctctgtttttttcttggaaaagtctcttctgttcgatcgaacccataagggcatgtgcctttactccccaaatgtcaatcaagtagttaaaaaaaattcaaatataatgtggtaacagcccagtatgataatctctatcactttgaagtctcaaaattcaaaaaattgaagtctcaactggatatatatacacattaaagggaaaaaagaagacattgatgaacaaaaggcttgtatataattattcatggcagaatctgtgttagctaagctcatgtgtttaaatattaaattgtttgcgaagtgagcgtagctcaactggtttgatatcttgtggtggaaccagggttcaagttccagatttgacacgaatattcgcatttacggctaattattctttcagtggtatactacgtacctgtcgacaataaagggcctgtggtgacttcattaatcttaagatatattggccctatcttctggaggtgctcatagaggtagagttgtgcgtgtgtattcataaaggtgatgagcgtgtgtgtatgtttatagagttaagtgtgcacgcattatgaacgaatatgtttgtaccatgtttctaaaaaaaattgtttgcaaacaattgtcagaaatttttacaactaattctatatatagcatttgaggaatcagcacaggttccttaatccaatcttcagtttttttctttctcattaacctaaatgataaaacaaaaagtcatgtttttgacggatgaagatcaacttctggatttgggagtgttgaatccaacttaattaggaacatagttaattaaggcatcttatatattgtagtactatcaataatactaatttagaagagggacagacgtgtggactgctggctagcagtactgtgccttatatttgaagtttgacatgaaataccaaacacgatggaagcacatggcaaatgggacaatcatagtagcttgtatccatgtttcagcggttgggtttgcaattattttgtcccaatattccatgcatatcaaattatcaatgcatgcatgcaacgaccaatgaaggaaatagcagcacttaataataatattaaggatcaatttatacatattattgattcgtagtgaaattattatcaacatgatcatagatataaattcaataattaaacttaacatatagttttaaacaagaaagctaagctaacaattaatacattaaaaatttttagaaaacatatatttaaaaacgtggagcaaataatctgtggtgaagtattacttatttagatacatgagaggtgcggtagtacactcatactaccaaaaagtagtgtcattctccttccatctcctctcaccacgcacgtagcacgtccgtacgttttgtataagtaaccactgatccaatgttttatcctcagttactcttttagtcatccctaattatacggacctaaaataatcaccggatccaatattttatcctcattcaccctcttagtcttctttgattatatgaacctgttacaatattgggtatgtgacatgttactagtataccagaaaatgtgtaaatacaagttaatttaatgggtatatatataagtatccaagaggttaatcctcgattcctccaataatttgtcatagtgtaaataaaggctcacacatgaacaagtgtatgtttgtgtaagtgtagccagggtctggtttagttctcaactttttctttaaactttcaactttttcatcacatcaaaattttcctacacacaaacttctaacttttccatcacatcattctaatttcaattaaactctcaattttggcatgaactaaacacaccccaggttatattttgcgagtgtacgtgccggcctgcaagccattttttggcccaacccgtaggccctctttgtttaggcttataagccaacttataagtcgaaaagtctaagcctaaacaaacaagcagcttttccatttggcttttttgaagccataagccactctaacactattaagccaaaagctaggttggagaagcttttttggtttatgtgaggtagatgtatgactcaactactaaacttaggacattaaatccaccggcttataaatcatataagccaataagctgacttaaaagtctaggccaataagcctaagcctaaacaaagagggccgtaatctggcccacaaaactggcatatatgactgttcgtggcccaagccatttccatccaaccatgtgacgtttataattatagaatgctagaaatgaattgcattataagcccttattatacattagctacaaaattaatcaaagacttaagattaacgatgcagtagtaataattttaaaccaaggtgatattacagtaggtacgtacaagtagtcgtattaatgtacgtacactacgcgtatactagtataataccgtcgtatttttttccgctgactcgatcgttgactagttactactactactagtagtagttctggttggtgcatctgcaagtcttcctgatctcgaagtgggtgccctcggcggggagcttgctgagcttggccatggcggcggcgaagtccacgtcccacttggtggcgttgtccctgtactcggcgaggtcggcggcggcgtcgccgtcggtgcgcagcacccagtccgacttgaacagcacccggttctgcaggttgttgtggtagtagctgttgtccagcgcccccaccgccgccgtgtccacgccggcggcgtcgtacccggcggcgctctggaacgccgcgcccatgtcgcggatgttgttcttctccgccgggttgtccgtgcgctggacacccttctgccgttcgacgtcggcggcgagcgccgacgcgtacgtggcgtctatgggcgtggcggtggcggcggcaaggcggtcgtggaaggaggagaggtgggcgacgccgatggagtgggcgccggagaggatgacgagctccccctgggtgagccccttgctggcgaagttgtccttgagctgggcgaagtcgaaggtggactccgggaggacggcgtcggcggcggcggcggaggagacgacgccgtccttgcggcccgtgccgacgtcgtaggtgatcctgccgccgctgaggatggcggaggcgtcgcggccggcgagcaccacgatgtcggcgcaggagacggcggcgcccagcttggatttgatggcgtcgatgacgtcgaagccgtccaggccgatgttgttcgccgccgccttctccgtgctgctgctgtacggcgtcttgtccaagagcaccgatccatcacaaccctgcatttttcaagaaaaaattctttattagttatgcgctccatcttaacaatttaaaaatgtattcaaatcaaatttatagttaaaaattgttatattttaagatcaagctagctatttgcccaaattaactcagtaagtgaatcacttttgaaacaccatatcaacatcatctcacaatttaaaaaggtatcacagccctgctttttttttgttattatatatccattcatgttatagtattgttcatgcatgtggttatttctccaaactcattacaagtcacttttcaagcaccacatcaacatcatccaacaatttaaaaggtatctaattatcattttcaggtgaaaaaaaaaaagaaaagttattactacttactatcaacttagaccccccccccccaaaaaaaaaaaaaaagctaatgcagacaagcatgacaagttctcttacatgatccccaattcaaaagaaaaaaaagccaaactaaaaatgccataaggcctatctagctccaccgaaatttgcattatattgcaagctaagctgcatacatattggacttcaggtttacttatgcatttagcagatccaaatctttttgagagtgtgttaattaaagacaatatatttaaagcacatatgtacgtgcaaatgtaatatgtgtaacatattacgtgtgggattgagatcctcttcaatcaaaatacacggtatatttgtcactgacatgtgggtccagggatcattggatccacatgccagtgacagagacacgtgacttcgactgcagaggatcctgatctatgtgtatgtgtctgtatgtcattcatgtactcggaaaaaaaaaagtaaatggtggttagtatacttacgttgacccagcagtcatggaacaccaaacggacaagggcggcacccacgccgggattgtgcttgatggccttctccacctccttcctcaccgtctcctcgatgctcttcttgccgtaccaatcgccgccggcgtcggccgccgccggatgcacggcgaccaccaccaacagagacagcacaacggcggcggcggccaccgccgcgttaagcttcaccatcaccatctccgatcctccaaatccttagctgaattagtaagtgtgtgtgtgcttagctagcttactagctactgcttaagtaggatggattgatggattagcagctgtgcatccagggggtatatatactgctgatcacctctcaccatcaccatgagcatcaaataattaattagctactagctgctatagttgaacactatgactatgccattgtatgggttgagttaggctagcttagctagcttgcatgcacacaccggataatatgcgtcactattttatatgagcaatatatatgcatgatgctttgcttgcttaatttgcatgcttgcagttggtagataaacgttgatgccgatcatgtgttgaccaaaaatgaaggaaggtcgacgaacgacaacgtgcatgcatggcaattatatgacgactatgaacgatgatgcgttttagtcttgggcgtctattcaatatttatattattatcttaaaaaaaatccaatctttgtattgtcagtttggcgccgctgtcgcctgataagcctagtttaattagttgcgctagtcaaatggaacgtttatatatataaatattacaagttgggacgaagttcaattcgttgccaacttccttctcttccaatccatttcgttaattcggatgatatatacgatgatcgattatcatcatctcttgctggtcagcttgacaactgtacgcgtttgtttgtcactgattaattaaatttgtagttttaattagagcaaaaattaaaggacccaacacgtttacttttgtggtttaaaattaagttaccatgcttattcggagaaaaagaaaaatatatacacaccctttgattatgatgatggatccaaaactctatatgaccgtgtaaatagaccaattaatatctacactattctaaaagaagagcaatgaatttttgccaaaaaaaatgtttatatttttactaactactctttcatatgattttaatattacaaaatagagcacataattttaatcttagagtaaatttcacaaaactacaggtactttgcacaatctatcacaaaactacagatttaagaaattgtctcataaaactatagatttagggaccccgttatcacaaaactacaggttttagctctccccgttaaatctaccgtgacctgacaggggtggcccacttgcagtctcaggaaccttcaagatggttgccacatcagaaatcccatgtcaaatgcgtgcgtggtggaacggttgtacgaagaagttgcaggatgtgtttctatccctctcgtggacccagaggtggccaaacgggcggcacggcccggcccggcacgggcacggttccggcacggcccgtttcggcacggcccgttaggcacggctgatgaaacgggccgtgccgtgccggcccacgtgccgagccgccggcccaagcacggcccgtggatggccgggccgtgcccgtgccggcacggcacgcccgcggcccacgggccgttcggggcacggcggcccgtgtgcacagttttttttttaaaaaaaaaaaagcaaaggaaatgtataaggaaaaaaaaattaaaaatggaaataaaatgtttaaaaaaaagtaatgatttactaatgttaaaaaatgaaaaaatggtatttaaaaaatggaaataaaagttttttaaaaaagtaatgatttgctaatgttaaaaaaaaagaaaaaatggtatttttttgttgtgttgaaaaatttaaaaatatagattgtgattcattattatgaaataatttaaaggtaaatccacacttgcgaaaatattgcaaaagaatttgttaaaaatagtaatgacctttattgatgtttatatcattacaggatacaatgatacatgctgcctcgttaaaaactttgtcatgtaaaaactcataggggaaaatgagaaaaccatgacaaagaaaagagtacagctcaaaggtcagaactacttctaacaaaattctactggggttggtctggatccaggtagagttgctcgaagtgggcggccaattcttggttgtccgcagtgtattgggcatgttgtcgagcaagctcccagtctttaacgcttagtagcatttcgacgtggtcgctgcgcagagtcgtcctccggtcttcgatgattcggccgcatagactgaaggccgattcggaggacaccgtcgacacgggcaccgtcaacacatcccgtgctagttttgaaagcacaggatatgttatcttgtggtcattccaccacccgaggacgttgaaatcttgtgcttcgtggtggatggcgtcgctgtccaaataaccggacaactcttcggccacaacatgcgaagaggcgtctccacttgtagccgacgaactgccaccaccttggattgaacttgaagacgatccaccccaaatcctaccccactgtatcttcttcttacctgtagtggggataggagggggtctccgctggcgaacttcctgaaactttacttcatatcttccaaaaacctcatataatttacgtctaacctcagtataaaaagaactataatctacacctatagtatctccaacaagtgataaaatagcagacaatccccttaatttacacctaggatctaaaacaaaagcaagagcatacaacataggtatatttttccaatatttcaaatatttttgtttcatgtgaaagacaggttcagttagaacgtcatcattttcgtattctttaaataaagtaacaatttcaagaaggttgtgcaaaattatattagcagttggataataaacatgtgacaaagttagagtacaatcataaaaagtttctagaaattggtaaaatttttggacaattgcccaaacatgctcgttcagtactgaagacccgtcactgtttcttgggccaccacgtgactgaacaaaatcagaaagtaaactactataaggtaaaacaacttttaacattaaatacgttgcattccaccgatgctctgcatcggtggcaaacttacgagcttccacaccggccgcattgcaaaacctcttccatgcagcaatccgcgggttagaagcagttaaccacgcgattgcttgacgaacagcatcgatgtggtcacctaccctcttcatgccagtcttaacaatcaaattaattatatgacatgcacaacgctgatggagtagaaaagattgagcatacacacaaaataaaggttgcaatatttcaatagctctagaattagcagatgcattatctagggtgacagcaaatattttatcagcaagattaaattcattaattacttccctaattctttcagctatgttttctcctgtatgtgagacatctattaacctaagccctaaaactctcttttgtaattgccaatcatcatcaacaaaatgaacaactacgctaagataatcctctctagctctactactccatatatctgaagtaacacaaacagagaaagtacatgtactaaacagttccttaagtgcagttgcttccttgtgataaacattctctaaatctctagttgatgtttgcctactcacagctttaaacctagggttatgagattgctgaatgtaatgttcaaaagcaggggactccccaaagttcaagggtaaatcttgcctggcgattaaccggacaagagattcccgagcaaccatgggatcgtactcccaactgcgtaccgtaccgtctgggtttagcataagttgctgctgccggagttgtattccttgcttcttggcacacgactctgcatggcgcttgaggtgacctgtaccaccagaagaacgagcagataaaatttgcctacatattctacaacgggctttcgatacctcccttccgtcggggcatgtttcctttatctcgtcgaagctttgccacacaccggaggttctcgatctcttcgagccggtgtgtgtcgaaacacttccgctcgcggttccggaaaatccttccgaagctgtcgcctcctgaaccggtacctcctcaacgacagccgtatgaaccggtacctcctccacagatggtggagttggagccgatccggaggtaccgtcaaaccccgacatgtagttggggtcgaaatcacccaaggtgaacgacggtgactggtatggaaagttcggatccattctgaaaatttaaaccgacataaacaaattttcgaatatttattgaattcacaaacacaatacaaataatacacaaatttgaatattacttacatctttccaaccgcgagctcttcaaacctctgcgatcaaactgttgaactacgaaactaattttgatttttgacaaaatttgagcaaattttgtcaaaatcaaaaaaaaaaatgcacacttgagaacaaagagagcacttaaaacacttgagagcacaagatgaggagtgtgggatgaggagaaatggctggggttcatgccctatttatagggcgaaatttgagattttttggaattttttcggaatttttatgaattttttagcctcccaacggttattttcaaatttcaacggtcaaatagccgttagtgccacgtgtcgccgtcccattggaccgccgcccgcctgccgcgcctgacgggccgccgccgtgccgtgccgggccgtgccgcgggccgtgccgtgccggcccgctacagtagccgggccgtgccgtgccggcccgcgtgctcggccagcggcccaagcacggcacggctaaacgggccgtgccggcacggcccgttactgtagcaggccgtgccgggccgtgcctgctacaggtccggccgtgccgcgcgcggcccgtttggcccggcccatttggccacctctacgtggacccattcggtggccaattcctcactttccacgcgtgcatcgtcgtctcgcgtcttcgcctggtcaccgcatcgttcctctttggcctgaagaaaccctagccatagagatggcatcggcgaatagcgcgagcaagaagcgaagcataggtgcaccatcccagcaacagggtagcgtgagctgtgcattgggcaaggtatgcaatgtatatactagtggatttgagtgtgcgattggttttgattttgatttttcgaaattgggtttgatttggtgagttgggatcgaatgaaatctttggggtcgtaggaggtaagtctggatgcagtgcccttatatttggaagaaacagaatggcatggtgaggagaaaggaactcgattgcgctgcaagcatggattgtgtctagcacggagggtggcttgggaaggagaagacacaggcaggaggttcttgggctgtccattagaggtttgtttttttgttttctttgattttgttttttttttaattttcccccacaattttgacctgattttgttgggcttattcaggaagacgaggaccaatgcaagttcgttcaatgggtggatcctgaatgggactcgagggtgaagaagacactagctggcatgtgggatatggtggaccgtggagtgaaacgtgaagcaattattcaagctgacatgtttaaggcttttgccctgaaagaccgtttggagaaagagaagaatgatgagttagcccacaagaatgctctgcttgacatgagggaagcacaattgaaagaactgctctacaaatctgcctccgaagcaaacgagctatgttctccctcctcctaggttccccccttcatccccattattttgctcgttcccgcgtttcctctcttttgccgcccagggcgcaggaggactggcgtggttccttccaggagaaggaaaagtgcgtgcgtggactgacgattcaaccggaggaggagtgacatgggatttctgatgtggcaaccatcttgaaggttcctgagactgcaagtgggccacccctgtcaggtcacggtagatttaactgggagagctaagacctgtagttttgtgataacgaggtccctaaatctgtagttttatgagacaattttttaaatatgtagttttgtgatagattgtgcaaagtacctgtagttttgtgaaatttactcttaatcttattacatctctcaactacaaatttatcctgaaaagacgtctacacgtacacagatgaattgtactctatctataaaaaaaacatcacaatcgattctttccaaacatgcataattcatatttatttgtagcaaaacataggtattttgtttagtagctatattcaaataaaaacacatttatagaaataggagaaataattatatattgactctaattctgctttctaaatctaggtccgtggaattgtagaaaaattctatagttttttaggctttcccttgaaatggaggattttcaaaaggaatttcaccgaaactaaactaacttatgtaaaattcctgtaattttttctcacatagatcgtccttaaagtgagctgagcttacaacaataatatatgaattacaactttttccacatttgataacatacgactgattgtcaaaatattttcgctaggtaatggactaatagtggatatcgacgcagcaccctattgctacccgcgctaactaaattatactattaattaattagttcagtcattccatctttcacggagaaaaacctgctcttgatcgacaagaagtcatctcagaagtcagagttaatctgccagtctccaacttcttctgttcatcaggccaactgcaactaattgggtaggagtagcaaatatatgttaattaatttggataaaaaaaattggttggtagttccataggcactatagctgaattagcgccttaactcttcctcaacctgatagtaggaaaaaaagtccgagcatatatagatataaattcgaaagtggattccatgtagatagcatatccaatcaaagtggtagaatgatcggctggaatgctggatgcatgtgcaagggttagttgcaactagctgatgaactaatctgtactagattaaattcatcaacttgtctattgtgttcttaattatgtatcttggagttgttttattagaatctgcatatagttgtctgattgtctccaaaatgacatgctcaattaattactccctccgtattttaatttatgacgccgttgactttttaaccaacgtttgaccactcgtcttattcaaaatttttatacaaatataaaaatacttatgtcatgcttaaagaacatttgatgataaatcaagtcacaataaaataaattataattacataaattttttgaataagacgaaaggtcaaacgcttgtcaaaaagtcaacggcgtcatgcattaaaatatggagggagtatatattaacatatgatttaagtattccattagatcgagcacatgtacaataaccggctattagccttccacatcagctgttgcagtaagctagaggagagagttgagacgcgagagtgcaaagccgcaggcgactaaatagtctcaagaattaactccaactaagaaagagtgaaaattaagcaaaattttagaataagcagctgactgattattaggcttgctcagtaatatcagttaacctaatgtacattgaaccggaaattaatcacctagaaaacaagagaccgatggagggctcccggagaagaagaatggtttttacaattcaaataattaatgcatgtgcaacaatattctaaggcattaatcgatgttttattgagaatggtatatttgtactgataagaggatataatatatattagtattatgcttttcttgaagtatgtatatgatgatagtggatgtaggtaaacatgcacttgggttgtactaatgaaattgactaatttctcctctcatttttgataatattttatagttagtacctttcgttccatttcatcctccctgtaatatattcaagaaccggatctttcggcacgttctctcaacaatacagaaggaatcgttctattccatctttgtcttgccttcgtcgttatccccaatatgtcctaaccatagttaatactcctaccatttgttttcaaagttgctgttaagtggcctacgtgcaaattaaaatggacaagacaagtcatttcaattcgttggtacttgagcaatatactccctacgtttcaaaatatttgacaccgttaacttttcagtatgtgtttgacaatttgtcttattcaaaaaaatttaagtaattatttattctttttatatcatttgattcgttgttaaatatacttttatgtacacatatagttttatatatttcacaattttttttaataagacgaacagtctaacatgtactaaaaagtcaacggtgtcaagtattttaaaacggagggagtactatatagttagagccctggagctgaaatgtgctagctccataatatctatctcgatcgatcgtctgatcagttgtcgaacggaaaaggatcgatgggcgttcctgtagtgtcggcaaggtagatgcattattgaatcttagggccgttttaaattgaagctgaaatgtttttaccgatagtttcaatactagatagggtgattttagtccgaagccaaatcattggcattgccgatatccaatttgacactttctaaattcttatcaaaattttactagcttctaattatatgttggcctgctcagatttttaaggtgctcgtaggggtatggtgtgtgcgtgtgtttacaaggggtgagtgtacgtgcgttataagcatttaagtttgtaccgtgtttctaaaaaaatatattagcatcaaaccaaatacaactttacactactgtatctatatttcctaaacagttcaactgttgttggttgctctattaaaccacaataaaaattgaagtccacggtgagtagctgatagacaacgaaaaaactcaactaagcaacgaattgaaggttaaacttttatattcgtgttttaacgatttaaaaaccaatgcttaaaagataaattataatgagaaaaaacacaaaatcaactgtaaaatcaaataataaatttaaattttagttgtgaccgattagataataaccaggcaatgagagagaaaatatagccacgatggatttgttttaacagagaaaaaaaaagcttgtgtacatgtgcaatatatagtcgaaattgtgaataagttgagagaaaactaatgcgagatggattgtgcgtggatggggagattaattgctcgatcggtcgcgagccatctagtagttagatcgggaggcaagtcgcattgcaagtaagcgaagtctgaactctgaatttaacatggaaaattcttcagacatgctcatcagatttcgcggcaagcaagcaaagctatgtaggctatggcgacgagttggatggtggtcagatcatcaccaattcccatcttctctgaaactggagctggtccacttgccgggaagcacgcacataccccacgtgctgaaactaatcgggatatagtggtggtgttcctcctcttccaacccttcttctacttgccggcgctccttgttctgatatacttcctccgtttcataatataagtctttctagtattgcccacatttatagagatgttaatgaatctagacatatatgtgtatctatattcattaacatctatatgaatatgagcaatactagaaagtcttacattatgaaacggagggagtagcaccactgcaattcttctttccagcgattggtcactgcatctccggatttctactcctagccgccggcagggatacctccggatatgggaaagaaaaaggttgcgtctctccggatttctactcctatagtcgccggctgggatacctccggatatgggaaaggaaaggttgtgccagcctagtaaaaaaaccggaccggcccagcggttgaatcgtaaaaccagaaccatgcctctcaccggttcggtttagtagaacggacggctcatgcatttgacccggtaagaaccgagtgaaccggatggtttttagtgaaaaccggcgaaccgggctaataagaaccggcggttcattgtaagttgggctaacgcttgggctagccttgtaaggcccatcatcctacaccacggcccatttatattttatgcaaaatataagagaaagcatgtgtgggaagtgatttgaacccgtgacttgcggattgagacattgggcctgttcactttgatgccattttcaaccttaccaaattttggtaaagttgcaaaaaaagtggctacgggcctgttcactttgatgccatttttaaccttaccaaatttttggtaaagttatcaaaaaagtggctacatttagtttgctgccaaattttggtaactatataagaaatcctgccaaaattttggcaagttgtcaaaattttggtaactatgctaaaatttggtaaggtttttttttggcatcaaagtaaacaggccctacatttagtttgctattaaattttgataactatataagaaatcctgtcaaaattttgacaagtttaccaaaattttggcaactataccaaaatgctaaaatttggtaaggttttttttttttttcatcaaagtgaacagacccattatcaagtttaccatattgctagcaaactcattttttttaatagaaaatatatagtagccatatacctccgttcagcattgaaccggctgactcgacggtccgatcggtgaacagtaaaccaacgagatcactaggtcgatcaccgtggtcttcttcgatttctccggcgagttctgacttctatccagtggcggaccaggtcctgggccacttaaggctatggcctgagacctgggtacgagagcccacattttcaccattctcttggaccgaataggtagtgggctggtcaggggctggcccaaacctgggtccgctggttcgctggcctcgggaataagatcactttgactccctcaactgaccacctaatctaaatcgtatccctcaaccgcaataacagaaatctcgaccccccaaacttgcaaaaccggtgcaatttgactccctcggtggtttgggggggtggtttcgctgacgtggcgcctatgtggtgatattgaccgagtctacggtccacgtggcgttaacgtggcacttacgtggcagtagaattaaaaaatatttgtgggacccattagtcattaaaaaaaaagtgggcccactaacatgtggggcccacatgtcagtcctttcttcttcctcctccctctctcccttctctctcaatctctccccttcttcccatttggccggcggtcgagagggcagcaagagcgggggccggcccggctcggcctcggtggggaggcggtggcgcaccgccggggtctaccgacaatggaaacggcgcacgaacgaggggagcggcggcggccatcggagcttcttgggcctcgcctcggagtccccgtcgcatctcgccattcgcagctaccagctgctccctccctgtccccgccgcccgtgagatcccgccatggaggtgagcgccgcctctcgtcccctttttttccttttcttttgtttctttgttttgtttgtctctttcgatttgatggttctcggcggaggaggtggcgttgtagtgtttgccacccctggccttctccagccccgtcaccccgaccttctccaacggcctccacatgaccccccgcgccagtcgcttcgtcaccgacgacgacctcacgagccgtcggagaccacgccggtaaccgcgaggatgaggatgacgagcggcagcgcgggccgccaccgccgttccactcgtcctcccattgccgcgagtcgccgctgccgttcccctcgtcctcccactgccgccagtcgccgccgtcgttcccctcgtcctcccactatcgcgagccgtcgcggcggagccaccgccgccctagccgccgaccgccgcccctggtccggttctgatgtgccccgatgccgccagccgccctcctgcccgtcggccgaatgggaagaaggggatagaaagagagagaaggaagagagggaggaggaagaagaaagggctgacatgtgggccccacatgtcagtgggcccacagtttttttgtgtgaatgactaatgggtcccacgtatattttttaattctactgccacgtaagtgccacgtcaacgccacgtggaccgaagactaggtcaatatctacatgtaggcgccacatggtgccatgtcagcgaaaccgcccccaaaaccgccgagggagtcaaattgcaccggtttcgcaagttcggggggtcgagatttctggtattacggttgagggatacgatttagattcggtggtcagttgagggagtcaaagtgatcttattccctggcctcgtcgatgtgtgttggagtccagcttgattagcgaaatgggctgtgatcccgctggactgcacatatgggccatgtgtctcaagcatggcaatttgggcccacaattgggtctagatgattaatgggccggtctaaatttcatgaatggaagtcacatttgagcccaacacgtttctcatggtccaaatggccctaggcttgcactctagatgacagcaattatatttgggcccatcgaatcttcctgtggatgggcccaaatataattgctgccatctagagttactgtgataataattcaagaattaacattgtgccattgaaatcactagtatgtttaacatgaaggagtagcataattttgtgcttcttttcttttcatttcatgtttcctttttgctagaagcaaattgacatccattaaaaacagaggatctggactagcaatgacagtagggcttgctcatcacagttaaaactggaaatggaacataattgaagtggccagtgccatatatcgatctttctgtaatccctccttattacatgaaaatggagaaagttttggatggatgaatacaaatccaatccaaaccataccaaaaaaaaaaacaacaactaattaactttctttctttttgacaccaatagacagagaatgcaacaacacaaaagctactatacaccatgaattctcgctgtactggtgttctcacatacacatgcgcgtagaattcaacacaaaattaaaccaattcaacacgagatcgacgagcaccaacaaatcaaaaaaaagaacaagatacacaaaattaaacgacgatgatgaaccaaccatgcgaataatgaaacaaagaattattgaaaatgaggatgcagatgagagctcaagatggaaggcttgatgttgggatgatgaggatgaagaatcagtagtggtgggtgttgacgcggcggcaatggcggcggatctcgcccttggccttgggcggcaatggcagcttgctgagcttgacgagcgcgtcggagaaatcctcgtcccagagcgtgccattgtcggcgtactcgtggacatggccgcgcgccttcttctccgtgagcagctgccaatcggagttgaaggtgacgatcctcgcgaggttgttgtggtagtagctgttgtccaagaactcgaacttcctcagcttcgggaggaaggacgggatggtggcggcgacggcggcggggtcctcgtcgcggacgttgttgggcacgatcgggtcctcgccggcggcgcacttgccggcgaggaggctgcggtatcccgggaggatctgctcgggtggcgcggtgaggcgggcgcggagggaggagcagtggccgacgccgacggcgtgggcgccggagaggatgacgagctcctcgatggtgaagttcttgcggcggaagttgcggatgagctcggagatggtgaaggtggagtccgggaggtcgcgctgggcgtcggcggcgcgggagacgcggccgtcgaggcggccggcgaggacgtcgaagtggacgtggccgttgctgaggaggatggaggcgtcgcgggcggcgtagatgacgatgtcggcgcaggagaccacgcccgggcaccgctcctccaccgccgccttgatctcgtcgatgagctcgaacgcggcgaggccgatgttgatcggcgccgtcttctccgtgtgcgggttctccgccgtcgggtccagcagcaccgacgcgtcgcacccctgcaccacccattccaattcaaatcgatcattaacattcgcgcgtttttttaaaaaaaaaattactataatcagcaaccaattgagaattcaaatttgtcgtgcattttttacattgtaattaatcaatggcgccaaacaattcaaatacaaaaagttttcataaacttgaccaaacttaaaattgtttgcgtggtaaaaaaaggtcaaatcgttatactaaaatttgttcgaattttgaatttttttaggcagaaatatttcagaatttctgcattgtacaagtagaaccatagtaggataagcaggaatgatccataaatttgactggtaacaattagatgttttgggattagtgaatatcggggtaagatttaaatgtatgtcataattatgttagctaacggtaattatcacatgattagacaatacaattgataaaaaattaagcacgcgcaatgtagtcaactaataatgccttaaacactctgcatatgttgaagttctctatataccccaatttaggtagttagtcaattaacaatcttccacaccatattataagacgttttttttgacctatgtcaaactatatcaagtttgaccaagcttgttaaaaacttagcaacatataaaacaccgaattagttttattaaatccataattaaaaatatcattatattaaatttgttttgtattaaaatgctacttattctatagttgtttcatccttctttattctctcaaccaatgagcctaacactactaggccgaatcataccgtcctttggaccaaacatctccacggaatcgttcaattaattccacacatcatcgatctcatacctcctactcttgttccaccgtccaaaacactagtagttaatactaatactgttaactatatgtgtgcttggcaagtcatcctatctgtacttaagcacagttaggatctgtttgatagagctccaactcttaaatttagttttaagagttggatttggagtggagttgtggaacagtctaaatctagctccacctctctaatttattttgtgagaatgcttcaaccagatctactcttattttagatggagctgaaactgtttcgttgagctccaacttttaaaagatggagctgaagctatggcaaataaacctttaattatattagagccccttgagaaaaatgtgtgatagatcgatcgattgatcatcgtcagctgagttgttggaaaacgatatgcacatataattgcatatgtagtgtcggtgagagggcaaatgcattattggttcttaattacttgaacagttctattgctgctgatgcttaaaccacacaacgaaaagtccatgcatgctgcaacttgtatatatgtacatcatcttcttttattattttcttaaaaagaggagaacaaaaagaaagactaccgatgctaccgaccatttcgtctataatgtgctcattcaattccgtagccactaatgacctatgttgtattcttgcatgtctaaataaaatagtttcactctatatttttagtctaataacatgaacacaaattggctcgcacaaaccaatcaaaatatgtaatttaatcagaacaaatgcaactccaagaacttttagagccaagtaagctaggatgcttgcttggatgagagtgctgaaactctgtcagaacatgcactaattacttgttaatcaaaagggtaagtaaaaaaaagttcaattaattacttttactctcttttctattcatgactgaggagctagtggtaccaattattggtcatgactctggagagatataggtatgctttctctttctcaacacagtgtccccttttctctcccatatgtgtccttttcctctctctctctctctctctctctctctctcctagacaatcagcacaagaaaacaatttgccccataggaagcaaagaagctctggccccaagcacaatccaaacataatcatatcccactaattgagcttacctagaaatcgaacaccaataaaatcatgtttaactactactactactaatatgatatacatgagagtctaattaattaattatttgtgtgtatgcaaaacgtactgatgatgcatgaaccaattgaataggtagttacatgttgcttgccaatcacagcaacatcagcagcagctgcatctggctggcacccatgcagagaaaagaaaggagagggaataaactgacgacaagggcatagtgtttctgggaccctagagctaattaagctaagctaatgcagcttaattatgtgtttagctaagcagccagaagggaaaaaaaaaggtgtagcatgcattgacagtccaaatgatggacacaaggaaagtatcacattcgattccagcatgcatgttgcagatgctgaattgctggctaccaatctctctctctctctctatctatctatctttctctctctaatctacctttagtttctctctcttgccatgttggattagtagtgaactagtagaagtcaagtagctcacgaaactagcttagcttagcttagctaggtctccattgaacttttcttttcttttgtgcatggaaagaaaggaagagaaagaagaagaaactgtctctggatggagtgatgacagtgtgtcaaatgcagtggcgtgtggctgctaacttgctgataactatctgtgttgatcttgacaacaaccaaccaagtggggttcagagacttaactaagaagctgtgttatgtatattagcttaagatttgatcatttctcatacacgcttatgcggcgacgacgacgttggtgtaagataagatgctgattgagtagttgcttagttagtttgtgtaaatgttgctgttatttccatcaagagtaaagttgttttccttattaattaatcaactaacctagctagaatgtgataagtttcctcgatggatcgatcacctgatgagtgattctgaagaatgaaaccaactgtaacacaactaaactctgcaaagccaagttgtactatgtacacacacaactaactaacagttaagctagctagtaaaccttagctagtacgtactgcaaatgtagattgatatatatggatggatcaatcatgagccgctacaataattgatatgcaagaaagttaattatctgattgagataattaccctgacgaagcagtcgtggaagatgaggcggacgagggcggcgccttccttgcgattcgccttgagcgccttggcgacatggtacctcaccacgttctccactccgggacaactcttcttgtagtaatccacgctcagctccgcctccaccgacatcgccgccgccgccaccaccaccatcaccaccaccgccgccgccaacctcatcgtcatcctcctcctctccggcaacttaatttctcgctatcgatgggtacgtcgccttttctcgctctccggccacgcgccgcctcgtgtgtagcggtggttggttggcgaggcagtgtggagggaagcagagaggggggtggagaggagaagaaggggtggcaggtggtatatatatcgttgcacgatcgatgggaaattgcgttttaacggtcagctttgctaagtgatgatgtgagcggggtcatcatgtgtgacagtgaagtgccaccgcgcaaaaacgcttgtaatttaactttaattcgcagatcagtttagtttacagagttttcagagagaaagggagagagtgatgggctctgatgcttcagtaagacagtaatcactgtactgcttcttcttcttcttctagtaggagtatatcttaagaattaagaagaatgaggagattagaagaaaaaggagagaaataaaagtaactaaaagggttcgatttatgcttgttactatcgcgccacctaactgcagttggggcgttgacggatcgatccgtgcgtgccatactgccatggcgtgtcactgatctctgatgtaattcatgatcgatatcaaatatggaggtagtacgtacgtcttgccgcttcgagaaatgcgcgcagcccacgccacagtcgccggccggaaccccttgccgtcgttacgccggcgtgtcgagggggccagcatatgtcgagattacgaagttacacacaacgcaatcgcccagaccgacttatgttaggagaagggagaaaaagcaaaagaaacttagagaaactacggcggctaaaaacagactccaagcggcggaaggcaccgagccatgctacactcccaacaaatccccagaaacagcgacgccagctaaatgccacatatggctctatgaatggatggactccagaaccactgagactaaagagagagtggatcaaggaagcacccgtgtcaaatatattgacgtgcaatccttttgcgcattcgtgaaaaaaatattatgaagttatcaaggaagcacccgtgttaaatttataatttaaatccaagtagattgattccaccacaaggaatctaaccagttgagatacgctcacttcattaaaaaaaaactgtacaatttacaagacaagtgtaaatattaagaacaaagggagtatgatttatttatgtacaacaataattatcgaattacttgtatacatgtgcgccgactggtttcgatataatcctaccatctccaacataaatatttaatgtttatgataatgtttggtcaagcttttaatattttgatcattaaaaattttatgttggaataagtttgtaaaacacattaagtttatgatatcttgcttcctaattaagtcaaatatagacatataattacttttgtatttttttaataaactaatcaatttgagaaatcgtcgatggtttgagttttaaaaatcaaatattgtactaaacatcaaatatttttatgagtatgaaacatgttatgttcatacaaaagtacaagtgaatttaccaatcgtcgccactcatgaatagcttgatatttgctcattagcctctccttctccttgaactccggtcggttgttggcgaggcgctgtcggtggcacaagaaaaccgtgcacacatcacgcattgatcgatacatctatcggcatttctaactggagctagcataaggttaaatttcgatccaacctcaattacgaattcagatggatggatggatgcaatcgtgttgagcatatttcgaatcatatcctggtggttgcagagttccattccatcccatcgtttttcctttttgttgagatcattaaacaacttaatttctcgtttctttgacacgcacacatagattaatgctctatgtatatgtacgaacagtagtgactccatgatccgtccatgccaacgtccctccctgctggccctttgccttctcaatttttagtcgctttcgtgcaacctccttgtactgccatactacatatgcattctctttgtctcggtcgtctctctgattaactagacgacacctcgcacgttacacgggaaattatatgaaacaaatatcaattttaactaaatacctataatatgtatgatatataaaagtgatatttttttttaggaaggggcaggtgctctgccaatttcattatagaaggagagaaaaagcgaaggttcaccgacaaatggtgtcacatagtaggaacatgagggggtacaagaattttgaaaaaaatacaaagcaactttctactggtctattggtttagcttctggcttctcgatgtgtggcctcacgtacgcataggcttctttacaagagtaaatgatgttagtgggttgtaactatataatacaggattttcaaaagtattccgtgtttatgtatactccctccttcatgttacgaataagttatgtattttgtaaaatgcacaattaatgtgtctgtaaattcttatcatcaatatctttgcaatacttcgattcaattttgaaaacggtatggctagatctgttttggggtacattttaaaatatattttgcattttgtactagcaattaaaaataaactagtgcataggtgatcattcatatcactgtagtacaaactaaacgccactatttataactgaatttagtagtaccatatacacactcttccaatcaatctactcctacccatccattttttcttgtctgtatacatatcctgtcatgcatggcagattgattgcacagaaagtaagcaacagcagctgaattaaggccatccagaatgatgaacagtattatacaatgtggtaattagcctttatttggaggccagtacacaaacacaataatattcaggctcatcaatgaccagcaagtgtctgcaaatggttaggcacattacatttggccgtgtcttcttgctgtatgcataaactagtttagatctactaatatatactgttcatgatgccatgcacttgcaggtagtagctgcaggtgacatgtcaatctcatacaagtaggaatatatagcatcatggaaatattaaaaacttaacgatttctctcaagtcaatattataaatatagatggaactgatctgtcatctctcttcctcctccatctttaatcaatttctcccgttttcttagaccgaccttttgattaatcttttcttgagttctgcaatgccgatgcagacacgcaacttgtttaattcgtgcctgaattgaagcctagtggctagcaggcagctgcaagcaagcttccaattcagcacaagtcttcaattcagaacaagtcttcagaacttaacaaccatccttggcaagctagcaagctagtagatgcatataaccttaattggccatgaaaaaagtctaatcaaaggtggtccatgaataataattccaaagtttatcaagcacgcaggctgctctccatgctagctcggattattccaactttgccttgatattgaatagactgtgcacttgcttttgctttctttgcaatttgccatactgctagctccagctatatttgctcatttttaattgaagcctttgatacatgctggagtattaatgaattaaactagctagcattggggggctacaacttagttaattagtagttacatgtgatccctactttatatgtagatacttagatgatcagtgttagatactaatattactcatgctgtgtacttgagtaccactttgtttgattagtgttggagtacagacagaatattcatcatggaaagtaggtaggaggagtacatgggagaaaataaattcaagggttgtcaggcccaacagagattgcatatttagtagaggacttaattagttttttttaagtaagagcacttaactatagataatttgaccatgccaaaaaagcttgcactaataattaatgtacttccctaaaaaagtttgccccagtaatattagtagtagtattagtatttgatagagatgctccaactatgtagcagatcaaaatagcagttttaatttatagatcatgtgcatcaattcatatagccatcattctttatgggtattatactccaacttgtaagtgtgatacttaccttaatctgcagtaatgatggtgccgtgtgtatatacacatctcctcctatattagtcaaagatttgtgtctatgcaatgtatttgtacatctctggaatggttggggcaggatcatcttgacactgatcaatgtccccttgttcgtttgtttatttggatgcaatgtttctttctttccaactcttttgtgcgtgtttggacatgatttagtaaaagctgatgatgcaatatggaccattcaaatcaatcaaggaatttggattatgagagagatgatcatagaagccggggttggtccattcctctagctttcgccatttttccttttcgtaagctagaacatcactgttaggaccatcttgggttactatgataatgtaagagcaaatagtagctaccagactaagatccaatttttcaattaattattaattaattaaccaaaatattaatggggatagacctagtgtaatgacaaaattaattgtactggtgaatgaggagatgacaagctatataggtagatagagaggttgttgacagcagtaggaagtactgaagtggcagcttgttagaaagaaaccgatgatttaattttgtaattagggcttcggccgacacacggcgctcaggtaattggatgaattaattagttttaatttatacccatccatctatataagtttgtattctgtttcgacccgtgtatatgtgctggtttcgatttaggcacattaattaaactcaagtgctcgtttggtgaccttatatatgaaaagactatacaggtttacaccagcttatttcagccattgcacatttcagattaacccttttatataaaacaagaaataacttgtaattaaggtcagtgattacaatttcggttcgaaatctcggttatctcagccaaattttttggtttttctcaaaaaaaatttacaaatttgatcaaaatatagtcaaattatcaattaaattatgttaaaatttttaaaaaaattcggtccaataagtgccgaaaatacaccctccaggttgataatacttatcattttgaacaagagcacagtctccaaaaattaaccattatttttcattataatatgtataaaagtgttaacaaatatatgattttattaaagtactttttagagaaaattccctacatacccctgaaaagtttcgcgatctcttctatacccctgagttttgcctcatcccctacatgcccttgagttttcattttgatctcctctatccctattccgttagttgaccgtgagttgactgttaaatttttctaaaatgaccatatcgcccatttcccattcttacagtacatgttatatactctacttcataattcacaatgtgaaaaattgtaactcatgataaaatcaaataggacataattatttattgaaaagaaaatttaaactattgaacaaatttattttttttgacaaaatccatataagagctttagctagaaattgtgaaccaaaattatttatttgttgggttcaaattttgatgaaaacaatgtacggatatcataaaagttaatttaaaatttatttttttttaaaaaatgttgtcaaataattatattccctttgtttatttacaaacagatcttttttcatataataattgtgtttttgtcattaaactagcacataagtataagagaggggtaatatagtcaattttaataacatttaacggtcaactcacggtcaactaacggaattaatgggcatagaggagatcaaaataaaaactcagaggtatataagggatgaggcaaaatttaggagtacataagggagtggatgaattctcaaggatatacagggggttttctctactttttaagactaatctatacatatagtcaccattagtcactatatgtgaaagataaatattttaaaaatgattcataatcaaagattataaagtttgacctcacccttatttaaaacgataagtattattagcccggagaaagtactgaaatttcggccaaaatcgaaattgaaaaccctgaatcagatattatgtgtagtgagcccactcctacagaagagcagagagctaggttttgtggatttggaggctaattgtcttacacgtatgctagcttaattaactggtgatatgaaatgtattgtcggtcacagtgttgatacctagttttggtggtgattaaatgatgaacatgtgtacctgagatgagcttaactgtttttgggtaagtacaaatagagacaaaatgtgcgtgagacacgcgtgtcatatatatctacaatgtaacaaggtgaggtgttgctggctagtgtggtagcagcatgtggttgtacatctccatttcttgattggcctggcccacccaccattggttgctctcatcggcaaaacactattttgcactttcctgtgataagaggggatccatcagttggttagatcagcatatgcgaaatgctctcgacttccaaatatagggagggttcagcaagccggctgcaacggctaaggctacggctgcacacggtgagtgtgacactgttcataccggttacggtgcaaccatgaaagtagcagccaaatagaccataatgtaatgacttctaaatgtatcaacatttaacactctgagtgtataactgtaatgacttttaaacattacatttgatcatctgtcttataaaaaaactatataaatatattatttattttgttatgagatttatcgttaaatggactttatttctttttttttgcatattttaatattttaaataagacatattatcaaatattatgtttaaaagccaactattacagattcaaaaagaaaatgatatattaaagtacaagtgaattatccctctccattcattaacagatgcaatctgatatgatattaacgtcgtatcaggttgcacggaatatagtcatattttctttttctgaatactgacacatcagtggaaccagccatcataataccattgaatctaatttaacccgattttatgtatccggtatcgcgtttagggatacgatttaaactcgacggaaatacaacgaatgtaaagtggacttatcctgcccgaatttacaaggcccaagcccaaaaggcccatccaactcacatcgggctacgtgggccgcccggcccacacacaacccagaaaaccgccttactaccgacaatgttagctccctctctcttcctcttcgtctcgactctgaactaaaaactcaactcctcccaaaatccctcgccgccgccgccgccgccgccgacgacgacgacatgggccccaccacggccaccgacaccggcgcgaggatgaagcccacgaccgtcgcgtcggcggtgcaccgcgtccagatggcgctctacgacggcgccgcggcgtcgagggagccgctgctccgcgcggcggcctcgctgctctcggggccggactacgccgacgtcgtcacggagcgctccatcgccgacgcctgcgggtacccggcgtgccccaacccgctcccctcggaggacgcccgcggcaaggcggcgccgcggttccgcatctcgctccgggagcaccgcgtgtacgacctcgaggaggcccgcaagttctgctccgagcgctgcctcgtcgcctccgccgccttcggggcgtcgctcccgcccgaccgccccttcggcgtctcgcccgaccggctcgacgccctcgtcgcgctcttcgagggcggtggtggtggtggtgatgacggtgggttggcgctagggtttggggcgagcggcgatgggaaggaggtggaagaggggaggaaggtggagatcatggagaaggaggcggctgggacgggggaggtgacgctgcaggagtggattgggccgtcggacgccatcgagggctatgtgcctcgccgtgatcgcgtcgttggaggtgaatcgccttttgctgacctcttctatttctatttgcattgagcattgattggtttttctgttcaaattatttactcgtttggtttgattgtgctgccataggttagtagtacgatgagtgaggtttatggcggtggcattctctgttatcctttgtgctcaaattaggtagagaaaaaactttggaagatagaaaatggaggaatttgtagtgttcgtagtaaattactttgagtatcaacaattgttgttgctagtagcagttaggaaaattctctgtaacatgtacaactacaacattttggtgaactagttataaactccttgtgtaaaatctccctacctgattagcaaattagtagcatttgtgtatgactagaaacaatcaactaggtaataattgagagctatcaaatatggtaagggacagctgaagaatagacataaccgtggtgccatattttttggttgcagtcattcaaattacaagaggacaactaggcaattcactcattttgtttagacctacatattgttgttgataagggacgctagaacgaagataggagattgagagagtaattaatttttggaagtacgttacagattttaatgggaggtagtgacttcttttttgagagattagaggggtgagagatgagctgcttactttgtcaatgaaaagcgctcaggttttgttcaatatttccccgaagaaatacaaaaatcatgtctttgtaagcatcatgtgttgttcctcttttctcactgctcacggaggtgcctaaactgcctaacaaggtggcaaactggtccctagtgcctaaacaccaagccaccaaggcagtggtggtttggtgggagtgtggtggtacttagctcctacctcctaggcactgtttgtttttcttatattcaaataatgttctagaactagatgtgacaatgttacaagagtaacaatagttttacttgcaggcacatttatatatatgaaaaggatatgctcattcttgctctttgttcgacctgtcttagtttcgaacaattgaagaaacaatgagcttgtgttctgtatttcagggccaaaaaaagaggctaaacagaacgatgcttgtagtgctgagcagtccagtaatattaatgtggattctaggaatgcttcttctggtgaatccggcatggttcttactgagaatacaaaagcaaagaaaaaggaagcaaccaaaaccccattgaagatgttcaagcaggatgaagataatgatatgttgtcgtcttgcatatcggattccattgtgaagcagctggaggatgtagttctcgaagagaaaaaggataagaagaaaaataaagcagctaaaggaacatcgagggtaggtaagagtaagcctgcaaaaagaccagttgggcgtgatggacatgaagtggactttacaagtacaattattatgggtgatcgtggttcagaaatgatggatcatggtgctctgggtcaatataatttctcaagttctatattagcaaatgagcagccttcatcatctcaatatgcagcgatagattcagtgcaagcttacactgaagaactagatgaattatttagtaatgcagttaacattgcaaaagacgagacaagtgatgatagtggtagatgtacactaagatcttcattgaaggctgttggatccaagaatgcagggcattctgtgaaatgggcagacgagaatggaagtgtgttagagacaagcagagcatttgtaagtcactccagtaaatctcaagaaagcatggacagttcagtaaggcgtgaatctgcagaagcttgtgcagctgcgcttattgaagcagcagaagctatttcatctggcacatcggaagtagaagatgcaggtgaacacttattccttaaccctgtggtgctttgacatgcagcttttgtttttgatatgtattaacctgtgccttttggtaacagtttcaaaggcaggaatcatcatactgccggacatggttaaccagcaacagtacaataatgattatgacaatgacaaagatgcaggggaaaatgaaatatttgaaattgataggggtgttgtgaagtggccgaagaagactgtgcttctagacacagatatgtttgatgtcgatgattcttggcatgatacaccaccagaaggctttagtctaactgtaagaattcttgagaaaaaataaagtagcacttcttcttttttttccttctggttgaatttggcatgtcatgccttttttccttttcagctgtcctccttcgcaacgatgtgggctgcattatttggatgggtatcccggtcctcattggcctatgtgtatgggcttgatgaaagttctatggaagatttgttgattgcaggtggaagagaatgtcctcagaagagagttttaaatgatggccactcatctgaaattagaagagctttggatacttgtgtgtgtaatgccctgccagttcttgtatcaaacttgaggatgcaaattccagtctcaaagttggagattactctggtatggataaagctagttgaacaaactaattaaaaagttaaaacattttttaaaagaaaagaataaggactccgcaattggttagtgacctagttgaacctggatatgtatttactggctagtacatatagtttttcagcagcggctgtgaagaggcttttcgttgcattttgttctggtatctagacacctttgactgagatcaatcaagctactaatatcttggtcagtttaacaataatttcttagtcatttggggttctctctcattcataagtgtgggtgatgagctgcgcatatctggaaatagataagacgaagtggaggctgtacgttacagttattctgaattagggccagtctcttttttgttgattctattgaagacagcttaactgctagatgttgccaccaagaattttatttgttagtttgattacagtttcagtaattaacatttagagctataattagtgtgcatctaatgtgtttttcccctccccactagggatacttgttggacacgatgtcatttgttgatgcactgccttctctgagatcaaggcagtggcaattgatggttctcgtgctgcttgatgcgctctcactccatcggcttcctgctcttgctccaataatgtcagattcgaagcttttgcagaaggtgatgatgcctttccctgcctttctgctatgcaagtagacggatgcacatattctttttaagaaatctgatctttcttcccttttgtgtgctgcagcttttgaactcggctcaggttagccgagaggagtatgactccatgattgatctcctcctcccttttggaagatccacgcagagccaggcatccctgccaagttaaacctcaagcaacacaagtatctaaatacatgtttacacagcggagtaaatagagagaggttctacatatcagcgtcagcttggcagtctattcggatatactatcataatggtgcctcttgcgtctggttgtttaggtttcggaacacgtcttgcaaaatatcggttgctcccagttgcttcaactatcccctttgcattggcgtcagacgtacaagcggagcgggcactgattcctgtcattctcaggaattgttagctttagtgaggagagcaaaagataactgcctccagaacaatttggtccactatggacttttatctctcattgctagcgcagttcagaattgtagtgcatctttgggttttttttttacctcttttaccggtgtgcagtttgtcaggttagtacagccgaatttgaccagctaacaacccactcgtgagtcctaataggtgagtgctagatatcaagtggtatagtaaacccagtgttagcatctataaaattctgaattttatgcctgtcaatctcgcattcatggtcaatcggagacttgcagtggctgtaactttctacaagttggcatctcattgcagagagagaagaacaagagcaaaaaggttggcggctgatggctgaagtgcgaatacattgaaaacccaggtgctgccttatcgcaagagacttaaaagggaggagcccaaaaggagaggttagaccattattagcttggtgtgaagtgtgaacagagctgcctgagcttgaggattagcagcaaacttagtagcgtgtgtgcctcttttttccatgtgaaatcgtcgctaatttggattcatgtcctgattggctccttgtctcgataggaatttgacaatcctttaggtatttcgtctgaccggttgcctagattatccactctataaatgatagcagtatcagccccaacgcccaacaactagcctaaacgctttaacactacctaggtttttgttttggtgagctggagatatgtgtatgcatctaacactgatattccatctattccaaaataaatataactacgcctagtacttaaaaaatatatttattaaaatataagcggttctagcactatttaatgcaagttacctttcatctaaacttctcatcttacccaaagactcccatcctcagaaatatccatattttgaaagtaaaaattcaacggaacgtattttctgcttagctcatttcattgattcttctacaattagcaaggaaatagtattttcctgcttagctaatttcattgattcttgaactgcttggttcacaaaccaggaagagcctgttttgctctccatagtcttacgtggtgtttggattagtccatgtatttagaaactaatttaatttaaagtactaaatatagactacttacaaaactaattatataaatgaaagctaattcgcgaaataaattttttaaagcttaattaatccataattagtaaacattatataaatgaaagctaattcgcgaaataaattttttaaagcttaattaatccataattagataatgtttactgcagcatcacatagactaattatgggttaattaggcttaatagattcatcttgcgaattagtccaagattatagataggttttattaatagtctatgtttaatatttataattaatgtcaaatattcgatgtgataaggacttaaaagttttagtcccatctaaaaaaggtctaaatctatctcaacgaattggtctttcaagaatgggacaatcaagaatctcacagcaacttggtaaaagagcatttcacagagagagagagagagagagagagagagagagtattgctcaagggaagctagtccatccatacatgaactcaacagagatatgtacaacagcaatggtgtgaacaatagcagtaacatgtcaacaaaacgcagaaaaataataacgaggaaaaaaaatggcctacaaaactgccggctgctcaccctccctgctccacctcagcagcctctcaacaaatcagaagaacaaaaaacaactaatgtcagcatatgtacacaagtgtgaagtggccacaaccaaacaccggcgcctcgccctagcgatcagtctccagccagctcctcaggttgcacagggcctccgcagagaggctcttgcaactcctcggcctcgccacccccgcctgcccccccacctgctcctgccgcggcgacccaagctccgagacgaagcagacgacgatcaccgtcaggttgtcggcggtctcgagcctcttggcctccatgacaagctccctcgcgcacctctcggggtcgtcgtgctgccggagcccccgtcggacgatgctcaccgcgtgctggctggtcatcacgtcccagatcccgtcgcaccccatgatgaggaactcgtcgtcctccgtgagcatggtctgtcggaactctggctcggcgatgagaggggatatcgagccgtcgggcattttcatgtcccagtcccctagggcccgtgtcacggataggactccgttgaggtagccatcctcgatgtatcctccggatgcagcaacccgttcacactcctcggcatagtttgctctgtgatctcgagacatctccatcgctacgcctctccggcaaaggaccgcacggcaatcccccgcatttgcaaccagcaattgcctgcaagacagttcagcagaacctcgagtgagcatccacactgaagcatgagatgtgcaactatagatactggatatgtttttttttaccttccgaagactaatgcggtgagtgctgtagttccggaagagcggctgatatctaaatcatcagctaaggcaagatctgcttgcaagaacgctctgcgcacagagttctcaactgactgaacatatgtttcatctacttgcgatgcttgtgggaactcactgtcctcaaacaggaacctcattgcatgccttttcatgtaggctgcagcatccaggcctccatggccatcgaagacctaaaattgcaaagggaagaagcacgggcaataagttcaaccattgttgctgaggaagtagcattcacaaatcacaaatcagggtaggcattcacatagaagattacacttaccccatagaaggcactaggcaacggacacaccaagagcgatccaagatgggcagagagatcatctatccggatgtgctcatcttccatgtacctcctaggtccaatatcagcaaagctaccagatcgaatactgggaacaaactgtagtgcatcaactgatatgctcggtgcaccagcagcactctccaacccctattaataatgaacagaaacacaaaaattactaatcttatttctcagacacaaaacaaacataaacaaccaattcttccttaatctgctaaattatatacccagcactgccactgacctacttgcgtagttatgtttcaaacataatcctatcctgccgctcacgcagcactatgatttaccccactaccccactctacactgaaataagatactgaacaagagctgaaaagtttcagctacagctatagaaacaggacaacacttttaggctagataaacaatcatctgcgcaaattcgtatgataagttgaacttgcgcgaaagcgcataaatacatactacaactcaactaccactagcactatctacacaatggatccaataatatcagcacccaccttctcaaccttctggcctacaaccaccaccctataccccctaaaaagggactacttttttttttcttacaaactgtgtcagtcttttgcatccacgaacagaaaacaatctcgtgtaataaacagaaaggcagtaaactccataataaacctaaaatccaataacaagatgacagcaataatttacatagagatatctaaaaatcagagctgattacaacaactgaaagcacctttttcacatgagtagtattaacaaacaatcctaaaattactgaaaaacagctgctaaactgctagtaatccttgctagattccatgttatttcccacgaaattcttcgatctcccaactgaaatactactgaaaacgtagaactacagaacacaaagttgagcaactcaccatgtgaggcacctggacggcaacctcgacctcgaccaccggcggcggcgcgaccgccgccgcggcggccacctcctcgacacccttggcgacgcaccggtggtacggcacctccaacaccggcacgggctgatgcatcacctccgcctccgccaccatctctcccctcccgatccaaacaccaccgcctctccggtcaccggagaaaaaaaaataaaaaaaaaatcaagaaaccgagcagcgatcgatccgcgcgagaggccgcgatccgaggggggagagggcgatctcgatggtttctaggacacggtttcttgatctgaggaggaggaaggagaagaggaagggggaagaaatgggggaagaggaggaggggtggttggtatttatccggtggcggtgaccggcggcgaccggcgacgatgcggacgggtgaccgggtggtgccggtggcctcaccggacacgtggcggtctcacgcccgtgtgattgcgctgccgacctcgcctccctctttcttctagattggatggaggccaagggagagtgataaaagatgtgttttttttactaatctagagttctaatcaaatgatttactacttacagtgttaattactggattagttagaggcttgggagtgatgaagaatgtgtcttttttttttgagtggtaatcaaatgatttattgaaatgtttgtgttagaaggaagaacaagctaaaaaaggatgtaatttttttgcaagaatgatttggattggaggtggtgagatgcactttggtttgaaaaagaatgtgtctatttggagtgctaatcaaatgaaatggtctatggaaatgtttgtgacacaaggaagaacaagctaaaaaaatgtaattttgcaagaaatatttggattagagggagtggttcttttgcatatgggtgatggtggtggtgtttatatatgcacttgtttggtttgatcagctttgattttcgggaggtgtggtcaatttgagtgttttttgtgctggtttacagtttttgttgcatacgttgtttttgggtggttaatttgaggttaggggtgttacaaacttacagtacattgattaattagctggtgttttaaagtgtttaattactaactcgtggtaaatgcatagcaggtttgctcttttcctgtttttaaccaggcagttttggttgggaacaaaaggcaggttattcttacttttttgaagggaatataatgagaatcacacatgctaacggtacaaagattactactttttttaaggggaaaaaatggcaatcacttgcaggtgggagtgactgtttcttgcacgtcatcaactgaatctctgtccacgtgttcgaacttgctgttaatcactgaacagcagagcagcttaagtagcaagaaggaatctttgtaaccctttgtcatcttatctcttgggcaagaataagatggcaaattagattgttgtctactgcctgtcagtggaatcacaatggaagatatcaagataagtacatgattaagaacaattagagatttagaggatctgagaggcatcaatcaaatcttattatgaaaatttagccactattatcttcctgaatatgacatgacaaagagagacggtggatcaaatcaaaacggatataagaaaatcgagtttttttagtagggtatgttttatccggcctctacatgcaaccagatatatatagcctttttaaattagaaacttagcttctcaaataacacaatctgaaatcgagttaggaagttgatgctttatgggcatgattagttactagtttattttatactacagttcctgcaacagggtgcgatcatttaaaaaagaaggtggccaatccaataaatagattgtactagaaatattagtgaataaattacatttcaatgtagttagaggcctagaggacgatcatgtctgcaaaatttaagtaaacatattccaacagaaattttgcaagaaaagtatttttcataacactataatgttatgaaacatacttttcaagacaattcttctcatatggttttcacacgttaaatctgaatatttaaactaaattggcgaagagaagttgttcttccttcatacacccaattaagttataagattgactgtgatagtgtgatatctatccccattggtgtctacagtacatatagcttatgattatttttttagaaaaaaaggagtgaagtaaatgaaaaaattgctttccaaataacagacacaaacggtgcaagatttatatataatgttgacaaagcagtggcacaccggacagcctgacgtaattgtgatccaaatcactgttctaacacaggatgagctaatccgatccacttcaagttcataaatgacacaagattgcttcatttggggataaactaaataatccaaatatataatttataattgcaatgctattgcttgcagttccctttccttttcgtatcactttcttcctacaagaagcgaactcttgtggcttcatttgttcctgacgcatcttcactttgtacaagttgaccaaaagaaatagacaacataagaagatcttttacaattgaatggtggataatttaaggaattgtgaagtaatatttttttagtcagagattgtgctccatttcttttgacaaatttaattgggaatttgggattgctctttattttttatcgaaaatattacttgtttcttcagtcacaagataaacaaaaacttatgacaaatgatttggaatagtaaaaaaacccaaatatcagacaacttcactaacaccacatatatagtactgaaagaaaatgttggaatctcacgcaggcctcaattgaaacaactttatattttttgtcgaaactattacttgtttcttccaatcacaagatagtaaaaaaaaaaactagtgagaaatgatttggaatagtaaaaaaccacatacacaaagtatcaaacaatttcattaacagcatttatagtactgaaacaaaaatgttggaatctaaagtgaaactctaccagctctcaggtttaagttagttaattcatttttcttgaagtttcttgtgctggagccaatgggagggcaacaggtcatctcctaagaatagtggtgacaaagaaagttggcccctttcttccactcctgtcctctggagctccctttcttgtctgtagttggttgagaaaattggcaagcaagactgtcttcttgttttttggggcctcatcatcaccatcactaccattcattttaaggtcacctttgcaagaactgaaaaaaaaagccaggtggcagtggcactaatcacactccagctagtttgtggattgtaagaaaaagagggagagaaatgcagcatatatgtattctggatttttttgggggcccctttcttcttgttgttcagccacaaattcaggaagcttctagatgtttggtctgatggaagacaaccaaaatggcctgatgagtttctggtcaggaaatcaaatcaattttgttattttccagtgcatgcatgattgagtagttggttagggatgagcaagcttatgaaatatgtggttgttttatcttgttcagcattatactaattgtgtatatatatgtaattaacttattgtcatatgcacaagaatacgtaacagttagacaggataagatttcttcttcccactgccttaatattattgtttttggttcactaataaaagtttttttttctagtcttcctttggtttctttccaattttaatgttttatgttgggtgtaggtatgcattcctcattgtatcctacaagccacacctgaaagcaataggtgcaaaatctgaaaacgttacaggagtacatcatatgacaacgcaatctaactaccattgtgaaaaagataatgcaatgcaatgggattagcaataaatgaatactatgcaaaacacatgagtatgtcaacatatcaagaatgataagtaccagtcagtaggccaggcccagcccacagcccagcccaaaaataaattcataacttgccctaaacaagatttaagtctatctcacattgtgcaccactggagtacaatagcataagctcaggcataatctgcaaatttcttttatatcattgtctttttagaggataataacattgatcaacttattatctaatggcataataatatttcatagtattaaacaggaggaaacaaagtccaatctcacttttacatcatactagcttcttgctagtagtaactccttagcaacctaatccatttaattgactactttgagaaaaacacacaaaaagtctatgagcgtgtttccttttgtcaagtttcgtgtatttttgatattaagagtctaaccaccaaagtgtacttgaataaaaagtcgtccaattaagctgctatattcaactaatccattcaaattttggagtttgaatcagaccgactcacactggcccatatatgcataccgcataaatttctcaccaatcaaatgtcagaaatacttcaataggttttgaaagtttgaaacaacaaaccgtgtatacatttcatccccacacacattgattgcacgcagctgacaaattcattgagcattgcaccaacgagttgaaaatttcaaatccaaggaactgatcagttcgtccgtagtaagtactagagctactgctaattaattactacatgatgcagactttatcaaattaatattgactgtatgctcacatgaacatgtgagtactatacatggccaatcatatagagacaaccatggtaaagatagcttttgtatttttagccaaaccttcaatatttttagaactgcatgatttggtctgaaatttgaccgatttaaggtgctacaccaaataaaaaatgacacaaaatgtggattagactgagtaattaaattaagatggtttggtttgatcgggtcggttggacctgttgagccgtagcgtcctgccggccgtccaacagcctgtcatgtcggccattgcttccgattaatttgtcttaggctacatcattaccagcttaatgcttagctacttctcattttcagtgaacatgattttcgacggatgcataaacgagtacgtattttatactccctccattccaaaatataaggcacaaccaattttcttagatgttcctgtaaaatcaaatgtgtttttgattattattctgtgatgaacaattgagcattggagattagtggttttggagatgattggattcacaggtgatcgcaggattcattatttcatgtgaccggtcagaccgggctctggtagccggtcggaccggcggtatgcgcgtggtcaggtggtctgaccggccgacactgtgtcggtttcggtttcgggttgtttgtttggatatccatgattatttcataattatgacttctagatggatactatactatgtaatactgttgtttgctactaatgagtcaagttggagatagcttggtctcggaatatggtttctttgtttgttccatgtgtaggtgactcgatgtctcgggagagtatttgcggtgatggaccaggagtcggcttggggataaggcgacgtccgtggtggtcagagatcatgcgggatacttaggctagagttgatgcacgtggttgatagagattccatatggcatatgatggagttattgtgtgcgtatgggatgcggagtcaaatttggaaggagtccaaatttggtacgattggttatgtaaagtttctttcttgtactagagggtttcctaatgtgtttaggactcttagtatgagtttggttcgtggctttagcctgcctacctcatgtataaatagagggggagcgtgaggcttcccggtatcgcttttgagagcaattgagttgagttttgagttagggtttcgagtttagtcgaaatttttgtaaggagtgctgttggtgcactttgtaaacacagagagaatcaataaagttgtcatctactgtaagagttcttcgatttgtgtttcaccgggtttcggcggtctaaccggcgacacaccgactgtcagaccgacggcatcgcggtggttagatcggcgggtacacggcggtcagaccggcgtcggtgacaggcgtcaggagcagatcttggaggtcataccggagattcaacaccggtcagaccggcggctacgcttcagtcagaccggctaatctactccggtcagaccgatctcatcgaaattgagggtaacttttatttccgctaaaagttttcggtttttgggtatagcaaccattcagccccctctggttggcttagttcttgtgattcgatcctacaagtggtatcagagccttgttttcttctttggatttttatcgatctagagtttttgccatggctactcccgctaggttttcaactaagcctcatgttttcgatggaacggatttttctcattggtatagtaggatgcaatcttatattatggctgaagattatgatatttggagaaaagtttctcatccttatgtgattcctgaaactattaatactgctgctgaaaaaactgcttttgaacaaaattgcaaagctcgcaatattcttttgagtggtatttctcgtttggattataatcgtgttgctcatcttcaaactgctcatgagatttggactgctttgagtaattttcatcaaggaacaaataatattaaagaacttcgtcgtgatcttttcaaaaaggagtatattaaatttgagatgaaacctagagaagctttggatgactatctttctcggtttaataaaattttgagtgatcttagatctgttgattcttcttatgatgctaattatccacaatctgagatttctcaccactttttgaatggtcttgacatgtctatttgggagataaaagttacatctattcaggaatctgttaacatgtctactttgactttggattcactttatacaaaattgaaaacacatgagatgaatgttctttctcgaaaagttgattctaagtcgagtgctttggtttcctctttggatgttgatgcttcttcatctaagtcttcttttcttgctatttttaatgccacatccgatgatcaactcgaacaaattgaggaggaggatttggctttggttgctaacagaattgctcgagctatgaataatgccaggaagaacctcaacatgattttggatcaatcaaagattagcacacataaccgtggtttaggttttaatccttatgctcataattcttgacatccacctgttgtgttaggtgttggtgctagaagtggtgagattttggttaaacctgatactaataaaactgtgtttaaatctgctggtatcatatctactatgaatgcatcttcttcaaaatccaatgttgtgcatgcaaaatctcctgttgttgctcatgttgctaaatctactagtgctaccaatgtgtctaatcatcgtgaaaaatatacttgttcttttttggggcaaagatggacatattgttggtttttgtttcagattagctcataaacagaaaaaggagagagagattgcctttacaaaatcaaagtggcaaaaatctggttttccctcgaggaaaccggtcagaccgcagtgggtcccgcggtcggaccggcgacctatcagaccggctgaacagcctcggtcagaccgaccaccagtcagactagcggtgatgcctcggtcataccggcccccggttagaccggctgcacaccctcggtcagaccggcctcggaggaatttttccataaattctaaaattgattttgcacgtggatatatgcctattggatcttctggtcgtgtgtctcagtactggattcctaaatttttattatcatctaacccaagtactgaggcttcgacttctgcttgtgtgtaggctttggtgacaaagaaggagaacgtgtggatcgtggattccggttgttcgcagcacatgaccggtgataaaaattggttctcctccctaaagaaggcatctaagactgaatcgattatctttggtgatgctgctacaagtgtcgttctcgctacaggtttggttaaggtaaatgaaaaatttgaattgaagaatgtagcttttgttgaggacttaaagtacaatttgctttcagtttcacaaattgttgatgaaaattttgaggttcactttaagaaaactgaaagtaaagtttttgattcttgtggtgattctttgttgaatatttctcgctatggaagagtgtttaaacctgattttgaaaatcctgtttcacctgtgataacatgtttggttgctaagtttgataaagatgtgatgttttgtcatcgtagacttggacatgttggttttgatcatctcactaggttaagtggtttggatcttgttcgtggtttgcctaaacttaagaaagatcttgatttggtttgtaccccgtgtcgtcatgctaagatggtttctacttcacatgctcctattgtttctgtgatgacgcatgcaccgggacagctattacatatggacactgttggtccagctagagtgcaatctgttgcaggaaagtggtatgtgttggttattgttgacgatttttctcgatattcttgggttttctttatggcaactaaggacgaagcttttcaacactttcatggtttgtttcttcgattggagcttgaatttcctggttctttgaaaagaattcgaagtgataatggtggtgagtttaaaaatgcttcttttgaacaattttgcaatgaaagaggtcttgaacatgaattttcttctcctcgtgtttctcaacaaaatggtgttgttgaaaggaaaaaccgtgttttggttgagatggctagaacgatgttggatgaatataaaactcatagaaaattttgggctgaggtgattaacactgcttgttatatttcaaatcgggttttcttgagatcaaaacttggaaaaacttcttatgaacttcgatttggacatcaacccaaagtttcacatttgcgtgtttttggttgcaagtgctttgtcttgaaatctggaaattttgataagtttgaggcacgttctaccgatggattgtttcttgnnnnnnnnnnnnnnnnnnnnnnnnnnnnnnnnnnnnnnnnnnnnngagatggaaccaaaagattacatgcgcg

SEQ ID NO: 5875 - DNA, 1722 bp, Oryza sativa
atcaactatcaaatttgaaatccgccccgaaaaaaaattgtctgattcaacctaaaaaaaagagtgtgtaagagattcatattgctttttgctttttcctcatcgtctcgtccgcgatttcgccggagttttcgccggcgctttgggaagccgccacggggttatatttacaaccgtattaccgcctttgaagtgagatgttgcctgctcgccggggccccgaaaacaggtcacgtcgccgtcacgccgaaaattcacctagtaatttccgaacttatttgtgcataaaatcctcgtccaggaatcagccgaggtacacaaactgacaatttaatatacagattcatcaaattaactaaaccgataaatacttacttaagaggcacttagtcctcaccatgaagaaaactgcagcggaaaataaaatctagcgaagctccagctccactcccacaggcagctcagctggggtataagccaaacgtcttctcctcctagatcctttttcttcaactgaggttgattgattattgcaagaatgagcatatgacatactcaacaagccacacagcaaatatgcaagtgcacaaggataccaaaggatggcataatataggctcatttgcaaaagcagcatttagcaaaacatttaagagaaataaaacagtggagtaattaatcagaaattttaatcaacactgaacaacacacccatgctgcacaggcccaaccatcctgaacaaccatacccggctgtacagatctaactccaaaccaggagctaagcaaattattaccaggtataacatccataattattgtgagaggtgtgagactaatcacgaaaaacattgctcaacccgcccataaccgcgggcacggctattcgaatagttttactctggccagaggtgtaccactgtacccacaagacacagccccacaacatgtcaccatgtgcctcaataccaccacggtacctcggaaaggagttgtgacaataccccttgcacaacacaatccaccacagcgcacctttcctggatcataatcacccccttataaacaaggcatggactccccagcgacccccgtgggcttatctccgccacttctcagtctggtgctccgcaatgaatcatgctatacaaaaggtaaagccgttgcccacgctggcttgtggttggcacggttaatgtttcacaacagtagctcgcgaaccggtccttaattgtcatgagcacgactctcaaaaccatgtgctcacaacccaccattatcaagttttagttggcaagtaattaattaaccaatcacgattgaccatcgtgaactatcattaagccatcattaaataataatgagtcataagtaatcccaatagtgtgctaatgtttctaagcatggctaagcaatcatatctaatatctagctgaaccaatatatatagctcaactagtcaagttataataacccaaggtatcaaggaataaagtaatcaatgcaaacaggccataacaaaggaatagattcacaccacccagtgacattcgaaaataaatgcacagttgaaataaatagagaatttaaatataggatcaacatgctcaaaggattgtgtttaggatctgtgtgacttgccttgcaataatcggtcttcaattaatcttcttgaatactttccgcgcacttacgaacctttgcaacgacggaaacgacaac

SEQ ID NO: 5876 - DNA, 1457 bp, Oryza sativa
atgcggccggtgtgaaagctcgtaagtttgccaccgatgcagagcactgagagatcccctcataatttccccaaagcgtaaccatgtgtgaataaattttgagctagtagggttgcagccacgagtaagtcttcccttgttattgtgtagccagaatgccgcaaaacttccatgcctaagcgaactgttgagagtacgtttcgatttctgactgtgttagcctggaagtgcttgtcccaaccttgtttctgagcatgaacgcccgcaagccaacatgttagttgaagcatcagggcgattagcagcatgatatcaaaacgctctgagctgctcgttcggctatggcgtaggcctagtccgtaggcaggacttttcaagtctcggaaggtttcttcaatctgcattcgcttcgaatagatattaacaagttgtttgggtgttcgaatttcaacaggtaagttagttgctagaacccatggctcctttgccgacgctgagtagattttaggtgacgggtggtgacaatgagtccgtgtcgagcgctgattttttcggcctttagagcgagatttatacaatagaatttggcatgagattggattgcttttagtcagcctcttatagcctaaagtctttgagtgactagatgacatatcatgtaagttgctgataggtttccagttttccgctcctaggtctgcatattgtacttttcctcttactcgacttaaccagtaccaacccagcttctcaacggatttataccatggcactttaaagccagcatcactgacaatgagcggtgtggtgttactcggtagaatgctcgcaaggtcggctagaaattggtcatgagctttctttgaacattgctctgaaagcgggaacgctttctcataaagagtaacagaacgaccgtgtagtgcgactgaagctcgcaataccataagtcgtttttgctcacgaatatcagaccagtcaacaagtacaatgggcatcgtattgcccgaacagataaagctagcatgccaacggtatacagcgagtcgctctttgtggaggtgacgattacctaacaatcggtcgattcgtttgatgttatgttttgttctcgctttggttggcaggttacggccaagttcggtaagagtgagagttttacagtcaagtaatgcgtggcaagccaacgttaagctgttgagtcgttttaagtgtaattcggggcagaattggtaaagagagtcgtgtaaaatatcgagttcgcacatcttgttgtctgattattgatttttcgcgaaaccatttgatcatatgacaagatgtgtatccaccttaacttaatgatttttaccaaaatcattaggggattcatcagtgcataacccccaataaattcccgactgactgtcgaataaactccaactaaaatttttctaaagccctaggctgagctcatt

SEQ ID NO: 5877 - DNA, 7928 bp, Oryza sativa
cgggtgggccccacctgtgggcgatccccgagaaagaaggcggccgcggtctacaagactgggcctcggcctggggccggcccacaaagaagaatggtaagaaagaaggggaatggaccggcggcccatccaaaaataaaaaaggaggaaaaaagggagggaaaagaaaaagaaaaaaggaataggattttccctggaattaaaaattgcactttggtgatttttaattggttaaaattatttccaaggctttgaaaattccactaaaaatcctgttaatatattgtgacatgtagaatccaagaaaaattccacatgccgattccgattattatttgcatttattaattagggaattagctctaggttaattaagataatttcttcggacgatttatttagccaaatttttaaagcaagcaaaaaggggaaaacttcagggcgtgacaaacctaccccccttaaacggaatctcgaccccgagattcggaagagctggcgaagaggtgcgggtgggtggccttcaactcatcttctctttcccaagtggcctcttcctctgagtggtggctccactgaaccttgcagaatcttattactttgtttctggtctttctctcgctggtttcgaggatacgagttggcttctccacatacgtcaagtcttcctggatttcgatttgatccggacttgcctgttcctcaggaactctcaaacatttcttcaactgggagacgtggaacacattatggatgccaagcatgttggagggaagctcgagctggtaagcaacttcacctctacgttccaaaacccgatatggtcccacaaagcgtggtgccaactttcctttggtttggaagcgatgtactcccctgagcggagtgacacggagatacacataatcccctgtttcgaaagcgagctcccttcggcggttgtctgcatagcttttctgccgagactgcgcgattctcaatctttccctaacagctctgactttctcttctgcctcatttaaaacttctgtaccaaacaactggcgttcccctgtctgataccagaagagcggagtacgacacctccgtccatacagtgcttcaaatggtgccatctgcagactagcttggtaactgttgttgtacgagaactcagcatacggcaagcttttgtcccatgccccaccaaaatcaagcgcacaggctctcaacatatcctctagtatttgattgactcgctcggtctggccatctgtttgtggatggtaagcggtgctgaaattcaaccgggttcccaattcttcttgtaatttctgccagaactttgaagtgaattggcttcctcgatcagacacgatcttcttaggtacaccatgtaaacacataattcttgccagatagagttctgctaatttcttccctgagtaggtagtgtgcaccggaatgaagtgggccactttggtgagtcggtcaatgactacccaaatagaatcatgccccgatgacgtcctgggcaaaccggtgatgaaatccattccgatttcttcccacttccattctggaatctgaagtggctgtagcaaacctgctggcctttggtgttctgcctttactcgttgacagacgtcacagagtgctacgaattcagctatttcccttctcatgctgacccaccaaaacttctctttgaggtcttggtacatcttagtactaccgggatgaatggaatattgagtttgatgagcctcggttagtatcaggtcttttaattccttgttttcgggtacacacaatctttctcccatccagattgttccttgttcatcctcaacaaaacctcgggcttttccgaccctcatgttctttttgagctctgctatttcaggatcacttgcttgagctatgcgaacctgctccaccagtgtgggctgtgcctctagggcagccacgaatccgtgctcaactataccaaggttcaaatgttccaaatcatgttgaacctcacagcatagttcctctacccatgcgacgttgcagtaactcttcctgctcaaggcatctgctaccacattggccttgccgggatgatagtgtattcccatatcataatctttgattagctccaaccatcttcgttgtcggagattcagatcaggttgggtgaagatgtactttagacttttgtgatctgtatatacctcacaacggttaccgatgagatagtgccgccaaatctttaaagcatgaacaactgcggctaattccagatcatgcgtcgggtagttgccttcatgaggacgcaactgccgtgaagcataagaaaccactttgccatcctgcatcaacacacatcctagcccctggcgagatgcatcacaatagacctggaaatctttcgtctgatcaggcaggattaagactggtgcagacaccaaccgtcgtttgagttcttcaaaactcctattgcattcagcagaccagataaacttttcttccttcttcaatagctgtgtcattggcttagcaattttagagaagttctcaatgaaccggcggtaataacccgcaagtcctaagaaactccgaacctgagtgactgtccttggtggggtccatttggtaactgactccacatttgctggatccacagctactccttgagcattcacgatgtgaccgagaaactgaacttccttaagccagaagtcgcacttgctgaacttggcatatagctggtgctcttttaacttttcaagtaccagccgaagatgctgctcatgttcttcctcggacttggagtagataagtatgtcatcgatgaaaaccacgacaaacttgtctagaaattccataaacaccttgttcatcaaattcatgaagaaggcaggtgcgttagtgagtccgaaagacataactgtgcattcgaacaacccgtaccgagtgatgaatgctgtctttggaatatcctcttcgcggatcctcaactggtgatagcctgatcgcaggtctatcttagagaacacagtagctcctttcaactgatcaaacaggtcatcaatccttggcaaaggatacttgttcttgatggtgacctcattgagtgcgcggtagtcaacgcacatcctcttggttttgtctttcttctccacaaagataaccggagcaccccaaggcgacgtgctcgggcggatgtatcccttctgtaactgttcatcaacttgcttcttgacttccgccaactcgttggctcccattctgtaaggcctcttgtggatcggtgcagttccaggtaccaagtcaatccggaactcgatatccctttttggtggcattgttgtcagatcatccggaaaaacctctggatactctctgactatgggaatatcctccagcttcttagtggttttctccactgctacctcttgttcttcaccagcagcctggtttaaactaatccctggcttctgcggcactggagactggaagattaccacctctccttttgcattggtcaacttgatggtgcggctggcgcaatcaatcactcctctgtgccttgccaaccaatccattccaagtatgacatctaggtccttggattcgagaagaatgaggttggctggaaaaatcaacccttgaatttcaactgtcacagatgggcagtagtgagttgtggtcatgccacctccaggagtatgaactcgcattggtatcttaagcttcactaaagataacccatgtgcaccagcaaaacgcttggaaataaaggaatgggttgcaccagaatcaaacaatattactgccggtgtcgagttgacggggaatgtgcccaatataacctctggtgctgactgcgcctcctctgcagatgcatgattaacacgggcctgaacgaacttgggtccggcacgtcttggcttcgggcactttccaaccgtgtgtccgggtttgttacaattgaagcagagttcgggtttttctcccaacctcttgggctgttctgtcagagctggctgaactgattgagctggaatctttagtgaactcggagtagggttgaggctgtgctgctcactattgttgtgactgtcactatggtggttcttgttgaagttacccgggtggtagggacggtgctgccggataatcatggtggaaggtccaccgtgatgtcccatcgtgaaacgaggcttctgactcttcccctggggagtcctgaactgagctgccttcctcttacggtttattttgttacagtgctcctcctgacggatagccttatccaccagcttctcaaagtcctcataatctctagagatcaactggttagtcaattcatcatcaagaccagacaaaaacttctcctgcctctcggcatcggtacgcacgtcctcaggggcatagcgcgcgaggcggttgaactcatgcaaatactctataactgttctggttccttgttgcagggaacggaactctctcttcttttgtgccacgattccctcgggaacctgggctttattgaaactatgacaaaactctgtccaagtaacctctgccccagctggacgggtcaccatgtagttgtcccaccaaatagaagcgggaccttgtagctggtgtgtagcaaaagcaaccttctcctgctcgttgcattgcaaaagattcagcttcttctcaacggcatgaagccagtcgtgggcctcgattgggttggtggtgcttgagaaagtgggcggcttgacacgaagaaattctaacaatttggactgaggaggtggaggaccaaactgcaggttctgctgctgcagctgtgcttgctgctgcacctgctgcaacacctgatggtactgttgctgcatctgttgcatcatcattgtcatcatctgagtctgattgtccaacacctgagcgatcgttgggttctcgggcggtggggacggactgttgtcagatgcaccgttggcacgtgctccattgatcggctcttcgctgccactggcgttgttggagtcgcgtgaaccattccttgtctccatctgaggggataggtagaaatatgagaaaaggaagaaaacaggggctcagaaactaatcttgcttatgaatttaagtgcaattatcttaatcttgattaaaacactgaaaaagaggcacgaaactcctaattgaggcagtcataccactgacacatgatatcgaccgccgactaacccacaagcaacaaacctaaacacgaaaactagcaagcaaacagactaagaaggcgataaagctaagggcggcgactctgaagctcgaggcggcgcttgcaaacgagggataggactgacatctaaagtagacaagggataggaaccaactcatgctcaaatccaaattaaacaaagcaaaagaagactcaaataaataaccgagcatgatgatttttatgcatagaatatttttcatgaactcaaataaagacactaatgcaactaaacaataaattaatgcatagactagttgcatggaaaatgatgcgcataacattgcccccaccgaatatagacacgacctaatgcataacccccaataaattcccgactgactgtcgaataaactccaactaaaatttttctaaagccctaggctgagctcattttttttttaaaaaaaaatccgatccgaatgaacgaccaagatttttcccgcaaaccaaagaggcaaaactccaaattttcccaaaacaaattccaagtgcaaaagggcatatgcatatgaaaaggggttcagagggctcttagggtttccagttggcttgtcctacggtcaaggtcggctctgataccaacttgtcacgcccagaaattctcgaaccagaatttctaagctgaatgtgcattgaatccctgtccaggaccagccagggtacacaaacgacaattgttgacatacagatccacgtcttacaaaaatagaaaagattacaaatgcagcggaaaagataaaagcgagctaaaccgggaagcttgacttcagcagcgggcgactccactccacagacaatccttgacggcagcgacgaaaccaaatttgacaaaacagctccaactaggaaaatcttcagctctggtgtgggggaaaagagagcaagactgagtactacccactgtactcagcaagtcataccggtagaggaggtatgatgcaggatataaccaaaggaggctagaggttcttttgcataaagctagcatttaaaagcagtagttgaaagcagtaaaacagttgtagtaattaatcaatattaaccaaacactgtccaacgctacaccacgttgcaacaggcccaaccaaccacctgaactacaccagttcattaagctaaactaggggtgagactaatcacggtgaatctggttgatcgcccataaccgcgggcacggctattcgaatagttttactctggccagaggtgtacaactgtacccacaagacacgattccacacatgtcgccatgccccgaagtatcaccatgatactgcaaagggggaaatcgtgacaagaccctccacataaccctcccctaaccatccacaccacgctaaggtttcacccccacccctcaaaaggcagtgggcggtcccctcttgcgccgcggtgaatccggcagctggacaaccggacaccccggccgacccaactccatcacgcccaccctcgccaccggtgcctaggaaagggtcgagctatacttcagatcaagcagttacccactcccgcttgtggtaagcacggtaagtctcccagggtttcccgtgaaccggtccttaactgccatgggtgcgaccagcaaaaccatgcacccacaacccaccattcaatgtattttaattaactaataccattgcggtggcaccaatccaaagctatgctcatagtcaaagtctatgtaataaggtgatccccatttgtgtgctagttgaactaagcatggctaagcatttcctaaaccaacatctagtcattttgatacccaggttatcaatggcatatggtaaacaataaatggctgagtaataggacccattccacatgatattgtaaacgaatgcaacatttaatagaaatgcgggatatttgtaaattgggtacaatatgatcaaacgtattgcatgacttgccttgctctcgcactgacgagacctcagcaacgtcttcgagaaaccgtggatcgacgaaacggccgaaacctacgcgacaaacaaagcacacaagcaaaacaggctataagactactgaaacagagaacaaaaccatttttaatggattctacacatttttcttgatttactgagacttgaatgggattaaacggagctcggatgaattagatatgaattttagaagattcactgtgtttattactataaaagaaatccttaaataatttattgcgcaatattaaccagggctgacgtcagcacggaggggtgcggcgccgacaggcggggcccaccggtcagcgaccgggagagagagaaagggggtggcggcgcgcgggcccactggtcagcggcacgggggaaaggaggggcggcggcgccacgtggcggccgaaccgacggacccgatctacccaagggtagatcgacccgatctacccaagggtagatcggacggcggcgggaccttagggccggggcgcgcgggcgcagcgcgagacggcagcaaccatggcgccggcggggcggagcccacacgggggcggcgcgcatgcagcagcggcgcaaggcggttaccgaaggcgaccgaccggcggcggagagcggcggctagaggaggagcggacgatacgccggtaatctgtgcgcacgcggatacacggtacggtgaaaaggagaatggggagggggaaacccaaacttcatcgggagactacggctgt

SEQ ID NO: 5878 - DNA, 1487 bp, Oryza sativa
  unsure (1)..(1487): unsure at all n locations
aatccttaacttataaattgttgtttaaaaggaataattagaaatgattttaaaagcctaaaagagaagatctaattttaatttgctaaatctcaatataaaaaggggccagataaaatttcattaaatactttgcttaattctataattcctagatttttctgggatttatttgagctaaggaagtatttttaataaatggaattgcatttaagaaataatttaattgaaaaaggttttaaaaagtcttcttttggctttgggccgaaagccggcccaaaacccttctctctctttccctcggcccagccggcccagtccgccgagccgccgctctcctctctctcagccgctgacaggtgggccccacctgtcaggttcgtcttcctcgagccgccgctgccgcccgaaaccctagcgcgccgccgtcgccgtttccttccaaatccggccgctcctttccttctccggccgaattgattgaggggaaacaatctccgggatctcctctaccttttctcctttggaaacatcggctaaatcgttttggaagttcgtggaatagagttcgattcggatcggcctctttccttcaagccgcgagctttccttctcgtcgccggccgccgtgggcctttgccgccgcctccttgcacctatataaggacccccgagctcccctctacccgtcgcctcctttgccttagcctgccgtcgcgtctagcgccgcctccgcgtagccctagtcgccgccgtcgttgccgtcggttcagccgcgccgcgccgccgttgcagtcgccgtcgtcggtcgccgtcgccaccatcgggttcgccaagtcatcgccgtccccgtccaccgcttcgccgccgccgaagaccgtcggagcgccgtcgccgtcgtcgacccgaagagcttcgccgcttcctcctcgtcgccgccgccgtccgttggtcttccgccgccgttttggtcaccggtgagttcgccgcgtcgtcctctacgtgctggtgccctccgtttgtgccgaagtgccgccgttcgccggcgagcgtgcgccgcccgagctgtccgctccgccgagccgccgccgctgtcggtgacgtcatcgctggcgtcatcgtcccttttcccgtgagccggtcgtggaccgatcgatctcagccgtccgttttggatagggttgatctcggccgtccgttcccgtgaaccgtcgcccgtgcgcccggtccaccgaaaccctagccgctgacgcaataatccttcttttccttttcaaaaataattcattattgcgtcataattcaattaaaatccatataaaggttttaatccgatttaatctttaaaaattcataactaattcatcttaactcagtttaatgtggttcaagttgcaaaagttgtttaaaatnnnnnnnnnnnnnnnnnnnnnnnnnnnnnnnnnnnnnnnnnnnnnnnnnnnnnagcgagaggataatcaatcaat

SEQ ID NO: 5879 - DNA, 2521 bp, Oryza sativa
  unsure (1)..(2521): unsure at all n locations
gaggttctggaaaagggtgtaaagcgccacctaataaggggggcccgcatttttagaggtgcaaggggaaatacccggtggaacggttgaaaaaggaaattgtaaaaaatattaaagaggggggtaacaaggtttttggaaaattataacggaaacttgtaggcgataaccaaccaaaaggggggtgtaaaatggcacgtttaagagggtgggtccattagccaatttagttttgcgcaattttttgaaaaggaagatgggtggggaactttttataattatctccgcgtgcaaaaaaacgcgatgcaagccaaaagggtataggtggggccctaaaagggtttttgccagtccaaccgctgtaagtaggggacatttacttgtaagtcgacccactatagggagatttgggccaggagatgaggactcctatatcccggatgactttgggacccatcaacaattgttgagcagtgttgtcgggttagacgttacaagcaaaaactgaaaatcccttatattgtgggacggagggagtattttcaaaaagaagaatctactaaaatcccgtgaacctatccttgcattgattgctaactgaatcgtggaaaaccaaataaaatgtcatttacgaatactaggctaatgttcaaagttcaaacacatgcagcagctgcagaacaaaactcaacattttcaggggaaaaacaagacaccaaaacagtacttgggagacgtaccaggtatcctctgaaggccttctggatcatgacggccgcctccacctcccgttgctggccgcagctgcatggccggacctgcgagagctcgccggcgacgacggcggtgaccgagggcctgcggctgccgtcagcgaaactgctcctcggcttagcgaagctccacctcctcctctccatcggcggcggcgcgacgccaccattggcgcctccggcggcgctgtgctccttccgatccctgtctcctccttccttcttgccggtgagaaccttcttgaaccacctcatcgcgcggcccatggtgaatcaacctatctgcagcacgacgaatgccacgaacagaggcgtcaaaaaaaatgtgtagagagcgtggataaaaggattcaagaacagcagctagaactattactccagtgctgaaacaatggaactaataggagacgcaaagatcaactcgggagttgttgaaagttgaaaaactgtaggcgaacaggggaaagaaggctatagtataccgctatagctcaataaaacagagacgccacgatttgaaatgagatactccagagtccagatagcagagtggacaagaaaaaagcatggaagcaagaaagcttgggtgaaaaaagggtcttttttcgatggtgaagcagggaagaaacctttttacagagaggggctgctgccgagaaacatgggaccgaacagagatggaaaccgaactgaaaaggcctcaagaagcttagctgaaaaaggagaaggcaaagacgtgtaatgtagcgccaaaaacagccgagttggtgggggagatcacagtgctcccctccagctcacgaaacgtgactccctgatgcggaaaaggaccttttcatcagtgaaacccagtacccaccagcccagccagcccagccggttgaactctcccaggcgaagcagcgagccagccggcgattcagagcggaagcagccggcgacgaagtgtgagatagcgagctatcgagccagcccagccaccgcaaccgcagcgacgctcgcaggggaaaagaaaagattccccctgcttgccccctctcgcctaagagtccgagcacaaggcaacaaaaaggctaagcgagaggcaagaccaaccgaagcaaaaaaagacccaaaccccggagggttcaccaccacgcaccgcacgagacagcaaaagaaaaaaagaaaaaccgagatggcaacaagatccaaacggcgtcgctcgcgcagatgcaatcattcgcacggacgcacctcgcctccgcgccgcgcgcgcgcgggggccgagagcccgagatagccgcgcaacaacaagtcacaagttggggggggggggggggggggnttttacngtcctctttntttaatttttaataaaaatatgccttatttctatttttttatcccctcccttctcattaccccatccctaactttaataaaaaaattttattccccccttaaaaattttttttcacaccaaatttccccaatttacacttttactcaccaattatttaaccccccccacaaattncaaatcctcatccaaaaaaattcctttaatttttttcccttaaaaaaaattttttattaacacaaactttacccctacaaaaaaaccatttataaatcttttttaaacaaatttttttacaatttccccccctttttttttacctttattcctcttttataaatcaaatatttctccctaacaaaaattttcctaaaacacatttttcttttttctctttcacaaaaac

SEQ ID NO: 5880 - DNA, 15016 bp, Oryza sativa
ctttcggcccaaagccaaaagaagactttttaaaacctttttcaattaaattatttcttaaatgcaattccatttattaaaaatacttccttagctcaaataaatcccagaaaaatctaggaattatagaattaagcaaagtatttaatgaaattttatctggcccctttttatattgagatttagcaaattaaaattagatcttctcttttaggcttttaaaatcatttctaattattccttttaaacaacaatttataagttaaggatttttaaacaagaaaagctcttaacaattatacttagatcattaatgatcaaataattactgaactgttctttgtattatttaagaattgagctctgaaaaaaaaccgagaaaatttcagagagttgacttaaccatggagaatttaacaaaaattaaatccatccatgctttagatttaagaaatttttatttcccacattttacttcacttgaaaattaaagatcatttaatataaattctattaataatttattaaataatttataaatcctgaaacgaaaatcaggatgtgacaaactaccccccttacaaagaatctcgtcccgagattcggaacggctagaaagaaaagggcataggtaaactgcagtctatcttattccataactccgataattattctaaggctttaaagaaaactactgctgctttgaaactggtggctgagctgcaacacttgaagacacaactcttgaagacgcaactggcactgcattggctcctgtgacgacaatgttgttgacctgaccttgcggctgctgatgcttcggcttcggacactctcttgcaaagtggcctggcttgtaacagttgaaacatacctgctgcttccttccactactgttattctcctgagactgatcctgctgaactggcaccggctgattagcttgcttgatgttaacttcattgctttcattagtctctgatttgatctcaccaccgatattcaactgttgcgattgtccttggccagcggaaaaaggttcaccaatttggagtggcttgatacgctgcctctggctactaccttgtgcctcctggaaaacagtcattttccttttacggttatccatcctgttcttcttgtcttcaagtcgaattgctttgtcaaccaactcctgaaaatcctcatagtcatgagagatcaacataactgatagctcatcctttaagccttccaaaaacttctcctgcctttcctcgtcagtacgcacatcttctggagcatagcgagctagacgattgaactcatgaagatattccgtcacggtacgatccttttgcttaagtgcccggaactcacgcttcttcaaagcaacaacacctgcaggtatgtgtgtcttcttgaatgcttccgtgaactccgcccaagtgattggttgtccttctgctctgttcatccggaaatgatcccaccattctgatgcaggtccttgcaactgatgtgaagcgaaaacaactttctcctgatccgtacactggagcaattccaacttcttctcaatagcgtgtagccaatcacctgcttccactgggttggtagtgctagaaaaggtaggtggcctcacacgaagaaaatcagctagcttgttctgcggcggtggagcattgttgttcccttggttgagctggttctgcatctgctgtatcatcatgttcattaactgagtctgttgagccagaacttgagcaagagttgggttcccttcattgttattgtttccacttcgactggcgcgagtgttcaccatctattgcagattagagaagataggaggagaggggttacactaaagacaagaccttaaccatgttaccactgatctggtgtgtgtagaccattatattgttcaagttgattaagcaagcaacctagtatagttacacactcatcaatgaactactccaatgatggaaatgcaaccatacctacacacaagcaaacaacaaacgttctaccctactaactattcttcaaagacactttggcggcataggttctaaggtaggatccaaacttcattccatcttgaccacttggcacttcagatcgaccatcaccttcttattcatcgatccacttgactgacctccataagtagacctcactggcgtcttcaagtttcaacaactagtttcagaaccacttaagttgaaagcaggaggggagaggatgataaaatgatttatacagaattctagagaaggaagaaaggaaaattttcacaaatcatgttttcagaaaatttgtccttaaggtttgaccatttggcttatcctacagtcgagatggctctgataccaacttgtcacgcccgaaaattcacaagtaatttccgaacttatttgtgcataaaatcctcgtccaggaatcagccgaggtacacaaactgacaatttaatatacagattcatcaaattaactaaaacgataaatacttacttaagaggcacttagtcctcaccaagaagaaaattgcagcggaaaataaaatctagcgaagctccggctccactcccacaggcagctcaactggggtataagccaaacgtcttctccttcgcaacttgtcttcaactgaggttgattgattattgcaaggtgagcatatgacatactcagcaagccacacagcaaatatgcaagtgcacaaggataccaaaggaatggcataatattggctcatttgcaaaagcagcatttagcaaaatatttaagagaagtaaaacagtggagtaattaatcagaaattttaatcaacactgaacagcacacccatgctgcacaggcccaaccatcctgaacaaccatacccggctgaacagatctaactccaaaccaggagctaagcaaattattatcaggtataacatccataattattgtgagaggtgtgagactaatcacgaaaaacattgctcaactcgcccataaccgcgggcacggctattcgaatagttttactctggccagaggtgtaccactgtacccacaagacacagcctcaacatcatgtctaccatgcgtcgcgatactggaaagtacccgaatagaggctgtgacaataccctctgcataacacaactcaccacagtgcaccattcctggatcataatcacccccttataaaacaaggcatggactccccagcgacccccgtgggcttatttccgccacttctcagtctggtgctccgcaatgaaccatgctatacaaaaggtaaagccgttgcccacgctggcttgtggttggcacggttaatgtttcacaacagtagctcgcgaaccggtccttaattgccatgagcacgactctcaaaaccatgtgctcacaacccaccattatcaagttttagttggcaagtaattaattaaccaatcacgattgaccatcgtgagctaccattaaaccatcattaaataataatgaatcataagttatcccaatagtgtgctaatgtttctaagcatggctaagcaatcatatctaatatctagttgaaccaatatatataaagctcaactagtccaattataatcacccaaggtatcaaggaataaagtaatcgagaacaaaagggccataacaaagaataggttaattccacccaatgacattcgaaaataaatgcacagttgaaataaatagagaatttaaatataggatcaacatgctcaaaggattgtgtttaggatctgtgtgacttgccttgcaataatcggtcttcaattaatcttcttgaacactcccgacgcactcgcgaaccttcgcaacgacggaaacgacaagctatcacgcaaaacgaggaaaaagactaataaaaaccaaataaacaatacataaaaagtaaacaaacatgtagatcatatttttagatgaattatgagacttgaacggcctcattctgacttcaaatgaatttattaagaattttacaagattaaatctaattaaagcccatttaaaaagaattaaataaatttaattcaatttatggacaattttaatatgtagatctttattttaaacaacttttgcaacttgaaccacattaaactgagttaagatgaattagttatgaatttttaaagattaaatcggattaaaacctttatatggattttaattgaattatgacgcaataatgaattatttttgaaaaggaaaagaaggattattgcgtcagcggctagggtttcggtggaccgggcgcacgggcgacggttcacgggaacggacggccgagatcaaccctatccaaaacggacggctgagatcgatcggtccacgaccggctcacgggaaaagggacgatgacgccagcgatgacgtcaccgacagcggcggcggctcggcggagcggacagctcgggcggcgcacgctcgccggcgaacggcggcacttcggcacaaacggagggcaccagcacgtagaggacgacgcggcgaactcaccggtgaccaaaacggcggcggaagaccaacggacggcggcggcgacgaggaggaagcggcgaagctcttcgggtcgacgacggcgacggcgctccgacggtcttcggcggcggcgaagcggtggacggggacagcgatgacttggcgaacccgatggtggcgacgtgtcacgcccagaaattctcgaaccagaatttctaagctgaatgtgcattgaatccctgtccaggaccagccagggtacacaaacgacaattgttgacatacagatccacgtcttacaaaaatagaaaagattacaaatgcagcggaaaagataaaagcgagctaaaccgggaagcttgacttcagcagcgggcgactccactccacagacaatccttgacggcagcgacgaaaccaaatttgacaaaacagctccaactaggaaaatcttcagctctggtgtgggggaaaagagagcaagactgagtactacccactgtactcagcaagtcataccggtagaggaggtatgatgcaggatataaccaaaggaggctagaggttcttttgcataaagctagcatttaaaagcagtagttgaaagcagtaaaacagttgtagtaattaatcaatattaaccaaacactgtccaacgctacaccacgttgcaacaggcccaaccaaccacctgaactacaccagttcattaagctaaactaggggtgagactaatcacggtgaatctggttgatcgcccataaccgcgggcacggctattcgaatagttttactctggccagaggtgtacaactgtacccacaagacacgattccacacatgtcgccatgccccgaagtatcaccatgatactgcaaagggggaaatcgtgacaagaccctccacataaccctcccctaaccatccacaccacgctaaggtttcacccccacccctcaaaaggcagtgggcggtcccctcttgcgccgcggtgaatccggcagctggacaaccggacaccccggccgacccaactccatcacgcccaccctcgccaccggtgcctaggaaagggtcgagctatacttcagatcaagcagttacccactcccgcttgtggtaagcacggtaagtctcccagggtttcccgtgaaccggtccttaactgccatgggtgcgaccagcaaaaccatgcacccacaacccaccattcaatgtattttaattaactaataccattgcggtggcaccaatccaaagctatgctcatagtcaaagtctatgtaataaggtgatccccatttgtgtgctagttgaactaagcatggctaagcatttcctaaaccaacatctagtcattttgatacccaggttatcaatggcatatggtaaacaataaatggctgagtaataggacccattccacatgatattgtaaacgaatgcaacatttaatagaaatgcgggatatttgtaaattgggtacaatatgatcaaacgtattgcatgacttgccttgctctcgcactgacgagacctcagcaacgtcttcgagaaaccgtggatcgacgaaacggccgaaacctacgcgacaaacaaagcacacaagcaaaacaggctataagactactgaaacagagaacaaaaccatttttaatggattctacacatttttcttgatttactgagacttgaatgggattaaacggagctcggatgaattagatatgaattttagaagattcactgtgtttattactataaaagaaatccttaaataatttattgcgcaatattaaccagggctgacgtcagcacggaggggtgcggcgccgacaggcggggcccaccggtcagcgaccgggagagagagaaagggggtggcggcgcgcgggcccactggtcagcggcacgggggaaaggaggggcggcggcgccacgtggcggccgaaccgacggccccgatctacccaagggtagatcgccccgatctacccaagggtagatcggacggcggcgggacctctcggccggggcgcgcgggcgcggcgcgagacggcggcgaccatggcgccggcggcgcggcgcccacacggcggcggcgcgcatgcggcagcggcgcaaggcggcgaccgaatgcgaccgaccggctgtggggagcggcggctaaaggaggagcggcggctacgcggctaagcggcgcgcacgcggctacacggtacggggaaaaggagaaaggggagggggaagcctcaccgacaacggtcgacgacggcggccgacggaggacgacgacgacggcgggacgagctccggaacctcctaacgaacaaaaggagagggattagagagagaggaaagagcgtgggagggcgagagcgccggccgaaggcggcggccatggcgccgcttgccggcacacgacggggatgggtctccggcggcgaacctcgacggggaaggggcggccaaggtagatctcgaccccgcgaagctaacggcggcgacggcgcgagacggcgacgagcctagcggcggctagcggcggtcggagtagcaaaagcggcggcggcgggtggttgcacggcgcggaggcgatggggagctcgggagagatcggcgaaatggggaaaaagcgagagaggaggacggcgatgcttaaaaagggggagagggagccggacgtggccgggagcggcgggattcgacggccgacgtgggggagtggggaggagagagaggcgggattcggttttcgaatcccggccatctcgggcgcgggcgcgaacgggagggagaggggaaagggcgcgggagacgcggcgcacgcgcgggcgtggccgacgtggcccgggaaaaacggaggcgtgggcgcggcggcggtttcggctcggcggcgcgccgggatcggcgggaggtgggggaaggacccgacaggtgggccccacctgtcggcgaccccgagaaaggaggcgggcggcggctgccaggctgggccctcggcctgcggccggcccagcaaggaggagggggaggaaggaggggaatgggccggcggcccatccgaaaagaaaaaaggagggaaaaagggagggaaaagaaaaagaaaaaggaaaaggattttccctggaattaaaaattgcactttggtgatttttaattggttaaaattatttccaaggctctgaaaaatccactaaaaatcctgttaatatattgtgacatgtagaatccaagaaaaattccacatgccgattccgattattatttgcatttattaattagggaattagctctaggttaattaagataatttcttcggacgatttatttagccaaatttttaaagcaagcaaaaaggggaaaacttcagggcgtgacacgacggcgaccgacgacggcgactgcaacggcggcgcggcgcggctgaaccgacggcaacgacggcggcgactagggctacgcggaggcggcgctagacgcgacggcaggctaaggcaaaggaggcgacgggtagaggggagctcgggggtccttatataggtgcaaggaggcggcggcaaaggcccacggcggccggcgacgagaaggaaagctcgcggcttgaaggaaagaggccgatccgaatcgaactctattccacgaacttccaaaacgatttagccgatgtttccaaaggagaaaaggtagaggagatcccggagattgtttcccctcaatcaattcggccggagaaggaaaggagcggccggatttggaaggaaacggcgacggcggcgcgctagggtttcgggcggcagcggcggctcgaggaagacgaacctgacaggtggggcccacctgtcagcggctgagagagaggagagcggcggctcggcggactgggccggctgggccgagggaaagagagagaagggttttgggccggctttcggcccaaagccaaaagaagactttttaaaacctttttcaattaaattatttcttaaatgcaattccatttattaaaaatacttccttagctcaaataaatcccagaaaaatctaggaattatagaattaagcaaagtatttaatgaaattttatctggcccctttttatattgagatttagcaaattaaaattagatcttctcttttaggcttttaaaatcatttctaattattccttttaaacaacaatttataagttaaggatttttaaacaagaaaagctcttaacaattatacttagatcattaatgatcaaataattactgaactgttctttgtattatttaagaattgagctctgaaaaaaaaccgagaaaatttcagagagttgacttaaccatggagaatttaacaaaaattaaatccatccatgctttagatttaagaaatttttatttcccacattttacttcacttgaaaattaaagatcatttaatataaattctattaataatttattaaataatttataaatcctgaaacgaaaatcaggatgtgacaagacatgaccactctttcatgacttgattgacaaccatctgagagtctccacagacgattagtcggcgaatacctagagatattgcaatcctttgtccatgaagtagcgccttgtattccgccacgttatgggacgcagaaaaatgtatccacaatacgtagctcaatctttctccagtcggggagattaaaacaaccccagctccagtgcctgtaagcctcttcgacccatcaaaatacatagtccaatattccatcttttcctctggcatgtcttcttggcactcggtccactcggcaaggaaatcagctaaagcttgtgacttgatcgaagttcgtggcttgaacgatatgtccaaagacatcaattctaaggcccatttcgcgatccgtccgtttgcttcgcggttatgaagtatatccccgagtggaaacgatgtgactaccgtgactgggtgactttgaaagtagtgagataatttcctaacggtaattaagacaccatatagtaacttttgaacctgaggatatcttgtcttggagtcggctaaaacctcgctaacgaaataaattggacgttagactttttgaacatggccttcctcttcacgctcgacaaccaggaccgcactcacaacctgggaggtcgccaacacatataacagtagcggctcttgcggatgtggcgaggccaaaactggtggagtggtgagaagtttcttgaagtcttcaaaggctttctgtgcttcgggtccccactggaaattgtcagtcttctttagcagcttaaagaaaggcatcccccgcttgccgagtcgtgagacgaaccggctgagcgccgccatgcaaccagtcaacttttggacgtctttttgggagcttggcggtttcatgttgagaatggcgttgattttctccgggttggcctgtatgcctctttgagataccataaatccgagcaatttccctgacggtactccgaagatgcacttttccgggtttagtttcatcttgaaagcacgaatgcttgtaaaagtttcttctaaatccacaatcaggtcatccttctgcttggtcttgacgactacatcatcaacataagcttcaacattgcgaccgatctgagttgaaaaacatctttgaatcatgcgttgataggtcgctcctgcattcttcaatccaaagggcatggtgatgtagcagtaggccccaaagggcgtaataaacgaggtcttcaagcagtcggattcttttagtcggatctgatgatatcccgagtaacagtccaagaaactgagtaacttgtagccagccgttgagtcaaccacctggtcaatgtgaggtaacccaaaagggtctttgggacaagatttgttgaggtcggtataatcgacacacatgcgccattaccccgtctttttccgaaccaggactgggttagccagccagtcgagatgaaggacttccttaatgaagcctgctactaacagcttggttaattcctccttgatcgcatccttcctgtcctgtgcaaaacggcggagtcattgcttgatgggtttggcgtcttcgttaacaagtaaagagtgctcaatcacctctctggggataccaggcatatcggatggtttccacgcaaaaatatctttattattctgaagaaaggtgatgagcacgctttcctatttacaatctaactcagcacctattacaacagtcttatcaagatcggagggatctaagggaatcttttttgtcttggcatcactttcttcggtcttcgtcagcttggttgaaggcacttctccctcgcttgccgtggtcgcagccagtcggatctcttcgcgggcgagagtagtctcgtgagtttgggccatctcgcaactttctttgtcacatgtgacggcttgcttgatgtcgctccgttgtgatatgacccctcgaggaccaggcatcttcatcattatgtaggtgtagtatgggacggccatgaatttggctagagccggtcgtccaagtatagcatgatatgctgtctcgaaatcagcaacttcgaaacaaacattttctgtgcgaaaattctcccgagtgccgaaggtaactggaagagtgatctggcgagtggtatagctgacaatcctgggataacaccgtggaagggtgcattactcggctttaattccgtgcgaggaatctgcatatcgtccagggtcttagcgaaaaggatgttgagtgcgctgccaccgtcgatgagagtccgtcggagcttgacattgcgaaccactgggtctagtaccagggggtaccgccccgggtggaccactcggtcgggatgatccgagcggttgaacttaattgttatctctgaccaccgaagatattggggcgtgctaggctgaaccgcattgatctcccgctctgttagcttttgttttctcttagattcataagccaggggtccgccgaagatgtgattaagttctttgcgatgatcttgaaaaccggtcggggcatcgtcttcatcatctttcttctttgatgtgccttgatctccgtctgagggtttacgtgcgttcttaacgtattgctccgcgaactgtttgtagacgaagcaatctttggccacgtggttggagttgggatgatgcgggcattgggagttcattatcttgtcgaaggtgttgacacgagaacgttgtcgggaagatggagaggtggtcgccacaagttcttcgagcttacgcttgcgatccttgtggtttttacttccactccctcctgcggtcggcgtatccttctttggcttccaagtggtgcccgactgcttggatgtcgtgatagcatcttcggctttggcatactcattggctttttcaaacatctgtttgaccgtcttgggaggtttgcgtccgaacttgtcgactaggtcctcgtggcgaatgcctttagtaaaggcggcaatgatgacgtcgtcggtgatgtcggagatcttgttgcgttgctcagagaagcgtcgaatgtaatctcgaagagattctccagacttctgaacgatgttgtagagatcgaagtgtgtgccgggccgttcaaaagtaccttggaagttggcgatgaagtggtcgcgtagctctgcccatgatccgatcgtgtcgcggggtagcccgtgaagccatgaccaggcagaatccgctagggccacaggtagatagttcgtcatggctttgctgtcccctcctgctgcgcggattgcgagaccatagacggtgagccaagactcagggttagtggtgccgtcatattttttgattccagtcggcttaaagccggctggccaatccactcgacgtagatcgcttgtgaaggcagcaactccgtccacgttgtcgtcgtagcgatccggtgaatgatggcctcttgctgtgcggcgctggttgatggtgtcgcgaagatcgatgggacgtcttcgatgtggggagtgtggtcgttcaattcggcgctccctatatcgctcgggaggcgagcgaacggaccgttcatcatgtcccctgctcctgcgactagattcggcgccggcaatgctgaggcttggctggtgatagtcttgagatcgaagatgagggactcggctaccagtcggggtgcgggtgcttgcagagttggctgggaccgaggcagcgatcatggtcttcgtctggttcaagatgttgactacatgatcagcttggttgagtgcgtcttccttgaggagggtgtcgaggagagtgattgctgcaaccgcgttctgttggggggtgcgaaagaccgctatcccatcgacgtcttgttgcccaatgagctctctcgcttgccacccagattccaaggcgcgttgtcgtcgatcttcagcctcctttgcaatccgttcgcgatcttgttgctcacgctgtagtcgttctcgctcttgtcgctgtcgctcttcctccaatcggcgacgttcagcttcttgccgtgcgcgatcttggtccgcttctcgggcttggcgctgttcctccgtttcgttgtcagccatgaatacgccgaagaagaggggcgtgtagttatccttatagctgtcgtcgaagttgtcgaggtcgccgtggtcgtagtggtagccgaaatcgtcgtagtcgaggatctcggttggtcgagaactgacgccgggggagctgaggtagccatccaactcttccgtcgagactgtcccgagaggttggagtataacgccaacctccctggatctagatcggatcggggccgaagccggagctcgcctagatcttcgagtgggagatgtcttgactgtgaagacagcggccaaatcatcaggaagtttcatcaggattgagggataggacccgtcgtcttgatctggtcgcggaagagtagattggatctcatccgagtggtttgaagccgactcgggagagatgatcttggagtaggcctcggccgagttcggaataccgaacggcacagggacctggtctctccccgactggtttgaatccgagtcaaggagagagatcttgccgaagtcgttggtgatgaagttgaggctgccgaaccggaacgcctgcccgggaggaaaggcgaagtcgtcgatgccagaaacgaaacccatcgcacttagtcggcgagaacttgacgctacccctacctggcgcgccaactgtcgaagcaagatttcggcaataataaaagggggtggctgtcaagctaggaaaatggatgggtttggagacaagaaattttatacaggttcaggccttcttattaaagaagtaataccctactcctgtccggggatgattccgccgagtgtgttattaattgtatagactgggaaaaagaatcacctcccaagaggcacgcggaccctccttatataggggaaggagtccgctttacaaaatacagtccatatcctaacggaatatgggattatagataaaatacaatcgtaaccgactaagatcccgggtatttccttgacatacaagtttagaacctaacccgagtcttcatagagatattccatctatatttgataccgtatatccgactaaattacaaccgtcatgtagatatggggtatccataatctccacaagctggcttgtctcgagctatcttattgggtcacatgacggtgttaaattttgaaatagatctaaggaaatcatgcataagagaaaatagccaaaagaaaataaaagacacaaatccaatttttaaagacttctcaattatctatctcttaaagataaatatagagaatatccataataaaaggaatgccgagaagcaaatagaaggcataacatccagattgtaaaggcttcccaaaatatctttcccctttgcaatctatcaatcccatgctggttggttttatgccagctgattgttgccctcaacattctttagttgagcgacacgtgacgacatacaagcgtcgaaaagagagccggttaataaaccctccctataaaactggcaagcgttcagttacaacggtgaatagaaaaacaagagaagagttgttccacgtgtcgtgaccacatatcctatatttggagaaactaaaagcaataaatagaaaaactaaatgacataaacaataaactctataatcctgataaccaatttctaaatatatgtattttctgcttatactataaataaataatatgtagatctttacgctacaattataataaaacaaatattaattctggtgttggatttatacctagagttttatgtcaaatctaaacaccataatgctcaaaatcataaaagaaaaattgaaatattagtatattaactatatggtttttaaaagccatacacccaagctaattagtggacgcgccaaacggcgtcttgattttctaatctacattattggtgattagtgaacctgaactaaaatttcatgaagtgcctttttttcaagttcacttagaaacttgtgtaaatattgatcacctaaaatttcatatataa

SEQ ID NO: 5881 - DNA, 30483 bp, Oryza sativa
  unsure (1)..(30483): unsure at all n locations
tggtatctaaagagggatacaggccaacccggagaaaatcaacgcctttctcaacatgaaaccgccaagctcccaaaaagacgtccaaaagttgactggttgcatggcggcgctcagccggtttgtctcacgactcggcaagcgggggatgcctttctttaagctgctaaagaagactgacaatttccagtggggacccgaagcacagaaagcctttgaagacttcaagaaacttctcaccactccaccagttttggcctcgccacatccgcaagagccgctactgttatatgtgttggcgacctcccaggttgtgagtgcggtcctggttgtcgagcgtgaagaggaaggccatgttcaaaaagtttaacgtacaatttatttggttagggaggttttagtgaggttcaagtnaagatatcttnnggtnncaccccctcagcaatgcatacatatcatgctgctaacgatataaaaaagctgacacaacggaatccataactacatagtagagaataagaataaatacaaggccccgtttagttcccaaattttttttcccaaaaacatcatatcgaatctttaaactcatgcatatagtattaaatatagataaaaacaagaactaattgcacagttagggaggaaatcgtgagacgaatcttttgagcctaattagtctatgattagtcataagtgctacagtaatccacatgtactaatgatggcttaattaggctcaaaagattcgtctcgcagtttccaggcgagttatgaaattagtttttccattcgcgtccgaaaaccccttcctacatccagtcaacattcgatgtgacacccaaaaattttcttttcgcgaactaaacgggtcccaagctgaggatacgctacctccttttcgatgttttgattccttgtctgatgtggtggcagccaatccattctttcctagtggcatccaaattggggacaaaggtgcaatgatgcctgcacaacacaaccacacaagtgagagttttggcaggtaccgatcaatggataagagtctcctagcagccgatttccgttcgattgaagacaaaatcagcgtggacgcggatataatcacatgacatcgtaaactccaaaacaatatctgaacagttcgcttggctaatcactagccaactgcaccagcgcgacagatgcaaaactagttcacgccaaaattggaagtttggttgaaattggaacgatgcgatggaaaagttaaaagtttatgtgtgtaggaaagtttcgatgtgatagaaaagttggaagtttaaagaaaaagtttggaactaaacaaggcctaaacagggtacaggggtggggacttgggtgtgttgtggtggttaccttccgggttccggcgcatctcgacggcggcggcggaagactgcatcacccgcggtgagcactcatcgccgacggatctcactgctttcgcgctccccaactctacactctggtggaatggtagagccaataggccatggaaaaatacgattagggagcttgcgcttccagcggaagagagagcagcgaggagatgcggcgactccggtggggaagaggctcatggcgaggccgcgacggcgaggcggctgtcggcttcgccggacgagcggcgggaccccgggagagggagatcagagagccaaaatacaaaaaaaaaaaaaaagaacggaaacgaacacaacgtggccctctttgcacggtccgatgcggatcggagcaagggcccaagaagagattagtcgaggacgaataaaaaaaagagagagagagagagagataagtcgaggacggagaaattccccaagccgccgccactaaccctagcttccgccagcacggtattaaaacccttccgctctaatttcctcgcaccattgatttttgttctgtgcgttcgtttcgatccaagtagttccccaacaatcctgctactgcggaactgccgattttgctgtcagtttattttgatcgcaaacagtaaatattagccgagcgtcgtttggcattatctttcaattccatgcttctttcaaatttgacccatcatgcatgttatcaaaatttactagagacccagaaatatgccgatgttctgtggtgacatacctatgtcctgttttttctagttagtttgcatgtcttgaaataggcttgtggaaagaacttgtgtttcgagcttcatgttagagagtggtgggatggcaccctctaataggccacttgaggtctctaattcttttgttttcccagtctgagtcagatctgtgtaagaatcttacatttctagtaatagaaattgggggttactcccttgttttaaaaaaaaaaggaaagacccaaaaaaaattcactagactaagggcatgttgggatggtagccattgccaaaattttggcgaagtgggtttgtttgatttgatgtgaatatatttggagctttttttaaaccttgccaaaatattggcattgcaattttccttgtatcaaaccaaataagtgccttgccgttaccaattttttgtgttgttgatttaggcacataagatccaaagtattcatcgtttcctgcagggtgcagatcaagttccaaatcaacctgattggtcctcaactttgagggtaacatgatgcgagacagcaagaggacgaggtccgcaccacccagagaaccactggaaatgacagaggacatgaccccaagaagcaagaggaggaaatttgtaccattcggagaaggtgcggtgctacctgaggagatgctgacggaggtgttcctacgactgcccattaaatccatccttcgtttccgggctgcctgccactccaggtatgcaatgttgtcttcccaggaattttgtcaactctacatcacaagaactgaggcaatgccaccacaacctaagcttctgtttatctcgcctacagcaaatttcaactccactgcggtgtacacgtgctcgccatcgaagcccattgatgacctactgttcacactcgatgatgtgcgtggaaactatgtggaagtggcaccttcaccatgccatggcctcaccctcctgtataatgctgttgcgccagcttactacgtcttcaatgcaactacacgggcaatcacacggttgccaccttaccaagatgtgattcatgccactgctggcgttgggtttgatgcccggacgaaggagttcaaggtggtgaggctttttcgaggaaaatcgcatgagatccattctgtaaagtgtgagatattcattcttgggggtgaggaaggggatcattggaggcctaccgctggtggagtacctttcaggttctgtagttttgctctttctgctatccgcaatgcagtggcgaacaaacttcagccagtttttgttaacggatttctccactggttgatcaacccctcgtttttactcaaagcaccaagagctgctatcatatcattttctctcactgatgaaaccttcagatggatccgatcaccaccctttgaggtatccagagtgcacttggctgagcttgatgatcagttgtgtatggtccgagaccttcgtaatggcttgcctactggtagcatgtttgaaatttggaggctgaatgactataactctggtgattggtcgcttgattaccgaattggtttgacagggaatttgccaagagatttacttgagccacgaattgtgaaagttattggttcctttggtagctacagatcaagcaagaagataatcatcgctacatctaagcacaaggtgtgtgcctatgatccagtttctagaactcttgaaaccattgtctcaatcatggtgacctgcagtgcctatcaaaacgagaaatctgatattagattcagttcatttacaaagagttttaccccagtgcataggacgaggaaagagatagggttctctactcccttgtctaaggctactaaggagatcctactccgattaccagctgaatcaatcttgaaattggaacttgtttgtaagcaatggcgtggattgataaagaatgaaggttttgttcatgcatactttgagcataagaacatggacaggaggccaaagatcatgcttgtgggtaagggctctgaaaaatcagttttcaactttattcccttgagtaaatggctccaagaggcaaatctaggcacaatgtttctggacaaaaaggtggtttgctccaagccttgccatgggttgaatctggtgagcattgagatgaaagactatctgttcaacccgtgtacaggttaccgcatgatctactagaacagagaccatcagctgtaccaggaatggtccaatttgtctagtgatcgctgcaaagactacaatccttttgtagttggcaataagaatgttggtatggggttttgccaggtgactcagagtcatgccgttgtgggaattttctattactggaaaaactacgaatctcatcagtattacttaacatgcattatatggagttgtagctcccaaggccagccactccccgatccacctctgcctgtgaatgacatgccacctgtttctctggatggtgtgctgtactggatgagtgaaccaaggttgggtcagagttatgagcgggccattgtcttttttaacattgccgctaagatttttgatgttatcccttgcccttcatgcattgcaatctgggacagcagaaatccatgtcacgcatttgtggtcgagcttcagggaatgttgtgtgctgtcctttcaaatccagttgcagataagttagatatatggaagtgggatcatggtctgtggagtatagcatatgcaatcaatttaaaattctggccagattattcccttgcgacaaatgttgtagtgcctctcgcagttgacccaatagatggaaaggttctactgaatactgggaggaagcttggtttatataatccatgtgagcaaacaatcgaaaacttgcacttgatcaggcgtcgcagcaacagaaccctggagttaacagaaatttccacattgccagatgccaagatgttcctaagaagttctctcagtggaaactattattggctccgtgcgagaagtttgctaacccttcaagtgcttcatcagggaagaatccattttactccagagaccaatctaaggagctaaatagtgtgagtcaaaaaattatgcctctggttcctatgttgtacgaggagggtttagcttactatcctacaactcctaaattgagagtattgtgcgattgaagtgttgtcatattatgggcctttttcatggctcttgttctgcctctcttatagctggagcgtaactaatatagatggccataaggcccgaggcctgaaggcccggcccatggcacggctttttggcccggcccaaagcacggcacggcctgacttggatcgggcccgtgccggccggcccgaccgccgggctgtgcctgggcctccccatcggcacgctgggctggcccggcacggtcgggccagcctggcacgatgggccggcaagccaggcccggcagacaaaatatagggactaaaaatagacataaatgtcactgtccaaagaatagggaccttaaatagacttattttagttatttacatatcacagcccaaagaagagggacgtaaaatagacttttttagctatatataagtcacagcccaataggaggaaggaaaattatacttattctgaggaaaagcacgatggcccatcgtgccttcgggccggcccgacacggtccgaggcgtgttgggccgtgagtgcggcacgtgggctggcatggcatggcccgatgcatcggtcgggccgtgctggcccgacaagcctcggcccaggcacgaccgggcctgggccgtgccgtgccgggcggcccacatggccatctatagtaactaaacggttccagctctatcaaaaggaagtgaaattagttggagtgctctcataaaatgaattattagataggtggagagttgggtttaggccgctttcgctccaaatccaacttatgaaattaaatttaagagttgaagctcatatatagtagctaagattttataatgttaaaatgccgtggtatgtcccgttaaaattgtagtcaggggtgaagctagcatcaaaacaaggggggtgcactatcattgagaatctacaaaatttcagtacaacactgtatattctaatttttttaagtgagaaattaggaatttaggggttcatgtgcatcccccccccaaacactatatagcttcgccactgattgtagttgtcatttcaagcccagcttttatagctcaaagaccttaacattatttcctactccatcactgcaagaatgtaaaggcggatgtgaaagcaacttcctactcaaatgcaagatatttcctattttcagctttctcactcgtactacgtattttaacgccccttgtttcacttacatttatacttatccgtgagatttattaataaaagaataatttatgtataaaacttctatatatctgtccttagcaattttaaaaagtaaaccatgatgaaaaattcacaaaattaactcgaaagttaagttttaaaatttaaacttcggcttgtaagaataagcgatagaatggtgctgtagattatatactcgtgtaacgatgaggtttcattgcctgagatcgagtgcatcatgtctcgagcagtcaaatattagagtttcctttagcccaagtcataactagatggattcacagttgatgagctgggaacactgggcgaacggggtgagaacggtaacggtaattcccggctgaccggcgtttgtttctgactttctaccggccgagccatatgaaaatggtaatcgaccgaaaaaaatatgaaaatggtaaaatatatggaaatggaaacggaaatggttttattgttttaccgatcgtttccgtatttaccgtattcttgtggaaattaccgtttcttataatatgataattaccgtagttctaaatatgtcgatatttatagggcatgtctctacttgacccatagtttagaggttgaatgactcttcaatcaaattcctaacttgagtgcatggctaaaatggagttaatttatgatttatatagtatagcttgaatttatttgtacatatatcatacttatgtaaagttttctatagtttaatgttttcatatttgttaccggtttccgatttgtaccgacatgtttccgtccgtattattccgttttcggttttccgatatttccaatatcgttttcatttccgactttaccgttttcgatatcatttctgagaaaaaaatgattatggaaatggttgaggtgttttcagatctttcatatcgtttccgaccgttttaatccctacgcgaacctaatactcctcctagtagtcaagaaagtcactgacaaaagctccctacagaaataaagaacttctgtaattaaatttctttctatagaaatatctgaagactttatctaggaattttagatagagatttttactataaatttagaaatcttttttaacgaaactttctatagtgaatcctttcacaggagttaaaaatagagtaaaaacctctaatgaacattttgaagaaatttctattaaagcctctgatgaaaataattctctaccttaagtagaacaaacaaattgcatttttaagtttcaatcagctaaaagtacttcgtctatctcaaaatataagaatttttagtaagtttagaacaatttagggtgtgtttgtgtttggtttgagggatcatgaatgggagacggtgatccaacttttaagcaacaatcaaaaacataccatgccccttattgaacaggcatggcagatggcatcactcttgatcggtttaattgtcggcccatcttgactggtgggctaatctatctataccttaatagttacacgctcgcgcatatatacatatatatacatatatacatatatacatacatatacatatacatatatatatgtatatacatatacatacatatacatatacatatatatatgtatatacatatacatacatatatatatatatacatatacatatatatatatacatatatacatatatatatatacatatatatgtatatatatatattgagggaatggttagttcatatctaataattggatggttacaaccaaatacttctacatagaatgccaaaaaaaaagtacttctacataataaaatttaaacgctagacatcctaaaatattttgaaacatagtgagtaatattaaaaacaaactggtaggaaatcattagctcactgaaacaagccatcgatcaaaacctcgcctcctagtcctacacccatggtctcttgatcgaggtgttcattttttttcctcaatcgcctcctacaaaacacgccggtgttgcacacccgccaatggtgtggaacgctgcttagagcagatacaatagcagactattaactaattataaacatattttaatgaaataaaagataagagagaagagcaatgggctacagatatatagtcagttgcagcacggactctaagacgcaatgtggatatgatgggtgagaccatatattaatagtatagtaagtaactattttatgaattaggtattaggtttggttatagatgaattggaggtagtagtgaactgtactattaaactttctcttatgtattgggctgtgtgggtcaagtacgcctcgctttgcgtcgtcgagactcgacaagacgagaagcgtctacagaaagctgggcctcgacccggcccagaaaggaaggaaggggaaaccaacccaaatctcgcttgcgcgtcaggccggcgtctccgtgattctccccgtcccgcggcgcaccggcaccggcaccggcaccggcggcgagatggcggactgggacggggtcccggcgagggagcggcggcagatggaggagatcctgcagctcgatatggaggagctcaacgtggagatggtcaacgacgacggctcctcctccgaggaggcgaacggcggcgacgacggcgccgacgccttcctcaggtcgggcgacgcccctccctcgtttcgccatttttttaccctctctgatgcgacctagggttctctaagtagaaactgggtcgcagcgtacttggttacctgctaggggtggtggtactgtgcatttctactaggattgaaatacgtcaacctaagaattcaattcaaccgatagcatttcctgtccgagagagtgaggatgggaggcgttagcttatgatttgatgtttgtttccctgatctcgcatgtggaggattggtgatttcagctcgggtagactagagagcgtagggatttgagggaagggggttactaggggaagccacgatccttgtcagtgtgtacccttgagccttgaccaaagtttcactttgggcatattgatttactctctgattttttcaatttattggtgggtgtgctgtgtgccacgatatatctgtagctcatggccagatacctggaaaatttttgtttgttagtcttaactatggttttgagagatttcacattgttcatttcctaattcctgattatcagagataccgacagggaaggagtggctagcacttctggacaattcacattcaacacatctctagcctcgttgcacacctatcttggtggtaaatgtcctcgctatccttgctatatgatgtttgatgctgatagaaaagaaagtgtaataagactctttatgtgtcactcagaggttgatgatacacggggtcgagtttctctcttagatggtggcacaatcctcagcttgccaatgctatatcttcaaggtaggtcttgtatgtttgtattttatttcgttaatccgcaatcttgattatcatgccagcgttgaagacacactaattagtgatcacaatttttttttcatgccatcatttctccatattattttgtctgcatgccagcccttctaagttacattcttttcttttgaactcacttgacataacctggtctattaacgtatccactgttattgttaatgttaaaaagagcttgagcaatactactatctatttatatagacttattatttcagaggaattgcacataccatttttagtcactatttcctttatattgcagttatacagccatgtgaatatacggagtactttgtagtgagtttaggacctgaggtttcttttgataattgataatttcttaatgcatatgactagagaagtggcatccaataatctaaaaggctacaagcatccctaaacagtgttgttatgtcgacatttttctgttccagtcctgcgggttcatgatacaattggatattaactccatgggcagtgaaatatattcttaattttaaatctggaacataagaacaggcacaaatccttacctgtctctctcctgactaatgcataacagtgatagtgtaaatgcgacaggatttttctggtaggttatcaagcatcaaatttattataatatgaatttgtttcaggtgttgtcctatttcctggagctaccctgcctctcagactaattcagggtagatttgtagcagctgttgagaaagctttgaggcaggtcgatgctccatgcacaattggtgtggtaggtgccagtctgttgaaattaactaattttatttgttgaattcctttccaatgacgcagtttaattttcaggttctcatgtacaagcgacacagtactcgacattatgctaatgcttcagttggaacaacagccgaggtgttgtacattttctctgctgtgcttcaagttagaatttgtttatcagttagtcattttcaccgattcttcatgtggtttggttgttttctgtgctgccaattgagcttttccgtagccagttccatcatccttgggtgatttgttattatttctacaggacacataagttaccctctcgtcacattttgtaattaagatgatctgcttaataaataaaaacatgagggagttaatttatatcattcaagaatcaggacccagtcttagcagttagcatttaatatttcttgtaaatgggacaattgaatcattcatttagaatagactgatatccaatatttcagaatttccttcacttggtcacaatatctctatcaaacttttggagaatcatgtactcatctagttttctgatacttcacaagatctagaagaccaacagaacatataaagccccatcgtttggcttatctgcggaataagccaaacggcgtatttgcaaacgaaaagtaatttgtgaataaaacttttatatacgtgtccttagtgatctaaaagcaaaggctgaaaaataaacttcgatgagaaaacctcaaaatcggcttcaaatttaaggttgaaaattcaaattttggctgataagcataagcataagtgaaaagatgaggccgatatgcactgtgatgtcttgtttacatgtcaagctcggtcattagccccttagtatgatttatgtataaagtgatgtataattcctttcgaacagcctcacaaggtaagctggtattttgttatttctttaacagataagacaacttgggaggatggatgatggttcattaaatgttgtagcccgtgggcagcaaagatttcgtctgaagcgtcattggatggatgttgatggggtggtaagtataaatttaattgaagatatattattctgaattaggagctggagagaagttaggttcattttttctcactcaacaggtgtggggtgatgtccaaatcattgaagaagatactcctttaagaaccccaagggatgcatttgcacagctagcatcatgtaacagtttacggcagcatacctcctcaccagttatcagtttggatgtctctccaatcaaacaacgggatcatgtggattcagaattggattgtggtacaccatcacctaaaagcactgcaagcaatcattcagcgattgattcaaggatgtgccattcagattcacgatccagcagttcaatgagatcttctaatgaagatgggattttcatgcatgagcagttttacagccaggagctacatcctttaaaaggaagtgcagcagttcagtcaggcgagaataccaacatgggtgaggaggatttttgtttaacatcgctcagatccttgtcaagtgcaggaacaagagatactaaggagcagcgtcagtacattcttccaaagcaacattttcaggcaccattatcattttggcctcggtgggcttatcaaatgtacgattcatatgcacttgctcgtagggctgcaggtaaagtgctcccatattcatcaaactgagccttacaatgcattcttgtcattcatggattcttagcccaacgattgtaaattcttatgttttatagataccactccactagtgtttcccatcaaaaaagaacttcttattggatgattgatcgttttgagtgttattgagcatctcgctctgtatgtttattttaaccaaaatacactattgtcatttgctgcagacctctggagacagataatcacacacccaagcatggatgattacgtgagaaaaccagatcttctgtcattttccattggaagcaaacttcctgtatcagaatctgtgagacaaaagctactggagattgatggaatctcgtatcgtcttcgaagggagattcagcttctcaaggcctttaatctcataaaatgtagatgctgcaaggtaactatctaccatgtttggaattgctaatttatcgagcttctgattggaagtaatggacttattgttggccatttcgttactactttaaaagaaggtgaattgtttatggtggtgttgtatgttaatcatatgagtctgtcacccgacagctcaccattgcaattttttggacaaccccttaatttttcttgaattgcacagtagttaaatatctaactgaatacacatacacagacacacagtatatgagttggtctataatcaaggagtttaagcactgtcaagttctccctgtagcgaagttataattctgttaattggtatcaaccacaagtatttagctagttttccatataaaatggataactattctaggtcatctgtatcgtagcaatttcatttaccatgtcatggcctgctaaattatctgtatgtacatcccattttcatttttcagcagggtatgacatggtacagtttgtcgttgtagaatgctgcagctgcagcattggaagaattagcactaacataaaatcaaactacttgatagttcatattgatttgctgattaggctcatttggctgctaggaaaacaatgctccatgtaacctggttttcgttgatcataaacattatttggaaatggcgtgtagttacatcaaagaatttcaatacaaagtttatcactctgtgttgacatgatttgaactatggcagtctctcatagcaaagcgtagcgacatggtagtgatgtctactgatggtcctcttggtgcgtatgtcaatcctcacggttttgtccatgaaacaatcacagttagcagggcaactgggcttgctcttgatggcaatccttcaacggttcacagctggtttccagggtaaatctacagtttctccttgttctttgtaatcttcatgtccatcatacaccctttaactgtaaaaaactaagttcatgcatgattttcttcttgtaaccaactttgtttctgctgctatgcagatactcgtggacgattgcatcatgtacggactgtgagtccaacataggctggttgttcaaagcaaccaagaagaatctgcgaccgagatccttctgggggatccgtagctcccaaattgcagatgatgcacaagaactagatcaggacgaatgatgctccgtgtacagtagtaaactttgtgtgcccctccctttttcttatgaagttatggaaaacactttattctctggtccataggcctagttctccgtacctgagtagtggtcgttgtgacgatcgctatagaataaccacttcctcctgtgtgtattacacaaccattgccttatgctaaagttccgtcacagaattttctgaaatgtagtgttactagaaatccatagtacaagatgaatgatgatatgatcagatgtttcaagcaatggtttgacatgtcttatgagcacatagaagttggtgcttgataccttcacttgaggcaaatactcgtgctgtagtggtaattggtaaactggtactggtagtgagctagcactggcagtgccatgtttttgctatctgtactgaaattggggccaattgcacctgacgagcagcaactcaatatgggcatatggcatcctttttttccctgcgtattgtccttttgtttcagccacagtagcaattggccggtattccattgccacctttgatgagagggagggagagagagacctcacgggtggcagcaaaggcaaaggagcagcaagaagccgacagagaaagtaaggccatggtagaatgacaggtgaggaatcgatcagacgggaggaaaacaacaccgaaaaggaatgcacttctctgcttttgtatatgcatgcacctctacctacccattcgcgatgcaccaatgaaatacgttgccaaataccttaaaatactagtctattgttcaggtgatagtaatattgacactagtagttctctaatctctagttgctagtcttgtttatgttctattttttcttgttgcaatagtagcacatgatcgtagtaatgctgtatgattgatgattggatggcatggaactatgaacggatcaaacttatctcgataatatggtaataacaaggagatgtagacatgtactccagcattgtagtcagacagccgaatcacgaagctagtgtggaaccatgacagaagaaggcactactcagaataaatccagtcacgggtttaaaaaaaaaacagagagagaggagaatcatcatcacaaagctaatgcaacaacagcacaagcgtacttccgcatgagaccaagcaaggaaaaaagaaattccaaactgtccccaagaaaattcctgccccaggagagcacagcgccggcctgtacaggtcatcgttcccaataagacagggggaagctgagaggcaaagagcaccaccaacaacgcgtgcactgaattgcattgcacatgggacatggcaaacaccggcgcgtcgccacccgcgcatgcacgcacgggcgcgggcgcggccacgggcacatcctctcctgcgactcgtgagccgtgtcattccatcgcggcttcctgctcgatccgctccctgccatgcccgtgaccgtgatctccataaattcccccaccctgtgcgcgatgcgtctatcccccacgataattagtaggcctgccacctcttgccgcgagcaagacgaccacaccaccaaccaccatccatggcggtgtccgtgtcgtggtcgtgggcgccgcggttcttggcctgcgtcgcggtggcggtgttgcttgttacgtcgggtttgggcggtgcggccgccggcggcggcgggcgacgccatgggcacacgaaggggttgcggccggggaaggcggcggcgaaaccgtactatccggtgaacgcgacggcggtggaggcgatcgagcggcagttcacgcggtgggtgcggtccatggtcgggcgacgccacagcacgttccagcgcgcgctctaccgggggctgctgcccacgcgcaccctcgtcgtcgacaagaaccccgccgccggcaacttcacgtccatccaggccgccgtcgactcgatcccgctcatcaacctcgcccgcgtcgtcatcaaggtcaatgccggcacatacacgtacgtcactcacgtggctacttaatttggtctctgtaattttcttccacacccccaccgtatccagagcgttcgtccgaatgcctacaccgatctccccgtgcaccgtgcagtgagaaggtgaccatctcgccgctccgcgcgttcgtgaccatcgagggcgccggcgcggacaagacggtggtgcagtggggcgacacggccgacacggtcggcccgctcgggcgccccttcggcaccttcgcctccgccacgttcgccgtcaacgcgcagttcttcgtcgccaagaacatcaccttcaaggtgagcaccactactacactacaaatgcggcatcatttgtgccgtggcgtggctcattcgtttcgtctgtcgcgtgggcagaacacggcgccggtgccgaggccgggggcgctggggaagcagggtgtggcgctgcggatatcggcggacaacgcggcgttcttggggtgcaacttcctcggcgcgcaggacacgctgtacgaccacctcggccgccattactacagagactgctacatcgagggctccgtcgacttcatattcggcaacgccctctctctctacgaggtacacacattgcttctttctcttggttgcatacacatttcctccatgaacattatagcagggaattgcatgcaacccgggtgattaggttgaaggtttgttgctaaccaagatagataatttaattagcgcctgaaatcgagtcaaacaggaaatctatgctcaatcctgtgtgtcagtgtccagtgctacagcccaaatgcacaacagatacaccgtgtcagtaaacactggcccgcagctttctgacagggcactggcctactgtggcacctactacaatgcaccacactggagtcacacagaagaaagaattctactatcgaccactgttaaaactcacagggttacagtagaggcaaaccactattatcggccacattagccccccgatcttgtgactggccctactacagctacacgaaccagatggtgccaatgcgttgtgcatgcccgtgtggcacttcgtttaatgcgaaatccaacgcaaatggaatgttgatgagcccactagtaatagcatagtgagtaatcagcctttcggtttttaagaggagtgtggtaaaacctgcatcgcttgtcgttggcgccggcacggttgccggatggggttttctggagcccggcaggttctctggtccccctggccccaggcgccgtgaccgctacggcccgtgacgcccatagctggacgtctcgtgccgtgcgtatggccccaaaccgtagcgtatgtgtatagccaccagtctcctctgcaaatcctgctcactttggtcgtacactttaaaatctggtactagtccaacactactaccagtagtaaccgacttttttttttggtcagaaatcaaaaattgacctttgggacgatagggtcgtccaagctccaagggaaacatattatctgctgtaccgtgctctaactttaagtgattgatatgtgtactatcccacatctaatatgtccacatgtcaatgacccattcacccatatcaaaggatagttctgtagagaatactcatccgtcgtgcaagtgcgcaacgcacctagcatggttcgaatgctagactttgtaatagtattcaccgtatttcagacattcagtaatactccacacaccacactagtggttattctaacgtgtgttacagtgtgtgatcgtaaagaatactagggtttacgcaaatatttgatcagaaatcctttgccgtgtattactttggtcatgtatgtactcagtactcacgttggtgacacgattgcagggatgtcacgtgcacgcgatcgcgcggaactacggagccctgacggctcagaaccggatgagcatcctggaggacacgggtttctcgttcgtcaactgccgcgtgacgggctccggcgccctctacctcggccgcgcctggggcaccttctcccgcgtcgtcttcgcctacacctacatggacaacatcatcatcccccgcggctggtacaactggggcgatcccacccgcgagatgtaagtagctaccactagtacagaatcgaacatcgtgaacgatcatatcactactattataatgatatgtgggtctcatcctatcataccccacccatcaatatttgtgatgatagcgtcataatggtagaggatgtgaaccccattcacccctcacatccatctcgttcttgtgttttttcgctaacgatgctggtgttttgtgtgtggttggtggcggtggcaggacggtgttctacgggcagtacaagtgcacggggccgggttcgaactacgccgggagggtggcgtggtcgagggagctcacggaccaggaggccaagccgttcatctccctcagcttcatcgacgggttggagtgggtcaagttgtagcaccacgtaggagagaaacacagctcactcgactattagttaacttgtgaagagaaaagaatagaacagaagaagtggcagataaacactctgatttgattcgattgcagatttcaactttgcagttgcattgtgagacagtcctatactgtgtccggccttcgcctcggttttgttttggactgcaaacagtataacatcaacttaggcccactggcccaggcagtagagaggtagcaatcgatgcgatctccctgctcagcctagaagcccatagagaattgaagtggggaaataggcccagaaaaaggttagagtagtgtagcagaagtgagcccaacaatcacaggtgtgttgcttccatgttccaacacgtatagccttttcgaacattattccttttttttcaaacattattctagacagacattttaatggatttctgcaaacttttagtagtagtagtattatagacccagtggccaatctctaataccgatttcatggttctaaccctggctagagattgggccacgtggcgccctgaaaatcaagtttgcctccctgcgaatttgccacgtgtctccttggctctcctcccgcattgtttgatcgagtatcgacggctaaaggctacagctcgctgtggtggtctggtggacctcgttagaaaactggaattttttttccatgaaagtgctccatccctaatccacccatcttcctcccggacgcacgcaccgccgtccccccgccgcccaccggattctccaccacctgcgcgccgcggccagcgccgcagtagaccacccgctcgtgtcctccttcaagacgctaggctcgtcttcttcaacgccgcccggccaccttgccctcccctgcgttccctgccgcaatgccgctgcctttcctcgaagccagggccgccgtcaattcgccggcaagagtcaccctctaacaggcggtggccatcgccgatacaaacttcggctagatccggtgagcccacgagagaaagaagggagggggcgctagctagcagaggaggagaggaggcggcgtgcgctggtgagaggtggcatcgcatcagatccttcgccacctgcgcgtcgcggccaatgacgccgtgatgaaccacccgctcgtgtcttccctcaaggtgctgcgccgactcgtcttctcccccgccgtcgtgcccgcgccgaggttgagggaacgtacgcaagcggctgctgtgcaggctcgatgtggagcgcggcgcgagggctgcggccaagcggcggcagcgatgtcggcgatggtcgtgcgggcctaatgtggtggcagggcagggcggacgaggaccgacgatctgggatcaacacggcggcagcggtggctggggcactaggcactggccacggccatgtgaacccaatgtggcagcaactgccgcgccgccgaaggccatgtaaatttgtgctccgcaaaggctccatgaggtgtaggctccacatatgtgaaaacgacggcggctggctctgctgcaaggtttgtgcaattcattctacaattcattctacaatgcatatcttgcagctaggaatcatgatatttcttttaaataattaccattatgtctctcaaaaaaaagtatgcagtatttattgccaataaccttgatttgaaaagggtgaaaatagtttttgttacatatagttatgagttacatatttaaacgcactttattaagtgaaaaaggattgctctgcactggacgcgtttcagattagaagttcagatttgcaagatgcggtttatgggctttcattccattctgttcaaggaacttattttcatggttgctgtcggtctgaatccataaaactcttctatgagatgtagcttactttttttttttgagtcatgtcattgtatcatgcttgctctattaaaatttccatcctcattagctaatagaaagcagatcgtccgatttgaatctgatttccatcgtcaagaaaagcggtgattcacaacctatactcatctactagctagcttaacttatcagaaaattggaaaggacctttatcaaaagctgtgatcatttcctcaacaatgtatgtctatatcttagataatctatattcatgtctttgataatctacaataaatctaactactaaacttaagtaaaacaaagttatggctacctattatctatacatatatatattccaatgcttgtgatatacatactattacaatttcatcctcgatctttaaattctaacttgattaggcactatgtcatactttggcagagttgtaatatcactgaactgaaactttcatatgacaaaaatggccattaatttgtatagatcagctgctgctgcagttacagtgcatctatatgtcatggtgctgtttggctggtgctttaatcagtttgttacatgctgaataaaatgtcatgatctttgtacatgctgtcaaagttgcaaattttagctacatgctgccaaaaaatttcatgatctgtgactctgtgtatgtgctgccatgatgaaattcctaagctgctggatttccaatttctttgttcccctactcaatttagaagaagtaagagttgtggtcaaagtgaaggagcgttctcagaataaatgtgctctactcttttttttttaatcaattagtttctctggttttgttttattcaattccaatattatggcatggcattgatagctcaggaacaacatcaatattcgactgaaactaactacaatatacttgctaaagtgcatatctgcagctaaaacaagcaaaaaagttttggatcttaacgaacaatcatgtaaatagcttatataactgctaaattttattcacataatgctaactaaatttaagttccaaatgccttgctatgttttctttttctttctttcttttttctattgcagattagtgtagcggcttcctgaccaaaggtgtaaagcatcactgctatcaaagtcatttgactgatatctgattgacgtcctcaacggttgacacatactcatcggtcaagtcctcaacgtacatggagttgaataagtttgttgcaatccattagcaaacaccaaatgcagagttagttttttggtggtacaagatggttatgcacatgagcaagagaggcagagagcaagtgaaggggcgcaagcaacgatgtatcacacaactcacactcactggtgctttgtccagcaccaaacctcagcaccagatttttgtgccaataatcacatcagcttgggagatgtcttcctgatgcggtgggcaaaggtatcgagggccatggaaccggttgatagcccgaggagcaagagggatttacaggaggtggaggacagggaacgcatcgcagacttgttctgtacatgtttattagatcattgtgacagagtgacatgttgcactatcaagtaccaatagttggttgggattggaatgatcaaaatgagttgttcatgttttagaaggctgtgtgtttctccattttagtttagatttgagaaggttctaggtttttcctttaaccttttcactctgtttctcgcccaacataactcagtttttctccttttcactctgtttaatttatcaatttctaaatagtgccacacggtccaatctccggtaaaactgtcagcttgagaaaagtgatgtggaggaaccatgaactcaatgtcttgctgcattgaactaatatgaataaaagggtaaagtttaaataatttcaggttttaaatagatactccctccgtttcacaatgtaagactttctagcattgtccacatacatatagatgttaatgaatctaaacacatacatatgtccagattcattaacatctaaatgaatgtaggtaatgctagaaagtcttactccctccgtttcacagtgtaagtcattctagcatttcttacattcatattgatattaatgaatatatatatctagattcattaacataaatatgaatatgaaaaatgctagaatgacttacattgtgaaacggaggaagtacgttgtgaaatggaggaagtaaaacatattaggtgtacttatcagagcatttcattcatttatttcataaaagctggtcaattacgcggcacggcattttctagtcatatagtataccactaggattagaagtactgcactgtagtacttactacgagttgtagtaggtattcgactcctactgtcctacattgaactgagccactgacaacatcaagattaggcagcgtatttttcaggggctgattgatgaaaactaacggatgattttctttatcatggatttgaattaaacagtagtattttatattataagtcttaactgatatagtttaaaacaggttatctaaataacgtaataagaaagttttttaaaagaaaatgtctttttttttgcggggaaaagaaaatgtctttttagaagcgtgaaatacataatctgtgctgataacgggccttgacctgttacggagagccaccgaggcgacaaaaacaatcttctacagtaccgtagaccgtatgcttctgcatcataactactcctacacagaatcagagttcggaccaatactaaactgtcaaaactcagatctactgttgatctagatccaccagcagtagcagcagcagataaaaacaaatctcaagtccatccgttccgactcacaccgtcagcaaaaacaagattgacagctgcaggtcgtgtcctcttcaatggagtccaaatcgatgtgtgcattgtcgcactgtcctagctccgcggtcgagaatagctgatggaaataaattccgcgcagcgatcctccaaatgctgcaaacgagtgacatattgtatcgagttcgaaaaagtttgaacagaattcagtggttagctgctgacatgtgcttggttaatgaaaacaatatggtcactgcacatttcagacggtccaagatgctactagtaacggttaagcaattccctcatgcatctcgggagacacgcacaagtccctttgtactttcaggtgtgccttttatcctaagagacaggattatctacatctaaatctggttctagagtcactaccagaaatgacagacaacatcaacagccaaacaggaaaaacgctgtgcacatgacttgcacatcactttagtgctcgttggaacagtgttcttattaatgtatagtactgtatagtattcatccccgtcttaggtaagctgttgtatcaggatattgttaaatggtcagtagcgctcattaactctgaagaaattctgaagactgaaaaggacgggatcatctctagaggtggccaaacgggcagcccggggcacggccgaacctgtagcaggcacggcccggcacggcctgctacagtaacgggccgtgccggcacggcacgagtagccgtgccgtgcttgggccgctggccgagcccgcgggccggcacggcacggcacggctactgtagcaggccggcacggcacggcccgcggcacggcacggcccgtttcgccggcggcccgtcaggcgcggacagggcgggcggcggtcgaatgggaaggcgccacgtggcactaacggctacttgaccgttcaaatttgaaaataaccgttgggaggctaaaaaattcataaaaatttcgaaaaaattccaaaaaatctcaaatttcgccctataaatagggcatgaaccccagccatttctcctcatcccacactcctcatcttgtgctctcaagtgttttaagtgctctctttgttctcaagtgtgcattttttttgattttgacaaaatttgctcaaattttgtcaaaaatcaaaattagtttcgtagttcaacagtttgatcgcagaggtttgaagagctcgcggttggaaagatgtaagtaatattcaaatttgtgtattatttgtattgtgtttgtgaattcaataaatattcgaaaatttgtttatgtcggtttaaattttcagaatggatccgaactttccataccagtcgccgtcgttcaccttgggtgatttcgaccccaactacatgtcggggtttgacggtacctccggatcggctccaactccaccatctgtggaggaggtacctgttcatacggctgtcgttgaggaggtaccggttcaggcggcgacagcttcggaaggattttccggaaccgcgagcggaagtgtttcgacacacaccggctcgaagagatcgagaacctccgttgtgtggcaaaacttcgacgagataaaggaaacatgccccgacggaagggaggtatcgaaagcccgttgtagaatatgtaggcaaattttatctgctcgttcttctggtggtacaggtcacctcaagcgccatgcggagtcgtgtgccaagaagcaaggaatacaactccggcagcagcaacttatggtaaacccagacggtacggtacgcagttgggagtacgatcccatggttgctcgggaatctcttgtccggttaatcgccaggcaagatttacccctgaactttggggagtcccctgcttttgaacattacattcagcaatctcataaccctaggtttaaagctgtgagtaggcaaacatcaactagagatttagagaatgtttatcacaaggaagcaactgcacttaaggaactgtttagtacatgtactttctctgttagtgttacttcagatatatggagtagtggagctagagaggattatcttagcgtagttgttcattttgttgatgatgattggcaattacaaaagagagttttagggcttaggttaatagatgtctcacatacaggagaaaacatagctgaaagaattagggaagtaattaatgaatttaatcttgctgataaaatatttgctgtcaccctagataatgcatctgctaattctagggctattgaaatattgcaacctttattttgtgtgtatgctcaatcttttctactccatcagcgttgtgcatgtcatataattaatttgattgttaagactggcatgaagagggtaggtgaccacatcgatgctgttcgtcaagcaatcgcgtggttaactgcttctaacccgcggattgctgaatgaaagaggttttgcaatgcggccggtgtgaaagctcgtaagtttgccaccgatgcagagcatcggtggaatgcaacgtatttaatgttaaaagttgttttaccttatagtagtttactttctgattttgttcagtcacgtggtggcccaagaaacagtgacgggtcttcagtactgaacgagcatgtttgggcaattgtccaaaaatttcaccaatttctagaaactttttatgattgtactctaactttgtcacaagtttattatccaactgctaatataattttgcacaaccttcttgaaattgctacattatttaaagaatacgaaaatgatgacgttctaactgaacctgtctttcacatgaaacaaaaatatttgaaatattggaaaaatatacctatgttgtatgcttttgcttttgttttagatcctaggtgtaaattaaggggattgtctgctattttatcacttgttggagatactataggtgtagattatagttctttttatactgaggttagacgtaaattatatgaggtttttagaagatatgaagtaaagtttcaggaagttcgccagcagagaccccctcctatccccactacaggtaagaagaagatacagtggggtaggatttggggtggatcgtcttcaagttcaatccaaggtggtggcagttcgtcggctacaagtggagacgcctcttcgcatgttgtggccgaagagttgtccggttatttggacagcgacgccatccaccacgaagcacaagatttcaacgtcctcgggtggtggaatgaccacaagataacatatcctgtgctttcaaaactagcacgggatgtgttgacggtgcccgtgtcgacggtgtcctccgaatcggccttcagtctatgcggccgaatcatcgaagaccggaggacgactctgcgcagcgaccacgtcgaaatgctactaagcgttaaagactgggagcttgctcgacaacatgcccaatacactgcggacaaccaagaattggccgcccagttcgagcaactctacctggatccagaccaaccccagtagaattttgttagaagtagttctgacctttgagctgtactcttttctttgtcatggttttctcattttcccctatgagtttttacatgacaaagtttttaacgaggcagcatgtatcattgtatcctgtaatgatataaacatcaataaaggtcattactatttttaacaaattcttttgcaatattttcgcaagtgtggatttatctttaaattatttcaaaataatgaatcacaatctatatttttaaatttttcaacacaacaaaaaaataccattttttctttttttttaacattagcaaatcattacttttttaaaaaacttttatttccattttttaaataccattttttcattttttaacattagtaaatcattacttttttttaaacattttatttctatttttattttttttccttatacatttcctttgcttttttttaaaaaaaaacactgtgcactgcaggctggcggcctgccttcacgggccgccgtgccccgaacggcccgtgggccgcaggcgtgccgtgccggcacgggcacggcccggccatccacgggccgtgcttgggccggcggctcggcacgtgggccggcacggcacggcccgtttcatcagccgtgcctaacgggccgtgccgaaacgggccgtgccggacccgtgcccgtgccgggccgggccgtgccgcccgtttggacacctataatcatctcggcgtccaaatacgctcaggcaatgaatttggccactctttttccgagccaaaccagctctggacgtgttatcagacaaccaccgtttgcaaccatgtagggagggtactattttagcgtccttttgcctgatgcttcacatcaaatgcacgtcaacatttaagccatccataaagcaatgcagttgtggtacactgcaacaaacaaccacaattttgtcttcagtgcaaaggatctgccagtgccaagaaggcaggaactcgtccgtgtactctttacttcttccttcccttaacttccatgccatttcagctatcaacctatacaggtcggtatcagataccgcatcagcatttaagggggagggatttaggactgtttagattgtagccaaaataaaccttattaaattttgttattgccaaaattttagcaggatttcttatatatttactaaagtttggcagtaaattaaatgtagtcactttttgacaactttaccaaaatttgataaggttgaaaatggcatcaaggtgaacaggcctttgtttttttgtgaggtttagtccctctcaccaaaccaccccgtaaggcctgagtttagttaccaattttttcttcaagcttccaacttttccatcacatcaaaactttcctacacacacaaacttccaacttttccatcacatcgttccaatttcaattaaacttccaattttgacgtgaattaaacacaccataagccacactgtcagaaaaacaaaggaatggcatttcggaactgtatgtacttttgtttcttcctcctctttttcccttcctttggcagggattcacccgtccaatttctcataggtaagtgcagtaatttagaccgttttggtaattgagaaacccaaattaaatttacaattttataccatgaagacaaactttactctatgacacttaaaagtttatataattaactagtggacattgtaaaaacatatcatggctagagaataccctaaaaacgtgttatgtttatggaaagatattttcgatccaattaaaagagaaactcttaaaagaaaaacaagaatgtcctatggctacaagtttctaacctaacatacgagtgaagacggattatgatatatactaacaatgtacaccttagagtgatggcattttaagagttgcataatttcaaagctttcactcaagcgctaggttagaattttgtggccccaaataggtaaaaatgtcgttcgataaattaccaattatttattatccttcaattatagcacatttataggatatttatcagtaaattacataagatttagttgtcgtggaataaaatttgtcaataagaagagagagaatgtggttagagctgtagcggtagaacagattttattccctgctcttttgccatactcgagctacatattctggtggtactttgcgaagatttaccatcttagtcctaacactaatatgtaccgaaagttaattaaaacacactcctggattagcattcgggctccggttgtgagtaatcaccagagctgatcgaggtaataatctctagtgacgtcgtcgctgaactccgagtcctcgtggcggctcatctccgagctcttcaagctgatggcgctgtccggccgcgacttcctcgacccggcgcgggccaggctaggcctcggctcgccggcggcgccgtgccgctgcctcggcgcgctctggcaccgcgcacgcgccacggacgacgccgtgtccgccatgtaccgcgggctcacgacgcgccccttcgccggcgacgccgggccgtggtaccccgccgggagcgcggcggcgagccggggcgtgttgtgcgtcgtcttcggctgcgcccgcgcatcgtgctcgtgctcctcggcctggaggtggcgcgacggcggcggcttgtagcagtagaggtgcggcgaggacagcggcaccgaccccggcgtgccgtccggcggcgggtcggcggcgtagcggctcgtgatccgggaagaccggcaccggagctggcacgtgtccatctccacgatcctcgggctgcggtcgaagttgatgtcgccgccgtcggacacccgacggcggtgcaccaccggcaacgtcaatgtctttacccgccctccttgcatttgcacgacaatcctctcctacgtacaaaagatgctcaaaaatttaacttcatctgataaaatcaaggtgatccgaggaggcatcacagtgaaaaatctcacctgttcgacggatttccgcgatgaggccatcttgatggcgcgagaggaggcttggagcctcatgagcgcttgcagcctctgcagagtcgtcgctgcttgcttcctcacaaggtagccacgtaccagagcttgtatcttgacaagcgccttgagagcgcgcaatgccctcctagcctgcatttgcggtggaaaattcaaatttttacagttgcttcgaaaagcaaatcaacagaaacaatatggaagtttttgaactatatgccatgacgactaggcttgtgtccccactgtgcagttacctaagcgtttgcagcaaatcatcactaaacaaaaatatcctaaaatgtggaatttatctatagtaggaagcagattaaacaatgtgcattgtgcaatggctagctactcaacggcaagaaactatcaaacaactgctgccattaacaacagttagtaaagtgaagtcaaatctcctgtccaatataaaaccaggagaatccataccacctactccctccgtcccattttgagtttttgcttgtaacgtttgaccactcgtcttattcaaaattttttgaaattattaattattttatttgtgacttactttattatctatagtactttaagcacaactttttattttttatatttgatgggaaaagggtacaaacccttgcgcatacttatggattaccaccaaatccaccgtttattggaaacaccctaaccgcttataaacgattatcttctttgggcgcgggttgattccaaccttttaattttttcaatacacatgaacttttaactttttcatcgttt

SEQ ID NO: 5882 - DNA, 34024 bp, Oryza sativa
  unsure (1)..(34024): unsure at all n locations
ccctctctcccaaacaccccctgagtaaggctgtaagggctaagggttgcacccatcatctgtgtacttctgccgtagtgatgtttgcagtcactgttaatctgatgatgccaggtcattacaaagtgttaaaatggataacatcgagcattgttgcaaatcacggaatattttctggctatcaatcatacataatctattcatattcagaattgaaattatagtagcaaaagcaagcttgtgtgcatacaaagaaaataaaacaaacatgtttggaacacaatgtaaatgagagtttttaagtgtgtgctgtgctgatactatgaatattatatctaggaagttactgatttttgttgttatatatgttgaagagtattatgaatacctagcaacatgatatatatgccatgtttatggttcatcaattagagaatcttatcataccatggtgacccactataataaacatggtgtatgttgcaggtgtaaatcaacgtctgagaggaattgtgttcaggataatagcttcagagataagcattcattaaaattccaaccaaaacctgggcagtgattattgtttcaatgaacagtaagtaaattgataattctgtgtgctaaggtgctgtcgtgacattatatgtaaactattcatagcagaattcctgactcaatactccactgttgctttttgtttagaattgcaatacgtgaataatgtatttgtagtttttgtactatcttcaacatctttacaggaaatacaattattgctctctgcttgtgtggctggtcctgggagatgttttactgcttgctgcatatcgaggttgaaatgttttcgtttggggggtgggggggaaaggtcactggtgggaggttgaaatgttctgtagaaagatgtcgtcatgagaatgtcccgtagctaaagggagagcgatgccactgtaaggatgaatagtgagccatgccattgtccctttatttaaacacattacccgttatccaggggaggtagcaactgctagctttcatgtactctatttctgttccccattcatttatcattcgctgccatggcagtttgatctgcatagattagaatttgcttttgtgatatgtttgaaactttccttgtgtttgaacccacgtcagattctcttatcaagatgtgattgaatgtactctttcgaccaatcattgaatgaacttattttacaccttttggtaaatgatactctttgttttttctgcaagggcaaaggctactagtttgccacgtggcccactgatttgagagaattttgtttgtaacttcaaaggagctattgaaatcgctttctttctccaactttttttttgatgtgtacaaagtaagaatcttttcggcctattataatcctcccatcggtgtcaatgattttatcaccgcattatgcttgaactttgaggtgaaaaaaatgatagtatcatttccctatttgattgttcctgcaatgtgtcaccctagaaaatttcttattttaggagttattatgattcatatatttggactcaacatatgttatttgaatataagaggtacttactaactaaaacattatatcagatgaagtaattcatagttttcattttttttattttcccaaaaatgattattcttgttctaagccctgcatgtgtgaattcttatggccttgaaaataaattgtcaactggacggttatttgtttgtgcctgtgagatattaagtttgatgcatcaagtcttgaaagagttcttacgacatatcagaagttgtcgcttgcatgcttctacataattatgtgataccgagaggcactaattttgtcttttcattgaatgagaaactgagtgaactaaaagcaactacaaaggttagatactttcatcttggatctttattaaataaccgagattattaaggttggggttgatgtgggaaagatactttagtaatttgcaatataatttgttaaaaatctagttgaccattagaaaatggtgtgaatgtatttttcatcacaaatccttttgttagttttataatttttagtagaatttagctataaaatttaatgggcggattttataatactgggtcctatgtcaactgaaatactgacaatatttttgtactgtagcctctataaatgatcacttagttatagatgagcaattttgatttctgaacaccaaatatacaaaatagtatcctataaagtatctccagaatctgcagctattcaagtcactgtctaaaatgtggatagatattgcacaccctgggataactcacttgtatacgaactttaaaatatcttcacttatgttggtgaaggaatagtaacaggctcctgggctatataaatgaacctcatgttctactttctgtaacttaggtgatcggcaacctgtgtattcatttttgggattgactcctactttaaaggcttcacttcgcctcatttttttcctgactgttcaatacttgtgaatggagtacggtaatttgcgacgtcaagcagcttccttgaaaaagagcctcttcgatcaggcttgtgctctgttcatctcaaatttcaagcattatagttgaggcatatctgagactctgcaaatatatccatcagtccttttgctatatcttcttctgctatttatcattcagcaagacatagaatacagtgttttgatggacatcaccttacagtcatgccattttaattgccataccatggattgacactattgcacacagataatgaaaacaaagctaaggagaatcagattgaagcacattatattaatataagtgggttatcgatatttctgtagagttcattccatttcgtacttatccccaccccagttagcaaagaaatgctttaaaatcaacgcctttcaccatttcggaactctcttttctggtctttatcttagtttaacatgtgttaagtgtgctggtttaacaaatcgttttgtattgacagggttacttggatgagcaattttgtcaggttgaggatttgcaggatgaagcaaatccaaattttgcagaggaggttgtttccttgttttttaaggattcaaccagggtaatgttgaattttgagcaagctatgtaagtggtgacaatttcataaactagacctgtcttgattatcttttcacattcagcagcattattgttggttactaatatctaacatcacacagtgagaagcatccgaaagacttcgccagatgggacacacacatgcagcaattgaaaggcagctgttctaggtaagcctcagctcagtttcttgtgagatctccatgttgtcatttgacggaactggcactgatggacttttacagggtgtttgaattttattgcctttttaggaaagtgtatgcctagtgcaattacccatttgtctaggaaaaaataatcctgcctttttccaacaaaccacctaactttgtttagaaaaacattgcttggagaaggagagccacacatcgcaaggtcggtttgttgggtgaaaatgaacatgattagattttctatattttgagcatatgctgtaggtaaacttaatttgaaatcttaagtttttaactgcacacaattgtatctttcaaaaagactatgtatgtgataataattttatcactaaatctaatttagagtgtcaagaatctataaaaagctaactaacattaccctataaaaactatatggccttagtttttctcccttcagtcttcaagaaagtagcttaactttcctaactggcatagttctcaggtttttatattaagtttatccttttctcaatggaagcaaatatgacagtttcgaacacaagctgaaggagaacttccagaagcctgatgtacctgaactcccaccacacgcacacacaacaaagaaaagaccttcaaataatggcctgcttaatatcttgtgaaattctagtgaacggtcagggaatatgttaaacagagatatttacagagacccatattgctttgattggtgcagccttgcaggtgcacagctggtagatcatgagtacatgctcactccttatttcattatttgacatgataaaagaagctggcaatttgcttagttatacatatgtgataatcttttgtgtactttatcaatgcttgacatgatatggtttgtcacagcattggtgcctccagggtgaagaatgaatgcacttcattcaggaatttctgtggagaagaaaacgccgaagggtatctctctctctctctctccacttttatgacatgtggtatggcatggtaaaagttcatggcttgagcattgtgattttcccatgcccatggctgttactgggtgtgctcgtctgtgcttgcaggcttgcagccacagcggctgtggcagttgtaaatggctgccggctgcagctggtttcaactgccgcagctgcagtggctgtggcaaccagagcatccaatcggcctgatcattacggaaaaaccaacaaagtaaatggctaagtgccagtctgccaccttgtcaaacttggcatggctcagtcgaggcatgtagaagtgtcacctgtcagccctcactgttatgagtgttagtacctagttacacatgcatattctgatgggtgaaagttcctcctgctagtgaactggaattagcccttgccgtctatctttttttgttcaattcattggcttatttcgtatgatgatagatctctactactattgttatgcagttgcacgagatccttccagaaagtgaagagggagcatgccgtcctcaggcagaagtgggagtcctacttccaggtaatcttcaccagccacttcgtacccagctttcattaatggcaatatatgtttgttactaaggttgtgttcacctcgttaccattttcaagcttgccaaattctagcaagacaacatagcattaccaacataaccttaccaaaataaaattttgtaaggccttaaaccaaataccacctaatgttactatatactccctccatttctaaatatttgacgccgttgactatttcaaacatatttgaccattcgtcttattaaaaaaattaagtaattattaaatcttttcctatcatttgattcatcgttaaatatactttcatgtatacatatagttttacatatttcataaaaaaatttgaataaaacgaatggtcaaacatgtgctaaaaagtcaacggtgtcaaacatttagaaacggagggagtatttcaccaaaaaaaaaaagggtaatgccaaagtttggtaagttttctttctgcaacaaactgaacacacctatggctaataaaccattcatttctccacctatctcataataaacacaacgtggctttgtgcagctgttgcgacaagctggtcctgctgggaccgcgactaggcctgcgggcaagtaagctataagcagccggctattgaattggtctcgggctgctgctgccgtggatgcgactaggctggtacacaagagcagcctgccgttgttctagtatgccactacggtgaaaacccgtatatagacgtgctacgacttatgagttgtgacatgcatgtctgcttgtttatgacaaaaataaaaccgatcaagattactacatcatcatgagattgctctctttgcccttattttgtccatgctgttgtccagattgcgatgggtttatatacagctataaccacagatgaaactgtccggctgtgtcggtgaccattgctatgctggagatagtgtgatcggccgacaaaagtttatgaaggtaatcaggactgatagccctgatagtgtgataggtattactgaactaactggaatgacaggggtgtatctgatatctatgtgatggacatgactgagctaactactactaagataagtactcctatatgcaaaagcatgagctatgttctaatcttggcggttaagttgcaaccactcaagatgtacattttgtgtttggctccttttacagctctgttacagtgttactgacaccggagcaaactctgacgacggaaaatttgaaaaccacaacctaagggtgtgtttagttccacgttaaaattgaaagtttgactaaggctgtgtttagatccaaagtttggatccaaacttcagtcatttttcatcacatcaatctgtcatacacacacaactttccagtcacatcatctccaatttcaactaaaatccaaactttgcgctgaactaaacatagcctaaatttgaaagttcaaagaaaaaagttgaaagtttatgtatgtaggaaagttttgatgtgatagaaaagttagaattttgaagaaaaagttgggacctaaaaccggccgaaatatgcaagtagtagttcctactttcacacaaccaatatggttcattccatgatgggaattcagaaatatttcctgtcaagctctcgctgagcagtgagcaccagcacgatgggaaaaagtggagtagcatttcgccgccggctttcatagatctttttttatctttttgaactttttaattttttaattttaaaactaaatatttccaagacttattttcaagatttgaacggtgtgacagtgttatttggtcacactgttctaatatagacaaaatgtctagattttgtaaataagtttcagaagtgtttattttttaaaataaaaaaattaaaaagtacaaaaagtaatttaaaaaaaatcctttcacgataccggcttgcggcttcacggaccgaatcaatcggaggtagccagtttggccactttggcgggagtgcgattaaaacctgtttgacgacgtcaactctccggcgtgccggcttaaggtagggctcatgtgtaaaagaaaaagaaaaaaaaactcaggtcgcctgcacgatgggaaagggtatccttgtaattgatacaggattcggcgtttgagtttggactctgcactctgccgcgcacgtcgtatgaatattggagcttaatcaggtcccagggattcaaacgcgtaccactattggttccgataaagatgttctacccaattggctccttgaggattccaaaacaaagaaattgtttactggagtacttcttgcgttgttcaaattatgctagactatagtaggaacaaagaacaaagaacaaaaatatgtctatgaatagttccacgcttttcaatgcttcaaagtcaagcctcaatgaggttaaaattttctattatcaaaatccaaactaactggaaagcaccaccggtgatatggggagcatcgaaagcaaatcgaagtaatttggttggggtttttacccaccaaaatttaaatcttggtgcgcatacaagttagcaatattagaaatttggtcttgtttagtttcaaactttttcttcaaacttacaacttttttatcacataaaactttcctacacacaaactttcaacttttctatcacaccattccaatttcaataaacttttaattttagtgtgaactaaacatacctttatcgttggcttctctttttaaacgtgtgttacttttttttaagatcttgttgttcatattattagatctttaaacgtgtgttactgtgttaggggatttattcatgagtgtattagtgtgatattacatgtgtagtagtttgtgtacgttaattggaaaaaaaacgaaactattcttaaaacaaattcgaattgccggtaacggcgaccagagcaaaactcacgcaagcgaagtttcaaatttgaaaacgaaattaaaaaaaaaaactcacgcgaacaacaacaaacccgcgacctgcgcgagaggacaaaccaaaccaaaccaaaaccaaaagcgaaacacagaggacaacacaaagcacggccggggggcggcgcaccgcgcacgacggcgacgagacgcgtggcggagcaacaaaaccagcccccgcattgccccgaggcggcgccgcccgagctcgaatccgcccaatctcgccggcggcggcctcgatctgagccgaggccgccgtgcgccggcccgggcggcgaggaatggggagcgtggacggagatttcgaggggctccaggcaggtgaggcgccccgctgatccggatgctctcgggagtttgaattctagccctagctgctcgaggtttgggttgctgcgagtttttgtgattttgggggtaaatttgtggcgaggaggagtggtggtcggcgatgggcgaacccgctttttctgcgctctgatttagtggttttcgagttggaattcagctcagcgacctcagtgattcgtgcatattcttcctctggttctaggcttctagctatcgccagcccagctattgttcagttactatgttttagtgtttgaagttagctggcgaccgctggattttgaattttttgctgtttcgatagtaaaatgtttgccgaagaagaaccgtgtgttaacccgtttttgtgccggagggttcaaaagttttattattatcatttttgatctgagatatcagttccgagctgccgatctgagttgtgatttttaatttctcatacttgctttacatgatggtgcaaaaaacattgtagcggatcggcgtgcggaagtgattgaatggctcaatgcgttactcccggagtactgtttgccactggactcatcggatgacgagttgcgggagctgctcagtgatggcacggtcttgtgccatatcgtgaacgcactcattcctggtgttctcgaggtgtgtccttttgggcttgaagaattttggcttttttgttgaactgtggatgttgatattggtgctctctggatgtgagtttttgtttgtttaggagtcgtggggtgcttatgcatcgtcagatcaacatgcaggccatgtgaagaagttcctcgcagtggttgctgatatggggttgccaggcttcagtgttaaagatcttgaggaggtgaggttggtcttatcatactatgtagttggtttgcagaaatgagttctgaaatgcaaatggttgagattagttttcttaaatgtttgcgtgctagccttattgtgctagtcaatataatggtgcttggccttgttgctcatggtattgcgttgctgacaagttttagtcatgcatacacatataagtagaactatatttctagagttttttttcccattataatctgtgaggaataaatgaataacctcttaatatcgcctaaccataattgcactatagtaataactcaaattctgtgatagattgttgactgctagaaaaggaggttagattattagttctagatttattctatgccggatgctgtcatctaggaagcaaatctgcaaaaaggattgacaccgcatagttaaaatgacatgcttttaaatactcgcaattgacggaaacatgcaagcattggagcaaatccccccaatttcactatttgtggatgtaagatgttacagtttttcattaaaaaaaatgtttaccatttccaaagttcctgattgcttatgttaactcataacttgaccatggcagggttcaatgtctggggtagtggactgcctcttggttctgagggaaagtgtgagttctggattacgtgatggtacttccaaggctcctttgaggaaaaaatggcgagttccagaaactggtgaacctcttgtccctggtgtggcacaagggaagacatcccctggagaggacaagaggaatggccttccagaccctaagtctcagcagaaaactcccatctttaatggtatgcacattgttgactattttggtgcatagtttaaaaatattagttgaaaagaagtccctacatgtttacgctttggctctagaattctgtactatatagtcaaattctcaaagggaaaatgacatgggctatttgtgattgggcacttggccatgttgtggggggtcaacgatttattggttgaagctgtagattggacaactatgttcaacatagaatcttagtggacatacaaactttctgatgaagctagatttgatcatggtggggtggttactttaacgtttcttaaattcaacatggcttccaagctccaaactacaaacttgttaacgtgtatgcttgctgcaagttgtaactcaagctattgtgtataatctatatctgggtcactactgttccctaccttttagtttataatagctcgtcatatatgctgcaggacgaaagcttcgtgagattttccaattaaaacgtggatcctatgctgatcttccggctgccaagatttcagaaatgatgcattctaacagtttagatgtaactttccattgcttatgcttgttgaattgttctatcttgttgtttgctattcctttcctaacagtaattaccttctcacagaatgcaccaacccaatcccttcttagcgtcgttaatggcattttggacgaaagcattgaaaggaaaaagggagaaataccacatgtatgtctgtgtttctgaattgcatgctctctttttcattggtatcttttaaatctaataaatttatctacctcacctcagcgtgtagtgtacctactgaggaaagtagttcaagaaattgagcgtcgtctttgtattcaagcagagcacataagaagtgtaagagagtcttttttccctgaagcctatatatcctttagctaataaatgcaactcatgaatcagatgtctcttgttgcagcaaaatgtgatcattaagacaagggaagataaataccattcaaaaatcaaagcacttgaaatattagtaaatgggacaaatgaagaaaaccaggtaaatattcagtattttcattgttataataaattacataatttagaagttctcccccctaactgatgacattgtggacttcctttcttcagatggctataaaccggcttcagataattaaggttagacctacactgaaaagatttgatttcctacatttgctatctttatagtacatttgctatctttatattattgtaataatataaacaaatgaaatattaactatataatgtttgatcatatattattgctataaggatgatatttgatgttaattttgttaccgcctagaccggtagaaattatggcaactgttatatcaactatataacatattatatatttttttctgcattcaggaagagaagtcaaaaatagaagagaaaaggaaacttggtgagcaagatgttgctcggctaatgaaagaaaaagaaatttctgaaaacacaatagctagtcttaagaaagagatggaagtcatgactagcatgcatgagcaacaacttcagaaaatcgaactgaccgcaaagcaaatggaagaacatttaactaccaaaattaaggaggttgagtctcttttagtgcaatcaaacaagaaaattgaagaagttgaggctgcttccctgttaaaatcacagttgtggaataagaaggagggcatttttcagaaatacatgaatagtcaacaactatatgtcaaggtttgtttatctttaacttgctcttacttccttttgtttttcatcttatttatgggttattgcttgaaaatgacagggtttaaggatatcatcatggtctataaaaaatgagatgcatgcccttgaaatggagttgagagatgagatgtccaattttggtatgtgttgtataatctataaagtaaacatttacttgtatattttaacattgtgttgcttaaacttttgcaggctctggtttaaagtgtttggttgatgctgctgaaaactaccacaaagttcttgctgaaaatcaaaagttgttcaatgaagtgcaagaactaaaaggttttttactgctcaaattttttatagcttcagaatgcacctattgatgtccatttcaatatctgcctcttttaggtaatataagggtgtattgtcgtgtaagaccatttcttcctggtcaagataaaaaatcaaccactgttgattacattggtgaaaatggtgagcttttgatctcaaatccatttaaacaaggaaaggatggacatcggatgttcaagtttaacaaggtttttagtccattttcttctcaaggtatatttttttacaatggaaatctggtataagcttatctgtgtgcaaataaattctaatacttatctttcaatttacagctgaggttttctcggacattcaaccgctgattcgatcagttcttgatggattcaatgtttgtatttttgcttatggtcaaactggttcaggaaaaacttacacaatggtactaacttttaccgatattttactggctcagcattgttgttaacttatattgatcttttttattggtattgtactggttcagcatgatgcactgctactaacttttgatcacttatgttctattccaataattttgttcttagagtggacccagcacatcaaaacaagattggggtgtcaattacagggctttaaatgatttatttgatatctcactaagtaggagaaatgctttctcttatgaggtgggagttcagatggttgagatatacaatgaacaagtgcgggatcttctgtcaaatgatattgcacagaaacgatatcctttttcatacttaaattgtcatttctaattatatttctggtacctatgtttttagtttgtaagagaatggttgtgttctctttaacataaaaaaacacttggcatatggagcacctctcaacctaatggacttgtcgtcccagatgcgagcttacacccagttaaatcaacatcagatgttttagacttgatggaaattggacaggcaaatagagctgttggttcaacagctcttaatgaaaggagcagtcggtctcataggttgagtgactgataactgaagttaaactatatcttttttgctctcaatatgattttattttgaaacacattattctatgcagtattctgactgtacatgttcgagggttggatgtgaagaatggatccacttctagaggatgcctacatcttattgatcttgcagggagtgaaagggttgagcggtctgaagcaactggagatagattgaaagaggctcaacacattaataaatcactgtctgctttgggtgatgtgatttttgctttggcgcaaaagaatgctcatgtgccatacaggaacagcaagctaacacaagttcttcaaagctctttaggtaatcaattatttagttgaaaaatcatgcatgtggagttagatttatggtttttgtaactataatcttataaaataatctcttgcaggtggacaagcaaagacactaatgtttgttcaaataaatcctgatgttgagtcatattcagagactataagcactctaaagtttgctgaaagggtttctggagttgagttaggtgctgcaagaagtaataaagagggaaaggatataaaagagctgctggaacaggttcttgctttttatgttctgtctgactcatcattaactgaaatttctttgcttttgttttacataattgctgaactatttagttctaggaagaaggggaatccttatgtgtaaatttgatgttcatgcaacaaattttcttgcaaatactgaagtaatttctaattgaacttagagctctattttagaatgttgctgatgttttactcaaaagcatggccattgttctcaacttcatattttccacaaatttattcaaacattctaaagaatcagcagtaaaacaacagcaatttccaagctattcctgaacgaatgttctcccaatagtaatacaagttatcatcaatattaggcttgatcctgaacaaatgttctcccaatagtaatacaagttatcatcaatattaggcttgagatacagaaaacctgctgcaaacaacctttttttttgtctagtatgaaaaaaatataaacaaatcaaaatggtgacttgttgtgatgttctatgtaattattcaagtctatatgctgctagtggtgtaaatttctagttgaactcatgttatggtttgtgcttgccaatgagacatgtttctgttataatgacaattccttctttttactataaatattttgtcctcccaacttgaaaagtcacttcacatattttgtccaggttgcatctttgaaagacactattgtacgaaaagatacggaaattgagcagctccaactcatgaaagacaaagtcaaatcgccaagttttgcagtcgatataaatggtgctagcatgccaaaaaattctaactctgacctaagatcagtattgtcaatcacaacaaaccaacagagccaactatcagatcctcagagttatgctgaggtgaacagagatggtggacctacttcatacactgacattacaccaacatgcttggatgaagcagattttgaggacaatgcatcagaagatggtttctctggaggaaccgactattctgttggctgtgctgccggtgccagcgttttcccaaattcctgctcagatagaaccgcagatacctccatgtactctcatctccctatatcacttacaccaaactaacttgcagctattaattgttctctcattacatttactcaatttgttgtaatataatcttattattctttatgcaacattatcttttcatgttgtgatgaagaagcattaatttggtacctcctaatgattgcagtaggagaatttcatcacgaatagctcgattcagtctcacaaagaatggacaaccagcaacatccagaccaaaaccaaaggatactgctccgaagactccaagtatgtactataagccactaatttacttcaacagattggtaactattactgtactgcctacacagttttagtatatgtgctcaacgagttcaaattatcatgccaatatcagaagacacttgccaactttgtcttggttttcaaaaacaaatggtaattttttgggaatagaaaggtcatgttgctccgtgcaaataatttcatacacatgtggttgctattattgtaaaacttttagttttttttaaagatatttttcaaatttttagtgcactgtccaaatagtttcatacctgcacatgatgtaattaattatccttggttattaatgagaaatatattgattatcagatcaaacgagagttcaatcgagccaattgataggaggctcttcactgagggcatctaaaaggtggcagaagtagagcacgctccggttgctcagttgtattttgtatgtccagaatgtgaaaataggcgaagtagctgtaggagacaatgtacttgtaagttgtaactctacagatgtgagagcattctgctgacgaaggacgagcagctgatgactcatcctttgctcatacagatcaaatatccaggaaaggattcccttttctgttctccatgtttcccctgtacttcaatttttgtcatggttactgcatctctggaatcaaacgtttccaattttggaagaaacactggtattttttatttttattttgctctgagcttctgacgtacttcgagcatgctcgattctttgggcaagccaaatgttactgggcatggaagtctgcgtggtgtaatggaagagagacagtttggttctctctctctcgatcaatggatgcttgcatcaccctcggaatcaatggtgtaaagcttcgctttggtcgccctttggacctaagttttggagtttgtcgattctgatagcaaatcaggtctgaaaaaattataatcgcaactgttttaacaaaatcactgccgctgtttcttttttttcgaacacactgccgctgtttctgtaattactgtaacttgttcagatgagaacggtggcgatatcgaacttataaagagtagcacggaaataacgagttgtcgccgggcaaagtccaaatgtatatcgctggagcactgaagatcccttgaagaccagtgactactgaacacttgtgcaaaagagctaagcagaaaaactgaagaactgaagccttggtaaaaaaaaaaacttatgcaaaagagctaagcagaaatactgaagaactgaaccattggtaaaaaaaagaaaacacacaaaaacacttatgcaaaagagctaagcagaaaaactgaagaactgaagccttggtaaaaaaaaaaagaaaaagaaaaagaaaaagtgaagccttggtaaaaaaaaaagaaaaatgcaaaagagctaagcagaaaaactgaagaactaagccttggtaaaaaaaaaaaagaaaagaaaaagtgaagccttggtaaaacaaaaaaaaaaggaaaatgcggtgagcgtggatcgaacacgcgaccttcagatcttcagtctgacgctctcccaactgagctatccccgcccttggttaattaatgatctactacaaatatatctgtatccttaagctatctcatataaacacattttacatatatcttcaagtagattatgtttatgttgcaatgtaattttgtgtttaaaattttattttgagagattgaacaaatcctgccattctgcatgcataatgaccccgtaacttataaacaagaaaagggcaaatcatgtttgatctttttaaaggggaacttacaaaaaccacctcaaatatcacactgagttcgagggaagaggattatctgacttatttccctctgactttgagtcgcttacgtgtggacccactaagtagagggtccatatgtcagtgacacaagttagagggaagtaagttagaggatctcaatccgagttcgagatccctgtaaaaccatttgtagcaatatcctttcccaattgtcactgcttgcacatatgcgatatccatcaatacgatccgatgtctacgctcaagccgaacctgatatgcaaacaaacagggttagcggaatcaggaaatgtagtaattcgagtaagtccaaccttcaaggaagaaggaaggcaatccgtcgcttgtttgttgcaagttctttccttttctctttccttatgtgttatatgacttagcacatcttttgatatacatggactcatcttccggcgacccccatctctaagagctgagactcgtgattaccatcgcccaacaacatgctggatgccagatgccgcaatcgtgccatcgagcctacccaatattactggtgaccacggctccttggctagtactccctccatcccaaaatataataacttttagctctcaagatttgtcccaaaatataacaacttctccaccaacattctcttcccaaccaatcacaactctctaccattcacttttcccatctacttccactactcaactaatcacaaccctccatcattcatttctacccactttattaataactgtgtcctactataaaaatgcttatattttagaatggagggagtagtattcaggtgagcccatgtggggtttgcggctatgagaacgggtgggcataggtgaattaggaggagggagatttgtgataaatcatcttatcgggagtatcgaattgagggtgacatttgggatggttttttaaattttcctttttaaacaagaaatactacgttttaccgttgataagtgattgactctacgaactgctatcaacgaacattaactctacgaaataccattaccaaagtgttttttcttctgtttctgccatcttcattaagtctcccattagatacattccgttaacacgtcatacaaaaaatacattttacctatagaaccatatctcagagtctcagagtaggaagtgcttgatatatttgaaggggtaaaatggaaattttgcataaagttaactaggtgcatttgatactaatgctagtggagttggcatggagaaaaaggaaaaaaaattaaaacactcttatgtgatgttataccataaaactcccgttctcgagtatcaaacattttctcctcataaataggtctataataataatcttatcatctgcaatgcgtcatatgacatagtacaatgtatgccttttgtgcatttctcgaacaccaagcccgtctagctcagtcggtagagcgcaaggctcttaaccttgtggtcgtgggttcgagccccacggtgggcgtccattcctttttttttctctcgtctccactccactggttcggagaaaccccatgcttgagctcgcggacagctcagacggagaagatcctcctcactttcttcagtttcctccggcacaacgggcagctcccgtcctcctctgccaccctgcaaccacagcgtttgcaattttatggtgataaggtttacaaaccctgaggttatcgtaattatcacggacgataaccacggttcatggtaaccacgataaccgttaataacgataatctcacttaggccgagtttagtttcaaacttctaattttttccatacacatgaacttttaactttttcatcgtttcaattttaatcaaacttttaattttagcgtgaactaaacacacccttaaaacagtttagtacctcgtgccgcacgcgtggcaggtggcggagtgcccgcaggggaggaagaagcagtccctccgcgcgtcgcagcacaccacgcataggtgccgcccctcgccgccgccgccgccgccgcctctttcctctacgtcgtcgtcgtcgtcttccccgtcgccgtcgtgcgagacggagtcgtacgacgaccccaggctcgcgtcgtcttcctctttgctcgccgccgccgccgacgacgacgacagcagcgaggctctcgcgtctcctcctccaggcccgggaccgaacagcatgttcagtatatcgtacatgatcagcagtgcaacagccaacagaactgcaattcagagggattaataatttagtgtgcagtcaatcctaccattaatttgagaggttcttcttgtaggtgattattgagttggtacctaatccgatgatgtacactatccagcgaggtccatatgacagcttcacataatgaccatcagaattcagtccctgaatgaaattgtgcactagactagtcagtactgcatccggctaaagtgagcattgtacagtatacgagaggaatctgaagatgacagagaagacgctttttgtcacctctttggggccggatgacagaaccacaacgttttgtcctaaaaacggcagtttgtaagtgcaaagagagctggccggtgagcatgtataatctgctgcgctggtgttgtagaacaaggtcctgattctgaattccagtagcacctgccagatgaaacctctgtaacaaggctgaagatgccacaaaaacattttggaagctctgtcgctcttgacacggggtaatttaccgttacatcctgattgttaaagtttcccaaggcaatgaagtactctgaagagagattgatagtctgcttgattgttccatttcctgtgattacacatcctgatagcattagtatacggattctcccggggtactgcaagtctgcaactgattcttagtcaatgagatcatgcttaccgtgcaccaagtgccaagataatgtggtctcatttgctgatggattctcagcccattgcaagaagctttctttgcctatgaagcagtgaagcaccaacacgcaagaattttaatggtgtcagtgaaactctgttactgatatgaaaaaatcacacttaaacacacttgttcatatatctgaacctttcttacctcgcgcaatgatcatgcagattggacgagacgattcagtttcactcctgacgctgtaagctacttctatctccgatcctctgttaaggaaatacacccattcctgcagcacacaacatggagtatagtaagtagcaactaatcttcaattctgaaaataactgacatgatcatgagttcagagtttcaaacagaatcacacagatgataacgcagcattaccatgtgagaattggctggtacgacggcgcggcgagcctccgaccaagcggctgggacgccgagaggcggagcgaccggcatcccgtagagcaccaacccattctccggcgaccctccctccgtccttgcctgcaagagcgagtgcacacattaaaacactcgtcctgactgagctcgtgcagagctacgggaggatggtcaccttgatgtcctgcgcaaagaacgagttcgtctccacaagcctcgagcaacctgagccgatgacgactagctccggcgagccgtggtaataccccaacatcaacgccgccggcgctgttccatcaatgtaaaggatcaaagcgagttatagcactgagacataggccgtgttcaggtttcccagcacgcaaagtgaagctcgtattattgcatgattaattaagtattaaataatatttttttaaaaaatagattaatatgattttttaaaacaacttttatatagaaagttttttataaatcacaccatttatcaatttgaaaatcgtatgtgcggaaaacgagagaggtgggttagaaaaatgggaggaataacacagccatattatgtgttgtcgatcagagagattcggagtaactgacccaagaaacagaaggcgaggagggtgacaaagcagagcactgccgccgccatgactgtaaagtctgtacccgtcgccggcgctggacagcaagacgacgcgtgagagaagctgtgaatacctgaacggatcacggccgcgggggattttgtggaatcggtgtcttagctgatgtgtcctggttcggtagctggctcgtgctccaactaccattccacctagccgaaagaacagagcagtagttagttgagacttgagacagaactcacagaaggcaattcgacacgagttagcgattgacattaggcttattcattttattaccactttatttgggctttggaagtagagaatagaagtaacctttgacgattagaagtaactatacagtaacggaaaaataactttaaaaaataattacagtattacaagtacattactagaggaaaataactctaaaaaaatagaaataactttacatggtattaaaagtaactttaaaaaatagaagtaactcatgtaagaagtggctacactggtagaggaagtaactctcaagaaaaatataagtaacttttcatgtattaaaagtagctctttgaaaaaaaaatagaattaaacatcctgggaatacctatattgctagatgatttaaaaataagaataaaatttagaagtagttatgatttgtataagtcacttttaggtcttattgaatttactatcataaatatctgagaagtaaattaatcaaatctagaaataatttacaacaaaagtaatttgcgtatataaaaaagtaatttacaacatatatatttatttttatcaaaatataattatgtaagatcttgttataaagatttaattaaagaatacaatgatactatcagagtgtggatccagtatataatttgaaacaaaagtttatttgaggcttagctattatgactattttttctttgttgttgcatacttgcatactcggaaatacatgaatgctaattagacataactaatttcggaaagtgcactcggttaaacatcgtattaattatgaaagcacaagctttgtagtctcgtccatattttttactttgaaatttactttgtgatcacgatcacttgtcgagttgaccccctcatatttaaaatctggcttcaccactgtacatgaacagtgtattttcatgcttaggcatgatttagtttccaactttttctttaaacttttaacttttctatcacatcaaaacttttctacacacaaacttccaatttttccgtcacatcgtttcaatttcaatcaaactttcaattttgatgtgaagttaacacacccttatttcctttaagaagatcatctaacggcttcgatccttgatcctattcagcattgcttcaaatcatttgtgcagaactgctcagctaccactttttgatgaggccttcaaacaactcttgtctaaaagaaaaggagcagctgatggagccgccgtcgccggtgcccaacagtacatccttctaaaatccaggacgacgcatgaagaaatcgaggcaagtttccttagaacacggcaatcatgctgctccgcgagcgcgatgaccttccccactgtgaacgcatcaatgtcgtacctgtcgtcgccgtcgccggctgcttgttcctccatcttcttcttcgtcgtcgtcatcatctccggcaacgagtcggtgtacgcgaagaagagcaacgccttgaacacccgcgcctccatgccgtcgacgcggacgatgccggtgctttggccgacgacgacctccttcgcagtcgttgcgccgaagagctctaggtcgaagacggacgaccgggcgtcgagcacgcaccggtgcgcggcgaacctctcgccgccgacctcgaacaccacgtcggcgccagtttctccgcggaggaggtcgccgaggtgacggtgcaggtcggacggcggcccgtcgacatcgacgctgccgggcgccacttccgccgggcggaactcggtgacgacgacgtcgcatcggacgatgaaggaatcgttcttcagatgcctcctcctcgacctctccaagattctcctcttgacgaaccggctcggcccctcgccgcgctcccgctcgtgaagctcgtcaaagacgacgacggcggcggcggcggcgctggcgcttgctccgcctccttctccgcgtcgccggcgaaccggaaccggtgctgcgcgtacaccggcgcggcgacattctcgtcgaggatgaggtcgaaggagatgtagtcggcgcagccggagttcttgccgttggggtagtaactgatgcgccattgatggcctccgatggcgaacgcgctcgacgtcatgtacactccggtgggtatcggcgtggtggccatgtagccgtcgatcgtgaggaggttgtacccgctcgtgacgttggcttggacgatggaggcggatcgcgacgccatggccggcaaaccttggtgtgttggaaatgcaggtgccttcagtttactactccgtcatcgtatgctgatcggatcagatagttaattaggccctctgatcttgtccgaatctgggtctgtttgtgcatatcgttggatcacgcgtacacaaggacgaagggaagtttggctctgaacgaccaaatgggccgtggaggctaatgagccggatcaagaaacccacaccagcaaattctccctctgttttcgatggttttccctgcatctgtacaactacacatagcagtcaaagaatgactctaaaaaggtgataaaatacaggcggtttcatgcgcctatgaatataacaaaatataatactagctacgattttatccctctaattcatctctgaatatgttaaaaaatatgtaagcaacatccatatctcaaacatagagaaattgttggtagaaactaattaatcaagcacgcaatatgcacaatgataggtccaattcggagcccacatatataacacggctataacactgtacaacgagctgctatctctgtctcaggttataagatattttgactttggtcagaatcaaactacttaatgtattcaactattgattggatgaaactaatttagtactgtaaatattactatatttatctataaacttaatcaaacttaaaatagtttgactttgatcaaagttaaaatgttttataacctgaaacggagggagaagtaactttcagagcatgccaatcaactcctccgtgatgaacgggcagctcctactcaggtggtagaaaccatcagtggctaacaccgccattagattgtctggaaagctgacaaaatctaagcaagcctttatgaggccatgggccatggcaatggtactggtcaaccaacgccatgatggacgccactgtgcccacgtcaatgtacttgcacaacttgctctcgcatatcagcttgagcctctccatgccgtacacttcggctgcgacaagcagacgctggcatatggcttcttcctcctcctttctcatctccggcaacgagtcggtgtacacgaagaagagcagcgtcctgaacacctgcggctccatgtcgtcgatgcggacgacgcatgcggcgtcgccctctttcatcgcgccgaagagctccgccttgaaaaccttggaccgcgccgcgagcacgcaccggtgcgcggcgaatctcaccccgccgccgccgccgacctcgaacgccacatccgcgtccttccctgcacgaattaggatttaggagttcgccgaggtgatggtgcaggtcgggcaatcggggaggcttattagcgacgacaaggctttggggcgccgccgtgtcatcgttgacgacgacgacgacgacgtcgcagcggaggtgaaggaatcgttcttcatatacctcgacttctccaagacttccctctcgatgaacttgcagcaactccgccactccggtcagcgtagttcttgagacacgtcgacggacaaggcggcggcactgggtcagaaatgcccgacatattactacgaatatttggatcacataagtaaacaaagttcctttgtttctgtttcactattctgcttaggaaggtacatgtcatttgctagcacatgtttgcaatttatctcgtatggagcaaatagaaattaacccgaactcttgggttccagagcaccataaacttcattgcatatgtaccgcaatcaatcctccaaatgaaaaatcatatatgggaaattaattattcaaatgggcaaccagtttcatgcacaacataggctaggtccttccatctagtatttgtaaatctattttctaaagctgtgtcgaagcaagatttcagcaataataaaagggggtggctgtcaagctaggaaagtggatgggtttggagacaagaaattttatacaggttcaggccttcttattcaagaagtaataccctactcctgtccggggatgattccgccgagtgtgttattaattgtatagactgggaaaaagaatcgccttccaagaggcacacggaccctccttatataagggaaggagtccgctttacaaaatacagtccatatcctaacggaatatgggattatagataaaatacaatcgtaaccgactaagatcccgggtatttccttgacatacaagtttagaacctaacccgagtattcatagagatattccatctatatttggtaccgtatatccgactaaattacaaccgtcatgtcgatatgggatatccataatctccacagtagcccccgagaccttcgtagttgacaaaatagccttctcgaaacaaaaaacagtagtccgagtgcttcaattcaacttgctccagcttgccgagtactaaaaatcaaaaactgtgaagggcgaaaataaaacatggtgcatcgagtagatgcacctaattaggtgtagcccctgactatgtgattagttgaaaaactaaacatatagtcaagaaccgagtggttttatagcgaagcacgcatggtacttagtaagatacccagccgactgcttctcaacttgaatgtatcaaggacaaaaaatacaagaagggccgagtgataaacactcaaaggtccaaaaatagacatgtttgataggaatccgagtaaaaatctcataaaatgacccaccaaacaggatagaaaatcatggtaattaatgagtccaatagcctaggctgtgacccttaccataaccaaaataagcatataacatgctaaaagaatgactattaataaaccagtcatctcaaatcaacccaaacagcttttgcagcctaataaagcttacaaaaaaatggtataacacctttctgtcaggcacctttttatgcgcatcataataattccaaagaattattgaatcgcgttaaaaaggattttaacagcattaggccacaccatcgtaaacacaaattgccaaagcaaaaagtgcctaagtccctagagatcacaacagaccacgctgattatagcattgggctgaagtactgtacaggcccaggcccattagtgctcccgataccctaataataccgaagtaaaaaacgtctcttcgtcttccccgccgagactctcgccattttccccatttcctgctacagtgcaaaactacgccgggcaaactagggttcatcaatccgctccaatccacactcaaaaacttcacgaaatttctccctgcatccaccgctccaattccccatccctttccagccgtatctcgaactaaatcagaccatccatttcacattcatggcggaagaaagagaaagcttcgagagtcagtgggcgccctccgatgtgacggaagacaatctgaaggagatggtggcgcacggcgttcttccagcaaaagagatcatcgggtggcgaccggcatttggtgaggcattcccgacctccgatacacacgaaatcgtggtatttgctcatttcttctacggtggattttctcttccaacctcaagatttttccggggaattctgaacttctacgggattagcttgcatcatctgaatccaaactccatagtgcatattgccaattttattcatgcctgcgaagcttttctgggcattaggcctcatttcgccttgttccgctgcatcttcttcctcaagccccaaccaaacaagagtaaaccatgcatcgttgggggtgctggtttccaactcaggggaacactaagccaaaaatacttctccatgcccttcaagacctcaaataaaggctggcacgcaaattggttttatgttcaaaaccccgagcctgttcttctcgagtactcctgtcttcctccagtttatcgggatacttggaactcactgccaatgggagacgaagctgcacaagcagtagaactgatggagaggatgataaagctgaaagaacagggccttcaaggagaacagatcacccggcactttatcaagtgtcggttagctccaatcaaagaaagatctcgcacagccttcgaatttgacggcaagcatgacccaaaccgtgaagatccagattctcttgacttcaaggtcatgaaggaaaggatgtataagatcttctcaaacgccatcgttgtcagctacttacacttgttgccagtcgtaccgttcaatgcattcaatcctcctccaccggtacgtattcatacacttcaacctttctcaaaacatgatcttgctttcttgttgaatcagttaacaatgaaggatattacacccaggaatttgctttgatgaagtcggatcccccaatcgctcaacgccgatcgccccgccaccaaactgggcaagggagcggaggaccaagaattcggtctgaaactcaaccaagtgcttctgatccaatcggccagtcagattctcgaaagaggaagctggttctaagtgacgacgaagccgatgataccgccaggaggcctggagaccgagagacaaccaagaaactaccaaagcaggctactccaaggtagaaaacatccagtcgccctgtgccaaagatcaggaagtcttctaggtgcaactcatataacgatctcttttgcattgatgcgcacccattgcggcaataatactgataatcaaatttgcaggaaaccatctgatatagatccgtctgggaaagactctgacccgactaacgtggacacaagttcttccaaagaaaccgagccaactgctgaggatcatctgagtgacaatcaaccggcaaccgataatgtagaatccggtgatcaacccccgactggaatccagtcggccgaagccgaagccggagttaatcaggagcccccgactggaaaccagtcggacgcagggccaagccaagagattccagaagtcgaaacccaagcagacaaccctcgtggacaagacgccagcaatgaccggagatctggatcccctttaaaagtatccgaatccactcgtcctcgtccagaaatcattacaggtaaacactttgtccgaaaccatgttgacccaaataactctgatcgatcgtgtaacctttgtcaatggatgcattaggaccaatgatcggtgatgaagaagaaattccccgtatacaaacagccgaagattcgtgccctcctattctggtcaagtggtgggatgacaacttgcaacctcaaggaattgtaataaaccggcaaaaagaagacgaagaggtatgcctactgaaaaaggcactcaaccaagcgactcgcattgtaaatgtaagttccttgacgcctaacctcagccatcttgtttaccgtctggctcgagcgctgattaaactgctccgcagaggattcatcttaggaacgaggcgaaaaccgcaaccctagagagactagttcctcatcttggaaccctcgaagccaccaggagtcaactgcacgaggccagagaacttaccaagaagaatgaacacgatctgagggatcggattgctgagctccaggagtccaatttcgaactgagtggctcatcaaaaggttcgcgcaaactctgcccaactgatttgtgctgttatctctgtaatcttgattaaccgaagttaatgtagtgcaagctgccaagatatctcaactagagaagcagatccaaactctggaaaatgacaaggcagagctggcaagacagagggattcggctttaaaggaggttgaaggtaccaataatcaatacctcaaaagccattatcttctacatgctgattcattaatgtgaatctgttgacgcagaccgcaagatcaagtctcaagcacaatttgatgtcttagttgacaagatcaacaagcttgaaggagccaaggataaagtcgctaatgccgctactccacttatccaggccatgttcttcaataacgccggttcgagtacacttgatgctgccgaaatcttcgacaagctgagagtcgctacagatacttacttcaagaacatcaaagaagctggaagtatgggagcaagtctggcattggcgatgaccaaatccctttatccaagagttgacattgatgccattgatggctttgtagacgggacgagcgaagaagctgctcttgacctcatcagtgatgcgtagaaagcggctgacaagattgctgctgatgtagttgagagattccaagatgtcgaccttcggccaactgggtctgataagtctaatgatgaaaaaactgatactgattgatataacaatgattttgatgatcaatgatggtggaagctcaatttgtacaatactgatgaatttatgctatgcttggtgttccatacttagcttctgatttcttaaaagcctttgtcaagccttattgagcctaaaacccgcaaaagctattaaaaaccttcagtcctcattggctaagtcgaaagaccaaacagggcaatgataaatcaagtaagcaaattgaattgataaaaatcacactccattattatcataatggccccctgactgaaaacttcaaggaaaaacttgaagttagcagtcaaataggaaagatacaagcgaaatgcctaagcataaaatcgacgaaggtgttcaatattccaagaattgttgatgagagtactgtcttcgcgcttgagtcgataagaacctggccgagtgacttcagcaattatgaacggttcttcccataagagagataatttatgccgatcccgtgttgtttgaattttcctcagaaccaggtcgccgactaaaaaggctcgcgatcgaacattccgattatgataacggcgcaatccttgcaaatatcgagtcgactgaattaaaactgcttctcgggcttcttctagtcggttgatgtcgtctactcggccctcttcatagccctcctcgttgaagttccgaaatcgtagtgattcaaattccacttcactcggcaacattgcttctgcgccataaaccaaaaagaacggcgactggtcggtagcccactaggagtagtgcgtaaagaccaaagtacggacggcagctgatctacccacttgctagcatagggacgtagtcggtcaaaaactcgtgctttgatcccttgcagtatcatgccgttagcgcgctcgacttgtccgttactcatagggtgtgccacggaggcgtaacaaattttaatgccgaagtcttcacaaaagtctttaaatgctccgccagtgaattgagtgccattgtcagtgatgatcctattaggtaccccaaaccgatgcacaatgttgatgaagaaatctctagctttatctgctgtgatcgtgatgaccggtttagcctcaatccacttggagaatttgtcgatagccacaaagagatgcgtgtaaccgccgactgcccttttaaacgggccgaccatgtcaatcccccagaccgcaaatggccaggacaacgggatggtttgcaactcttgggctggcaaatgaatttgtctggcaaaaaattgacaaccttcgcatgtccgcacaatcttgtcagcgtcggacaccgctgtaggccagaaaaaaccttgccggtaagctttgccgacaatggtccgtgcagcggcatggttaccacaaataccaaaatgtatatccttcaacaactatatcccttcttccaaagacacacagcgctgcagtattcctgacagacttttcttgtacagctcagtctcatgaataatataaagtctgctgcgcctggaaatccgctcagcttcatttttgtcttgaggtagttcttgtttgctcaaaaattttataaacggttctctccagtcggcttcgatcatgcttatgccttgaatatccatggcttcgactgtctcttttctgggcacggtcggttcgtaaaggtgttcgacaaacacatctgaaggagctgcttcccgttttgaaccaaaattagccagtctgtcggctgcctcattgttatgtcgaaggacatgggtgagctcgagtccatcgaatttattttccaacttgcgtacctcttgtcgataagcggtcatattatcatctagacatgtcacgcccgaaaattcacaagtaatttccgaacttatttgtgcataaaatcctcgtccaggaatcagccgaggtacacaaactgacaatttaatatacagattcatcaaattaactaaaacgataaatacttacttaagaggcacttagtcctcaccaagaagaaaattgcagcggaaaataaaatctagcgaagctccggctccactcccacaggcagctcaactggggtataagccaaacgtcttctccttcgcaacttgtcttcaactgaggttgattgattattgcaaggtgagcatatgacatactcagcaagccacacagcaaatatgcaagtgcacaaggatatcaaaggaatggcataatattggctcatttgcaaaagcagcatttagcaaaatatttaagagaagtaaaacagtggagtaattaatcagaaattttaatcaacactgaacagcacacccatgctgcacaggcccaaccatcctgaacaaccatacccggctgaacagatctaactccaaaccaggagctaagcaaattattatcaggtataacatccataattattgtgagaggtgtgagactaatcacgaaaaacattgctcaactcgcccataaccgcgggcacggctattcgaatagttttactctggccagaggtgtaccactgtacccacaagacacagcctcaacatcatgtctaccatgcgtcgcgatactggaaagtacccgaatagaggctgtgacaataccctctgcataacacaactcaccacagtgcaccattcctggatcataatcacccccttataaaacaaggcatggactccccagcgacccccgtgggcttatttccgccacttctcagtctggtgctccgcaatgaaccatgctatacaaaaggtaaagccgttgcccacgctggcttgtggttggcacggttaatgtttcacaacagtagctcgcgaaccggtccttaattgccatgagcacgactctcaaaaccatgtgctcacaacccaccattatcaagttttagttggcaagtaattaattaaccaatcacgattgaccatcgtgagctaccattaaaccatcattaaataataatgaatcataagttatcccaatagtgtgctaatgtttctaagcatggctaagcaatcatatctaatatctagttgaaccaatatatataaagctcaactagtccaattataatcacccaaggtatcaaggaataaagtaatcgagaacaaaagggccataacaaagaataggttaattccacccaatgacattcgaaaataaatgcacagttgaaataaatagagaatttaaatataggatcaacatgctcaaaggattgtgtttaggatctgtgtgacttgccttgcaataatcggtcttcaattaatcttcttgaacactcccgacgcactcgcgaaccttcgcaacgacggaaacgacaagctatcacgcaaaacgaggaaaaagactaataaaaaccaaataaacaatacataaaaagtaaacaaacatgtagatcatatttttagatgaattatgagacttgaacggcctcattctgacttcaaatgaatttattaagaattttacaagattaaatctaattaaagcccatttaaaaagaattaaataaatttaattcaatttatggacaattttaatatgtagatctttattttaaacaacttttgcaacttgaaccacattaaactgagttaagatgaattagttatgaatttttaaagattaaatcggattaaaacctttatatggattttaattgaattatgacgcaataatgaattatttttgaaaaggaaaagaaggattattgcgtcagcggctagggtttcggtggaccgggcgcacgggcgacggttcacgggaacggacggccgagatcaaccctatccaaaacggacggctgagatcgatcggtccacgaccggctcacgggaaaagggacgatgacgccagcgatgacgtcaccgacagcggcggcggctcggcggagcggacagctcgggcggcgcacgctcgccggcgaacggcggcacttcggcacaaacggagggcaccagcacgtagaggacgacgcggcgaactcaccggtgaccaaaacggcggcggaagaccaacggacggcggcggcgacgaggaggaagcggcgaagctcttcgggtcgacgacggcgacggcgctccgacggtcttcggcggcggcgaagcggtggacggggacagcgatgacttggcgaacccgatggtggcgacgtgtcacgcccagaaattctcgaaccagaatttctaagctgaatgtgcattgaatccctgtccaggaccagccagggtacacaaacgacaattgttgacatacagatccacgtcttacaaaaatagaaaagattacaaatgcagcggaaaagataaaagcgagctaaaccgggaagcttgacttcagcagcgggcgactccactccacagacaatccttgacggcagcgacgaaaccaaatttgacaaaacagctccaactaggaaaatcttcagctctggtgtgggggaaaagagagcaagactgagtactacccactgtactcagcaagtcataccggtagaggaggtatgatgcaggatataaccaaaggaggctagaggttcttttgcataaagctagcatttaaaagcagtagttgaaagcagtaaaacagttgtagtaattaatcaatattaannnnnnnnnnnnnnnnnnnnnnnnnnnnnnnnnnnnnnnnnnnnnnnnnnnnnnnnnnnnnnnnnnnnnnnatctccaatnncgcgg

SEQ ID NO: 5883 - DNA, 28518 bp, Oryza sativa
tactacctcaaacaccttcctttttgccttctcagccactgacttcttcccaggactcatcactttgggaagctggcaaatagggggagaaactacatcatcccagtctacacgagcaattgtatcatcctgatcaaaataaatcacaaatttgtttgccctgttaacaacctttgccattacttcaaagtctgcctgtgtttctatcaccctaagaccatcttcaagagttttgcctggtagcaaccaatatgccttgaagcctagactcttatcatacccaagcatttctaagaaaccatctaaactaacagcacaccaagtttttgcctcaacattatcaaaccaatccatgttctcatcttgtatgccctgttgctaccatagccaacaaagaaacccccatggtgtatctcagcagtgaatgtacccgaatccttagctgcattacaaaattggtcttcctaattagcaaagattactgctatgatggctgtcaccaaaaccctaaataatcaacaaaattcgaccacagcttccacactcgaaatcatcaaataaatagaccacagctagcataactaccacccatctgcaatcaaccaaaaaaaagctcaaattttgggtccattgtacataccgtacaccggcggcggctctcctgttagccggaacaacatgcctcctcgccggcttcaacacctccgggaggccagtgtctctgcaccctccccgcaacctctcaatccctatctcaccagtgatcacagcccgcaatttctccggcgatcgcctctgcttcgctgtccaggggagaagagagtagagaagagagggctaaggtttggagaattcgagggaactgaggggcttagatttaaaaagtgcacggtgcggggcggtgcggtgtggcatcacacgtgtcgcaacacgttgctgtccacgtatgcacgaaacgggtcaaagcgttctctagaccggattgatacaataaaacaagattagtgaccttgaccccgtgtttgtaagttcatggacctggatgaaacctcctcacaagtttaaggaccgccagtgcaatttactcctaaaagaaaatggggggagacaaacattattctttctgctatgtacaagagacaatccaatattttttctttgagtatcgtgttgcttagtttgtttagagatgcgtgttttttgcttttaatatccccgcaccccgtaacgccaaaaacattttcggtaattagcttagaggggtatctaagtccattaagaagttgattctaatcggagctagtgctgtatgtaggtccaaaaacattttcggtaattagcttagaggggtatctaggtccattaagaagatgattctaattagagctagtgctgtatgttggtcaatttggcgttgtcacaatgataaagtttttaatggtaaacaattatctaaccctatgtaggttatcttcatgtcttcctactggctccacttttggtctacaatgctaccacaggaggagcaggatactatgcgcaatggtgctacactcttggaatcggtagccaagggtctcttattccactatgggtggcgttgttccataagaattgctagctaaaatattttatatggttgaacgctagtcaataataaaggggagttggggatttgtcccatcaccttatttctcattttgatttacttttatcttacctttttattactattaaacttatggctgtgtgtcttatgacagaagccggagatataatccatttccattatctaaaaaattcatccacttcatcgatcctgcaatgttgtaggtgggtcattactctctcatccctgtcatgctgatcaattatctcttgtctcactgtctcagctatatatatgaacccctcccgatcattattcacttcccttaaattggcacaaaaaaaaagacacaggggttggagaacacaaaagtcttgagacgctattttttttaatcgcaatcttttgctgatcatccccataggacagcataaactattcctgctttggaatgggtggcatcaggaattcagaatcttgccattgcctggtgaatcctgcaagagggagcttcaagtaacctgccacgttgagtgtcctctggaatacacatggcgacaacaaggagcccgtgtcgccataggcgatggtccgccatgtcctctcgagtgacgtcgtgtacactccgtttcttgctgatgcagctgctggttcaccatgaggccgcaggctcgcctgcaaccagatcagattagtactcctaccccgttctttctttgtgttaattaccaggaggagatatttcttttatgggtggattgggctcaatcggagattataatgcgacaagcaaccccacctgaacaacaaagtttttcagcccaacttataacttttcagccctgtaatttacactgattttcgttccaaaacttgtgttccaagaaggtcctgagggttgttttgtttccaagatattagttactatatttgttaaattctgtagtaagtacttcaggatagaaataactgctagattaaccaacattgcaggtatctgcatggaagtacaatgtgcgggactgaacaatctagggtttaattgaccctatcctatcaattaaacctaaggttttggtttaccagcccagatggtctgccatgtgagctgcctgtcatttcgttcagcctttccgtctcacaagcaatccctcatctccattaattcattgatccattaaacttaaaggttttggtataccagtccggatgatctcccacggagatcgcccagtccagacattgctacgttcgcattgtagaaactacatgtggagattacgggtttcatatatccacacagacggcttattcgactgcgagcgcttaagccgtctgcacgtgctaatagaaaatcgcaaaaaaaaaattccagaaatcaaaaccctagccacagaacagtaacctagaaaccgtcgccacaaccaccatgtcgtcgcccctcccaccgccactactgccgtcatcacccctcccgtcgtcggcggatccatgtgcgggagggggagggggttccccgattttgtcagcggctgatccgccctccccgcggtcgccgacgatgaatccgtctgtcctgcggtctccggcgacagatcggccctccctgcggttgccggcgacggagccacccgtcccacaatcgctgtcgacagatccgcgcaccgttgtcgctctcgtggatgggaccggccgaatccgcgtgctgtcaccacccgcccctgaggctgcctccgccgcctgccaaagagaccttcgtctctgcatgccgccagagcccgcctgcgaggccgtcatctccgccttagccaccggtggtggagaagagaacgaggagaggaaaggaaaagatatgaggtggagtgggaaaggaagggtgagaggagatgtggagtgagagttgaacgggaagagagaaaataaaaaggagtgaaatgtgtggtagagacgaggaggagaaaaagggatgcggggacacgtgtggcccacttatctccgagttgcccgcatgcgaaaatgattttcacatgtggttctttgataggcccgtctaaaaaatatccccatttttgcatacggctccttaagatgtttgtatgtgaaaatagtcttttccatgtaggccacttaacgagttgtgtgtaaaaataaaaataaaggtcgatttttccagacgtggacacttatgacccgtttacaatatattagggtgctcttataggaaaatcatttgtgtagtagtgtatgtaactatataaggaaatccatgttatgtccgattgggtttccctttgtaactttgcccccaacctatataaggagagcacgaagccctccaaggacataacataattaggtcatcagattaatatacatccggtggatacaatagccaaacaggagtagggtattgccattaatcaagacggtttgaacctatctaaatccttattttttttatccatttaattttaagtctcgtgcgttaccacttttattattgctgattttcagaatcgacttaccgttctctaaaccgctagatttgtgataatttgtgcctgcccatatccatgtgccaatgagcgtcctgtttgatgtacggttggtctggctagacatcgctcactgtgctctggaaacatcgtaggtgcctgtgacctgcctatgatttcgttcttccatctcacacgcaatcccgcgtctccattcattcatctttcgatcgcgcctctacacctgaccttttacggatttccgtcttcgtctgtgctcctccaccggcgtctacctgcgttattcttgcttctcgattatgtagctaggctctagaaccttattgtcaagctatcctgaaccttattgtcatgccatcatgccggccgtttgaatataccagcacatggcagggtcctcatccttgcaatttctagataagtatagacattcatgatgtgactttgcagtagtagcagcaaagtcacatcagcgttcagtagctattcctgcggcagtgcttgtgttgtgcagctgcagaacatgccagctgaacaatagaagagtagcaatgtatagtagtactactagtttcaagggttatcctcctataaaagcagaagatctctgttgttgtctacttctgcacaccggctgccgtagcagcggaccccccctcccctcgaagggggcgactacgactggcgcatcactctcctccaatgccacgccctcgtccctcatacttcttaggtagcaagacaatcaatatttcatgcaaaattaaaacatgtcgtcttcaccttcactattggcatgggacatgataatgacccatcaatgtgatattcaagcataaattggattgggatatctcttcattcattaaactgcagatcaaaatattttgagtaaattgtgctttgcacaaggtagagtatcctggtttactttgcaccggatcaggatatactttcactctacatttgggtatcttgaaataattatcactctgtaaagaggttcaccatataattgaagggaaattttagaaatcaagattgaatctcctggaactttctgaccttcgacttgtttcatgaaatttcattcagattttatgagaaatttctatatgctaaacttgatacaaagtgaaacatggtgagcttcatccaaggcaaagttcaatttaaatcaattcacttcaactggcagtatatatgttcaaaatttctctccgtttttttgttctggcagtgcttgatattatctttgttagatataatttaaaattttccattacaatatgaaacaaactaatggttcttttcatattttggttagaaaaatacaatatgttcagagaaattaaaataaaaggaatcaaggaagcaaaatatctacaaattgaaatcaggtaaggaaaagccagagaatgggactgatgaactccaagatttgttgctatgaagttccaggttcaggatcgtaacgtccactaattgcaattactccagaaaacagggaaactaaggtagggatgcatctacaatcgccacaataaatctacaatattatgcgattgtggccaaattcggcattgtcacccctaatgacaaaaggtggtcagttctttgcccaactttcctaactcacctccatcattttccgtgcgcattcttttcaaactgctacatggtatatttttttgcaaaaagtttctataggaaagatgctttaaaaaatcatattaatccatttttaaaaaatagtaaatacttaattaatcataagaaaatgcgttactccattttccgtgcggagaaatgagttcccaactcgacataacgatctagcaaagtagtactctctccatttttcaatatatgacgccgttaacattttaagatacgtttgaccattcatcttattaaaaaaataatataattattatttattttattgtgacttaatttattgtcaaatgttctttaagcctgacttaattttttttatattcactcaaaaattttgaataagatgaatgatcaaacatttgtcaaaaaaaaaagtcaataacgtaatatattaaaatacagtggtagtagttgctaaaagttacacattttcgtgcaatctgattacaacattatatgacccaaagcaaacaacatgttaatgactacctagctatatataggatcaagacccataattatttttcagtgaaaagcatgttgacatattcttattatccactaagccttaatcaaagttgtttacttattgtaggttgatagttctaagtgcattgacgccatattggcatacatgcaaagttgtttacttatgcacatgaacaattagaatatttatgcattgaagcttaaatatatctacctacaaccacattatttcttttagaaaagttataacttgaagttacaacaaatatgtgggtttcacaacaactattttataagttttcttatgattggcgtgaaaagggggaggaatatgtgtattttgcaaattaatttcagaatatttgcaataaagaagcagaagaaattgtagatatgtggcaggcaaattggtgtgttataggtcaaatgctagaagcaaaaatagcacaaactattagcgaatcttatttgggataattatgaattattgtcacacaacgaagtgtgttatttattggccattgaaaattgcatattcatcgaggaagtatgaaattgcatatagctatttgaaagctattggtttacttgtagtaaacaatatcctaaataattaatgaccctttggattcgaatgattctgaatgatcaaatgacaccacatttactttggcgtaatgaataaaagttagacatgtcacccaattaatttattggcatattcaagaagaataaatattctcgtagaataatgtttgggtgatttgaaaagttccatgatggttaaactatgttcatagattaatgttttagtgttatagttatgttcttgaagacatcatgaagttatataatactaacacatccatcttatgatcatatctatgttgcatgaatataaacatgaagtgtattgatccaacttaattagagaattgaatatagtatgagtaattggatcaagtcttgggcaaataagaaaaaagctagaaaatagaggaattttgtcgactagtggatatttgtttgggcttcattgtcgcagaataataaccctctatgacttgggataacctacaatattagggatgtgcaatttttcatgccattgcattaatttttatgttagctcactgcatataatatctttaccccctttattttgtataagtgcatgttcaatgaatgaacatttccctcatatatcaccaccatagcatacatatatgggcctccacatgaagttggggatacaaatggaccgaattccattaatccagtgcctatgataggggatttttgtgatatgctattagataaagatcgaatatcagcatcagggggagaaaagcccatgtgttaaagatgccttatattttcaagaagaaaaagatctttataagtaagaataacgtacaagccaaactaaactagaaggtttagtttattctcgtgtaagccagaagcggaagcttgctagataattatgaattaaaggagtaatcagaagttatgtttacttgtagtaaactttctgctaacagtggtataccccgggttttgaatagtatatccacaaatgcagagtgacatgttagtcaatgttctaaaatctacgggaacacgtgcggattctaagatctaatgactattttcaatgtacccattaataactccttacaactcttgtagagtaatcaccatgaaggtgaattgcctcatgaagaggttcatcatgaagatgaaaacccagaacgcacatctatctaattctggggtgcggaacaaccatacatcttatgtttggaaatgactaagatattgtttataatgaattaacttcacggaatgagtatgtggagaaaataatagttgtcgacaacatcgcctctatgattactaatatttctctaatgagaatccggatccggaaccaaagtccatggcagagttgcatagtagcactcatatcaggtctattgaagaaagcaatgaggttgaaccatagtcgctaaataagtctatgtgaacatggaagttcagacttaataggaaatgaagtggtgaaaagcgacggctcatttggtcatggaaaagaccgatattctcctactatgaatgtattaaattccactatatatatcgctggcaaaagtcatgaatgaataaatgatatgcagtttatgggttatgaaaatccatatgaagttttcactagaaagaaaacaattccgcaacatatatgtaaatctcatactaattagtatcatgaagcacactatattttcatgaagagaattgcaagactcgtagaagagtttacgatgactcacgaagagtttttctcctagaagcgagaatatttctcatagtagagaaaatgacttccggaagaataagttgatccccgtaggattatggtaatgtatgaattaccggttaatctccatataacaccgataactcgtactcccatgaagtggacagacccgttcaaacgaatgaataggaaaatcacatccactagcttgcaagtggattggtagttttctacatactataaaggtgtaagaatttatatatcatgaagatatacttattgatggtatttggcattcttattaattcccctaataccaaaatatagaccgttttatgtcactctaagtggtttaagctaattgttgaagattagtgaaacaatcaaattggtaatgatgactgataaatccaccaagagaaagttgcataatatttaacctcttgtattgagctaattattttatacataccgcatatgtgtatcgttgcatcttattttcccataatcctccataaggattaaactttgtttgtattgcacatttgaataagtgattatacatattgctcctatacgttgatttatttcttatgttcatagtagaacttatgaaataagtaaacgaaagattaaacattgtggtaattttattatcattgttttacacattaataaaaatatggttatgacattggaacatggaagtttcaacggatgtcttattgagggggagcatatatgctaaacattgattatcatacttaagacttggaagtcctatatttgatttacaaagaattaatcaaattaatcattattttgataatttaccttgaaggttactaccactatattgttgtgttaatccaagttgattaatataataaatcatatagatcattagctatttatgaagaatagtcgatattaaagattatgcgatcaagaagatcgtgtgttgtactctttttcccttagtgagtttttactagaatatttctcacgcaaggtttttaacgaggcaacaagtgcaatataactagcgtgtacgatgtactcttttctcctatctttttctcccactgggtttttggacggagtttttaatgagacatgtgtatagcgcggtattcgcccaaggagtgttatgaaactattatctcctgccagagataaatatgggctcataccaaatatatggaaacgtatcctaataggactcttcctaatatgggtatatatactgagagagagggcttgagtggttggttgatgtatccgcatatggttaaagcaataaagctgtggtgcccctccctatatccgtgttcatctactatatgattgtgtgcatgagacgtcgtctactactctgaatcagcgaataggccactagttatttaacaagtagctactcccatgaaaccattcatcacttcatcgatcgtgcaatggtacagggtgggtcattactctctcgtccctgtaatgttcatcgcatctggtctcactatcttagttatatatatgaacccctcccaatcatttttcagttcccttcaatttggttacaacatgccctcggctgcaaaagagactttagggttaagcacacaaaagtcttgagagatgactttttgtaatttcagtgttatgaacatcccaataggacaacacaaacagccccggctttggaatgagtggcatcagcaattcagaaccttgccatggactgatggatcctacgaaaggattgtgatggcctccatgaagcttatggttcacgacacagggtggatttgcccttgacaactcctgtcttttctttgtggcattaggagatatttactttttaggtaggctaggatcaactggggttgtaattatagaaattaccatctaaaaaacgttctttagcccaactggggctgtcatgtacgttgaatttaggtccaagacgccttccaagcagataccaaggttttttttttaagtaagacatatatattgaccacattatcatataactagatttaagatgatgcatcacaaaactataaatttaacatcaaatttataaaaaaaacatatacatttaaggtgaaatatgacaaaactacatatttcaaatgatcggctcttcctagaggaggcgcgggaaggggaagatttcttcggtgctgacgagttcacgttctaggtcgatccgctctcaggcaacacctgtgttgttttgttattttatcttatgttgggtatggtttttctatttgtagggagtgtgtcgttgtaagtttggtctatcggcccctaaaacctactctaatatactcatatgtaatgtttttatgtaaaatctcaaatatatgtaccgaaagatattttgtttatcaatctgtacacgatcaaaatcctggacgatcatgggtgatttcaagataccgtactcaaaccgagtatccctacagttttgtactccctccgtttcatattataatccgtttgactttttcattagacaaatttctttaggtttgactaagtttattggaaaatttagtagcatctataacatcaaattagcttcattaaatttaatattgaatatattttgataatatatttgtttggtattgaaaatattaatatgtttttctacaaatttgatcgaatttaaataagtttgactaagaaaaaattcaaacgatttataatatgaaatggagcgagtacaattgtagcactaaaattacattaataaactttcatattgcattcatcgttcacccctacagttgcagtcattgttgcgtggaagatagatgtagtataagggttgcagtggcagtcattgtccagtaaatccccgtgatcacgcagtagtaccattaaattgcttcaaccaatcatcctattcatattcatcttttctactgtacataagaactgcgcagaaacatcccaaaggacattgatgctctttgttagacaatctcgttagcttggcctgcatctgggcatgactaaggaatgagaggcatagagaagagaagcatcggtatccacccgttaaagcaggaagcaaatgatgtctagctccaaccatggatggcgggctggctgctggggacaaaccggctgggaatttgattcatggcaagctgaagctgaagacggaagacaagcagatgtggctaatgaacgaacaacagtgctgtctgctgtgaggagatgttcgttgatgcaagaaaacctgaggctgctggtggctatcacacttgctgttgctaattctttcatcaatattttggttgctagttggtacaaaagatatcgcactacctgaaaaatataaatacatgctagctagcttagagaactgggggtctggaaaacattatgatcgtctccagtactgccactcttcatatttcaccaacatatgagctcttataaactatagcatgatgaagagtggaggtgctgtacacttgagttctaataaaggtcgaggcccccatcatttggcttattaagtgaataagaaacggcatatttacaaataaaaattaatctgtaacctttctttcgtcttctccgacgagaagaaaagtcgtgcagtcctcaaattatcccaacacgattgatatttgttcatttctaatagattcttgattagtttttgggacaattgcttatttgaccctattttaaagcccaactaccaatttgaccttactttttcaggtttgcttatttgaccctcttttttgaaattgaagtttccgtttgactctgtttagacttcaccgttggaacaacatttagaaaaaagaaaaaaaaaacatactaccccaaagtgacaaaaatacccccatattactaattaaccctatccccacctctccatcccaaattcccaatccccacatcttcagtttttagtcgccggcgatggcgagtgctgcggccgacggaggaagcggtggcatcggcgcgcaggaggaaggagcggtgtcggcggcagctgccgtgcttgaagcggacagagggagcggcggcgccggtggctgccgggctcggagcagagggagggagtggcgacggtggcgcgagggccctcctcatcgccgacccaacgcttccccttgttaacgaccaaatttggtaatatcagcatcggaaaagaggattagatcgaagtggagtcgaaggcggagatcgattcgagaatagagcaagaatcggctggagtccagatcggctacgattaggatcggctggatccgagtcggactgagtaagttgatatagccgattctgataatacgacttggtatacgatatcaggttgaattaagatgcttcaagatggttgccgcacatggatagagtcttgagaaggcaattgtatctattaattaggacattttatgtaatttccttagagatatgtttagggaaaaagtctgccgcaaagacttatggtatcttagagtttgttagagataagagtcgtgtccgatatggacatagtttgtaattttcgggtataaatagaccccgaactatcacgcccagaaattcccgaatagaattctaagtagaatgtgcattaaaatccccgtccattaccggccggggtacacaaacgacaaagttaacatatagatccacgtcttacaaatattataaaagtcttacataaatgcagcggaaaattaaaagataactggagctaagccttgacttggactgcagcgggaacaccactccacaggcattctcgacggcacggacgaagcctactcctcagagaaaccaccatctgatgcatactcaaactctgggggtttggggaaaataaagcaagactaagtacaaccaccgtactcagcaagtcataccggaacagggggtatgatgcaggatattaccaaaggatagctagagaggttcttttgtataaagcgagcatttataaacagtagttgaaagcaggaaaatcaggtgtaataattaatcaatattaaccatccactgtccaacgctataccacgttgcaacaggcccaaccaaccacctgaactaatcagttccatcagactaaactagggtgagactaatcacggtgaatctcgttgaccgcccataactgcggacacggctattcgaatagttttactctgatcagaggtgtacaactgtacccacaagacacagccccacgacatgtttccatacgccgacatgccaccacgacataccggaaagaggccgtgacaggactcttcgcataaccccatctagccaagcacaccacacctcaggtttcacccccgtccccagcgggcaacgggcagtcccctctcgtgcctaggagaatccggaagcaacagaggccgtcgcagggcccgcccggctccatcacgcccacccttgcctggatgcgtcagctagaggaaagctacactacaagcccagccgttgcccacgctagcttgtgataagtacgtggaattcttccaggggtttcccgcgaaccgatccttaagtgccatgggcgcgaccatcgaagccaagcacccacagcccatcgtttaatatattttaattaaccagcaccggagcggtggtattaaccaacatcattactagaatcagatatctatgctttaatgtattttccccactgtgtgctagttgaactaagcatggctaagcaatccctagtctaatatcaagtcatgttatatccccaagctaacaacggagcatgatacaaaactagtatggctgtaacagtaggtaaacatcccatggtgacattataaaacgatgcagcatttaaagtaaaacggtagagcatttgtaatataggatcaacatgttcaagtgacaagcatgacttgctttgctctactgctggaggaacctcggcgactatttcaaagtacaccggagcatccggagagccggaatctaagcgacatacaaagcaaacaatacaaacaggctataagactactgaaacaaagaacaaaaccatttttaatggattcttcacattcttcttgatttactgagacttgaatgggcttaaacggagctcggatgaattagatatgaattttagaagattcaatgtgcttttactataaacagaaaaatccttaattgatttattgcgtaataaataaaatcccggggagagagagggtggcgccgacatgcgggccccacatggcagtgactcggggagggcggtccacggtggaccgtgtccatggaccggggaggagcggcgcaccacgtggtgcacacgtggtgccgacgcggcgcacacgcggcggccacgtggcagccacgcgggcagccggaccgatggccccgatatacccggcggcagggagctcgcggccagcgcgcgcgggctgctcaagccgacccggggccatggcgcggcggcggcgcggcaccggcggcaaccagcggacagcggtggcgattcggcagacggcgacggcgcgacgatggctaagcggcggcgctactagggaaaagagaggaggaagaaggaaggggaaggagggatgtcctcaccgaaggggtccgaccggcctggagggagacgacggtgaccggcgacgaggaatgacagagggaggtcgacaagcggcggacggggtctgggacgacctaaggaacgaaatggagaggattagtgagggagagagaccatagagggcgggaatgccggccgaagacggcggccatggcgtttcttaccggcgcacgacggggatgaggctccggcggctaacctcgacggaggaggggtggacgaggtggacctcggccgcgcgaacccaacggtggcgatggcgcggtgcggcggcggccctagcagcggctagaggcggccggagtagaggaagaggcggcggctggtgggtgcacggtgcgggagcgatggagagctctggagaggccggcgcaaaaaggaaaaatgagaaggacgcggggatggattatataggggcggagaggtcgggaacggcctggagtggcccgatttcgccggccgacgtggggaggtggaggtggagagagaggcgggattcgaaattcgaatctcggccatctcgggggcgcgggcgagcgggagaggggttgaggggtgcgggaggggcggacgcacacgcgggtgtggccgacgtggcgcggggaaggcgggcgcgggcggttgcgaggcggcggctgcagacggtgggcggccaaaggttagggatgggcctaacaggtgggccctacctgtcagcgcccgagggagagggaggctcgggcgagcggatgggctgtggccttcggtcggcccagcaacggcgcgggaggtggaggaaatgggccggcggcccatttgggaaaaaggaggggacaaaggaagaagaaaaaaagaaaagaatttccaaggattaaataatgctggtgctcatttttaattggttaaaattatttctagagctctaaaaattccactaaaaatcttgttagcatatttcgacatatagaactcaagaaaaatcccacatgccaattccgattattatttgcattaatttattagggtttgtcttgctttgacaccggtattttctctaggtgatttataattttcatttaggcttgggaaagaaacttcagggtgtgacacgaaccccatgtaatcagttaacacactcgttcaatacaatttcggtgcatcaccacccttttgcttttgttttatttcgacgagtccttgctttcgggttgagctgcatcggtttcgatcttcaacaagaggtaaaacttgttatgatggcttgcgttctcgggattagtgcttccatctttatgatactctaatcatgtttatgtaattcatcgagttatcatatatcttacataatctctggcaatatcattatctaacctacaatcgactaacatctgtcagtagagggcagccgattaggttagattttgatgttgatttagattatataagatctccaccactctatgaaacttccagcggcttgattgtctagatattgttcttcttttcatacttaatgctgcatcacttgagtttgatctattaagtcgtgcttagaatatcagtctctagcctgccttctagttgccgattagggtagtattggagtttcagccgatcttatctggtttaactacatttgctctatatgcttcgttgacatgttaaatctgccctttatgtcaagatattattgcatctacgtatattaaactttggtttggtatattctgcttgttttaatatcttaacatagaactgtatcagagtattagccgatacatgctagatctatctgatcagctatgctgtaaacatatatagttcggttattaatatatatttcgatctaagtgatttatattgtctcggcatagcgaccgatctatcccaatcacttgatttaaatatatatcgatgtaaaaattatatattgttaatatctacagccgatcgaatagatttagtcctttattatctatttccagctgccgatcaaatcgactggtacgctagcatacccgaaggcgagttttggacctgcactggagttaaacagatctcccaggcctcgtgttttacgtcaacactcttttggcatgcccgatgggaccgataagaagtcagacaagcaattccttctcatggccgagaaaccaccgctatcaccatcttcggctagttcaggcactgtcaaggagaagatccagaagttaggtttgaccgacgtcaatgaagggaacgtcgtacccatcgatccagaaaaattcacacctgatcaaaagaaagattttgaagcgatgatgcaggcagcacgtgatcaattcttgaactcattcatgcagactcgcaaggggacacttgttcagaagtataaaataaaggtggttcttgacgatcccgagactggttcctctaaggatggagaaggaaaacaaactcaagatggctcggctcaactgaatgacaaaggtgctacagatggttttccaccaaatcaaggtgacaactctcaaggggtacatggggttcaaggtgatggttttagggggttcaaggtgatggttcacagggagttcaaggtggaggtgttaatcaagacgacaatgcaacgcagttgcagttcaacaacattcaagatcaggttgactatgctgtaagtcacgcccggaaattcactagtaatttccaaacttatttgtgcataaaatcctcgtccaggaatcagccgaggtacacaaactgacaatttaatatacaaatccatcttaataataatgttacacgcttacaaaagaaaagaaaatagcagcggaataacggtctagcgatggcttcagctccaatcccacaggcagctcaactggggtataagccaaacgtcttctccttctggatcctttttcttcaactgaggttgattgattattgcaagaatgagcatatgacatactcaacaagccacacagcaaatatgcaagtgcacaaggataccaaaggatggcataatataggctcatttgcaaaagcagcatttagcaaaacatttaagagaagtaaaacagtggagtaattaatcagaaattttaatcaacactgaatagcacacccatgctgcacaggcccaaccatcctgaacaaccatacccggctgtacagatctaactccaaaccaggagctaaacaaattattaccagatatagtatccataattattgtgagaggtgtgagactaatcacgaaaaacattgctcaacccgcccataaccgcgggcacggctattcgaatagttttactctggccagaggtgtaccactgtacccacaagacacagcctcaacatcatgtctaccatgcgtcgcgatactggaaagtgcccgaatagaggctgtgacaataccctctgcacaacacaactcaccacaatgcaccattcctggatcataatcacccccttataaaacaaggcatggcctccccagcgacccccgtgggcttatctccgccacttctcagtctggtgctccgcaatgaatcatattatacaaaaggtaaagccgttgcccacgctggcttgtggttggcacggttaatgtttcacaacagtagctcgcgaaccggtccttaattgccatgagcacgactctcaaaaccatgtgctcacaacccaccattatcaagttttagttggcaagtaattaattaaccaatcacgattgaccatcgtgaactatcattaagccatcattaaataatagtgagtcataagttatcccaatagtgtgctaatgtttctaagcatggctaagcaatcatatctaatatctagctgaaccaatatataaagctcaactagtcaagttataataacccaaggtatcaaggaataaagtaatcaatgcaaacaggccataacaaaggaatagattcacaccacccagtgacattcgaaaataaatgcacagttgaaataaatagagaatttaaatataggatcaacatgctcaaaggattgtgtttaggatctgtgtggcttgccttgcaataatcggtcttcaattaatcttcttgaatacctccagcacactcgcgaaccttcgcaacgacggaaacgacaagctaacacgcaaaacgaagaaaaagactaataaaaaccaaataaacagtaatataaagtaaacaaacatgtagatcatgattttagatgaattatgagacttgaacggcctcattctgacttcaaatgaatttattacgaattttacaagattaaatctaattaaagcccatttaaaaagaattaaataaatttaattctatttatggataattttaatatgtagatctttattttacacaacctttgcaacttgaaccacattaaactgagttacaaagaattagttatgaatttttaaagattaaatcggattaaaacatttatatagattttaattgaattatgacgcaataatgaattatttttgaaaaggaaaagaggattattgcgtcaacgggctcgggttcacggtggaccgggtgcacggcggcggctcacggaaacgaacggccgagatctaccctatccacaacgaacggccaagatctaaacggtctacgaccggtctatggcggacggcaacgatgacgtcagcgatgacgtcatcaccggcgacggctcgggcggcgcatgctcgccggcgaacgatggcgcgacgacgcaaacggaggacaccaacgggtagagggtgacgcggcgaactcaccggtgaccaaaacaacggcggaagagcaacagacggcgccggcgacgaggaagaagcggcgacggtcttcgggtcgacggtgacggcggcgctccggcggtcttcggcggcggcgaagcggtggacggggatggcgacgacctcgcgatcccgatggtggcgacggcgaccgacgacggcggctgcaacggcggcgcggcgcggctgaaccgatggcaacgacggcgacggctagggctacgcggaggcggtgctagacgcgacggcgggctaaggcaaaggtggcggcggatagaggagagctcgggggtgcttataaaggggctagcgagcggcgatggaggccctcggcgatcggcggcgagaaggaaagctagggttctgaggagagaagtcgatccaaatcgaactcgaatccttggatttccaaacgaaagtagccgacgattccataagagaaaaggaagcggagatcgagaagatcattttccctctattgatttcaccggatcgggaaaggatagaccggattggaaagcggcggcggcgcggctcggctagggttcggccgggcgacggctggaggaggaagacaagtccgacaggtgggacccacctatcagcgactgagagagaggaggaaggagcgcggcgggctgcggctcggctgcgggccgacttgggccggggaggagagagagagcggttttgggccggctttcggcccaaagccaaaagagacttttaaaaacctttttcaatttaaattattcatgaaatgatattccattgattaaaaatacttccttggctcaaataaatcctagaaaaatctaggaactatagaatcaagtaaagtatttaatgaaattttatctggccccattttatattggaatttattaattaaaattagatcttctcttttaggcttttaagatcatttctaataattccttttaaacaacaatttataatttaaggatttttaaacaagaaaagctcttaacaattataattagatcattaatgatcaaataattactgaactgttctttgtatcatttaggaattgagctccgaaaaatccgagaaaatttcagagagtatacttaatcatggagaatttaataaaaattaaatccatccatgctttatatttaggaaattttattttccacatttaacttcacttgtaaattaaagaacatttaatataaattctaataataatttattaaataatttataaatcctgaaacaaaaatcaggatgtgacactgtacaccatgctttgatcaatcaatctgagaaatatggtgaagtcaatgattgatggttcaatggccgagtatcaggttacaggaccagtttacctacaaggaggggtgttcccgaattatcggccgttaatcaccgataatctaccagtcgccagtcagtccctcttaatgcaccatcagctcagccgacgataccagcatcggctcccgcacctactgcaccaccttcagccccaggccaattaattaatccccgattgttggtgagagaacagccacagcacactggacagaatgtgaatcggctaacgcaagaccaggttgcatctatgttcttacgtcctcaacacaccattgatccagcccagcagcagccgattcagcagacactaccaaggcagcaggttgtgcaaccagttcagcaaacacctccaatccaacatgttgtgcaactagttcagccaaacacctccaatccaacaggttgtgcaaccagttcagcagacgccaccaagacgacaggtcttgcagctgattcagcagacactgttgaggcaacaggttgtccagccgattcagcagcaaggtccgatgaatgcatcggctgggtttgcaacacctggtggtcaacccatgcagcatgccgcaaatcaggttgtcccagaacacttggttcatcatgtgcagccagatggcacggttgttcctcaagttattcctgaacatttggtgtgcaatattcagccagaccttcaaaattaccaggggggcaacttgaattatcaatatcacccaccatcacctcatgttcagtaccagcaagcaggatcggctcagccccaatttgttcctcaatacaatcaatttgagcctatgccacaacaacttcaaggaacacctcaacagcggccatgggccgatttgattgtagatgtcatgaaggagcagttcgggcttaggccgaaagacgctggaaacctatatcgacagccatatcctgaatagtttgagagagttcctctgcctaaccgatttaaagtttcagatttttcaaagttctcagggcaagatagtacatcaacttatgagcacattagccgatttttagctcaatgcggtgaagcatcggctgtagatgccttgagggttcggttattccggttgtctttggctggatcggcctttacttggttttcttctttaccgtatggatcaattaatagttgggctaatttagaaaagcagtttcatagctatttctatagtgggattcatgagatgaaattgtctgatctaacatcgatcaagcaaaagcatgatgaaccagtgcatgagtatattcagagattcagggagatgggaaataagtgttacagcttgagtttgactgatgcccagttagccgatttggctttttagggtatgattgctctaattaaggagaagttctcatatgaagactttgaaagcttgtcacaccttacacagaaggtagccttgcatgaacaaaggtatgcagaggctaggaaaaattctagaaaggttaatcatgtttgcccttatatatatggatcggacgatgaggatgatgattatgagatagctgcagctgagtgggtaaggagtaaaaaggttataccatgccaatgggtaaagagctcaggaaaaaaggagaggtatgactttgatatcactaaggctgacaaaattttcgacttgctactccgagagaagcagattcaacttcctgccagtcacacaattccatcggctgaagaattaggtaagaaaaggtattgcaagtggcataattctgggtctcatatgactaatgattgcaaggtcttcaggcagcagatccaagcggctatcgaaggaggcaaaatcaagtttgatgactctaagaggccgatgaaggttgatggcaatccttttcctgttaatatggtgcatacagctggccgaacagccgatcggggtcgtgcaaggggttttcaggtgaattcggctaagattatcaacaaatatcagaggaagtatgacaagcagcaggagaagcatcatgaagaagacgacgatggctttgatcctcattgggttgtgagttctttagatgttgttggaatgaaggtatgaggttgcaatctattgaagactgtcctaggtgcggtgatattgccgagagctcaagccgatcatatagtaggggcaatcggctaaggcagacaagagttcctgttcatcaaagattgggtccagtgaatcaagatcgtggctaagaggacaatgaaaacaagaaaaatcaatggtgtccttctggtatctttacgaagaatcaaaagagaagggttcaaagattgaggaacagggagcgctttcaggaggtcgagcaggaaattaaccatttgctgaagaaaacgaagccgaggcgggtgtggcgtgttaagaatcaggttcctgtagccgatgaagccacagctgatgaagcaaaaaggttagctaaaggaaaaagcgtcgtaactgcttcggtcaacatggttttcactttgcctgccgagtttgggatcaagtaagccgatatcgatgaagttgaagaagaatcggctaaattgattttgtcgccagggcaggtagtttttgagaagccagaggggacagagaattgacatcttcagccattgtatataaatggttatgtcaatgggaagccgatgtccaagatgatggtcgacggtggggctacaatgaacttgatgccttacgctacattcagaaagttgggcagaaacgctgaagatctcatcaagacaaacatggtgcttaaagactttggcggcaatccatcagaaaccgaaggagttttgaacgtggaactgacagtcggcaacaaaaccatccccacaacattttttgtcattgatgggaagggttcttatagcttgttgtttggaagggatgggattcatgctaattgttgcattccttcaactatgcatcaatgcttgattcagtggcaaggcgacaagattgaaattgtgccagccgacaggtcagtcaatgttacacgtgccgatttagctctttgggagatggatggtcttgattgtttatctggaaaagtttgggatggagattttctaaaagtgtccgattctgatatacagccaattgaagatggagagcccaagctattattttgagggcgccgtggaggattcacatgtctacaacaaggacacggtagatgatctcgatgacaacaaaggtagggttttatgtcggctgatgatttggaaaaattgatataggtctaggtgaccgccaaggccgacgtttattagtaaaaatttatctgcagaatttagaaccaagttgatagagctgttaaaagaattcagagattgcttcgcttgggagtattatgatcaaatctttatggctgaagaagatattcataagacaactttcaggtgtcctggtgcaatcggcttgttcatatgggttgtgatgactttcggcttgaagagtgctggagctacatatcaaagagccatgaattacatataccatgatctaatcggctggttggttgaggtttacattgatgatgtggttattaagtctaaagaaatagaggaccacatagccgatttgaggaaggttttcgagagaaccagaaaatatggcctgaagatgaatccgacaaaatgtgcttttggcgtatcggctggccagtttttgggatttcttgttcacgagagggggatcgaggtgactcagaggagtgttaatgcgatcaagaagattcagcctccagagaacaagacagagctgcaagagatgatcggcaagataaattttgttagaagatttattactaatttatccggtaggttagagcctttcacaccattgttcaggttgaaagccgatcagcagtttacttggggggcagagcagcagaaagctttggataatattaaggaatatcttagttctcctcccgttttaattcctccatagaaaggaataccttttagattgtatctatctgccggtgagaagtcaatcggctcagtcttgattcaggagctatattgaaaggaatgagttgtattctatcttagtcgtcggctcttggatgctgaaactagatatttccctgtcgagaagttatgcttgtgcctatatttttcatgtacaagattgaggcattatctactatccaatgagtgtactgtcatatgcaaggctggtgttgtcaaatagatgttatcggctccaattttgaaaggaagggttggaaagtagatattctctttaactgagtttgatcttcggtatgagtcgccgaaggcaattaagggacaagctatagccgattttattgtggaacatcctgatgattcaatcggctcggtcgagattggccatggactttattctttgataggtcggtatgtactaatggttgtggcattggcttggttataatttcccctcgaggggcatgtttcgagtttgcttatactattaaaccttatgcgactaataatcaagctgagtatgaggcggtgctcaaagggttgtaattactcaaggtagttgaagccgatgctattgaaatcatgggggattctttgcttgtaatcagtcaattggcaggagaatatgaatgcaagaatgatacattaatggtttataatgagaagtgccaagaactgatgaaggaatttcggctggttactttaaagcatgtgtctcgagaacaaaatattgaacctaatgatttggcccagggggcatcgaggtataagccgatgatcaaagatgctaaggttgaaattgcagcaataacagccgatgattggaggtatgatgtgcatcaatatttacataatccatctcaatcggcttctaggaaattgagatataaggcgttgaagtacagtctattggatgatgagctttactatcggacgattgatggggtgttgcttaagtgtttgagtaccgatcaggctaaagttgcaatcggcgaagttcatgaaggaatttgtggtactcatcaatcggctcataagatgaagtggttacttcggcgtgcagggtatttttggctgacaatgctggaagattgtttcagatattacaaagggtgtcaagattgtcagaagtttggagcaattcagcgagtgccggcgtcggctatgaatcctattattaagccatggccattcaaaggttgaggaattgatatgatcgatatgataagtccaccatcgagtaaaggacataagtttatattggtggcgacccgattatttcaccaagtgggtagaggcgattcctttaaagaaagttgattctggggatgcaattcagtttgttcaagagcatataatctaccagttttgtattcctcaaactattacaaccgatcgaggcttaattttcgtgtccgatgagtttgttcagtttgctgatagcatgggtatcaaattgttgaattcttccccatattatgcacaagctaatgggcaagctgaggcatctagcaaaagcatgatcaagttgattaagaggaaaatttctgattatcctcggcattggcatactcgtttagccgaagcattgtggtcttatcggatggcttgtcatggatcgattcaagttcctccttataagcttgtttatgggcatgcggctgtattaccatgggaagttaaaatcggttcgagaagaatagaattgcaagatggtttgacagccgatgagtattataaccttatggccgatgagagggaggacttagttcagtcgcgtttgcgagcccttgcaaaagttaccaaagataaggaacgagttgctcgacactataacaagcaagtggtacccaagactttttcggaaggtgaacttgtatggaagttgattttgccgattggaactcgggataacaaattcggcaaatggtcaccgaattgggaacgaccgttccaaatctataaggttgtgtctaagggggcatatatgttgcaagggcttcatggcgaagtctatggacgagcgctcaatggtaagtacttgcagaaatattacccaagtgtttgggttaatgcatgatcggttagtgttgccgatacatgatagccgatgggtttgcatcgccttgggatgggcgatattgttatatcgcccttagttgtttttatgttgtaatcagttgaggtttgccgatttacaatggccgatattgttatatcgcccttagttgtttttatgttataatcgggcccttagttgtttttatgttgtaatcggttgaggtttgccgatttacaatggccgatattgttatatcgcccttagttgtttttatgttataatcgggcccttagttgtttttatgttgtaatcggttgaggtttgccgatttacaatggccgatattgttatatcgtccttagttgtttttatgttgtaatcggttgtggtttgccgatatacaatggcggatattgctatatcgccctaagttttaaactataattaaatcaatgcttttgacattgtaaaattaggggggcacatatatacaccagttacaaattttgacaatttttgagcaaatttggaagttatattaatcggcacaaaggattatcaagataaacatcagtagtatcttagccgattacaaaaatttctaaggtctattacacagaaagttaccgagacaaatagcgctggatagccgatatagctctttgcctaatttgttctacttcttcgatggcttgggcatcttgagcatcggttccagggatgacttttaaagacttggttagatcagcaacattttttatagccgattttagtcttgctttctgcttttcaacagattttgggagatcggctagctttttatgttccatgtccagattggcactgcattcttgaagttgtgccaggagctcaatctttcgagcttcaagccgatcaatattagacttgatcggaccttcagataactgatcaagcttggccttctcttcatgaacaagctgccgattggcctaaattgtggcctcgatgtctttgcgctcccgacgctcgactagtctcagcttggccttctccagcttgaattgatgctgctcgagatagacagctggagttaggacatcggctagctcatctgggatcagagcttgaatctcatgtagccgagtcctaattgagccac

SEQ ID NO: 5884 - DNA, 14707 bp, Oryza sativa
attcctgcagcccctactggagaaaccatctttaatgggttgtccaaaaaccataatagtctcggttgcttaaaaaaaccagggctaaaaaaatttttagtcgcagttaaaaagggtagcggtattttttctatctcctccctagcgcgtagatcaacaaaaatcaaacagagcaagcgtgtcgatcaattctcaaaaaaaataaagaacaaaaaaaatcagaggcgcccagctcccttatctgttctcctcctccactcctccccatccatctcttcttttcttcctctcctccttctcaactcctcctccagatgcacttctcatttagttttctccttcttctccttctccactcctcccctccccttatctttgacctagctggcaggcgggagggccgcggcggctgcgtcgggggcggccggcgccgggcgggaggccgcggccggcgccggttgggaggcggcggccgacggacaacatgtttttttttcttctcttctctgttctctgtgatgaatgctgacgatgttgtagatgtgaactttttttttctctgttgtctatgatgaatgcttgttgtcctggagatattgtagatgtgaataaatgcaaagaatattgatgctttgatgttgattttattcatttgatttgtgatgatttgggcttttttttattttattcattcgatctatgatgatttgggcgatatgcaaagagtaaaagaacaatgaaaaagaaaaaagaccaaccggataaaaggaaaagaaaaaaaattttttaatcctggttggtaacaccaccggtacagactgttgcacctcccaggatcagcctgatgccgcgcattccaaataaaaacgcaaaataaaagatcatcgggcgcaaccaataaaaaatcgccgcttcattgatttcaatataccaggtactaaatattttcacatatcaaagaacgttgtagttatgttagaactgaaaaaaaatatcggaagaatgggagcataaattaagtgggtcacgttgtatatggagtgtatggtccgatgaacgtgctttgctggatgatggtcttttatattgaatttttacggtataatttattggtagtataaacaatccaatgacgaattagtttcctaccctactgcataaatggttttttcagggcgagaccctctcctctcctttctcactctctcacctcttcttctcactcttctctcctctgcgcagctctcctatctcactctcctcttgcagccagcggtgggcggcgcggccggtagtgggcagcgtggcaagcggcaggcaaggggcactgctggtggcaggtggagggctcgaccggtggcatcaggcggctctgcctccgccggcctcgtgacgggcggcaggcggtgctatcaacggtgggcttccccgcgcatcgacggaggcttcgatagctgatctggcaactgcggcgaatgcaggcgccggcaacggaaaaggcggcaactccctcggcccttccacgcgcggatcgagcgacgggctcgagcgggaggccgggagcggctctcccctgcccttccccatgcggatccggcggtgggctcaagcgggagggtaaatttgtctttccatgttacacatgacgggcagttccgtaaaaacccattcttcactccggtcgaaaggaaaataatcgttagctgtttcgcgatgcccagagaaaagcaggaaagtagcttgtattataccgttttcctctccctgttttgcggttgcaatcttgtggatttatcaccacgtagtatgtacctatgccgaatgtcgatgatcaggaacaagattaattatgcatagctagattaaagtgtgtttaattagagaaaataatcgccaatttgtttattactagtatttattaatgtattagatcgtcgttattctttggttgcgatctatagtgggactaaaaattaaatagtcctgttgtaaccaccaaccgagactaaaaatccatttttagttcttcgggtttttttttaaggttgggtttaaaaaaccaccggggggggggaaaaccccttttaaaatttttttttaaaattggggggaaaaatttttttctcgccagactgatcaaatatggtttcttcactagttaataaagaacgtctgcacctggacatacgcactcgcgcactgtgcggagtgaggataaccggctcgatgaaacagagcaaagcaaatagataggggaaaatagaggaagtagagaagggcaaatctgtatatggtaactcaataaaattcagcagaccaagcatgatttcacgttatcaacaaaccatatatgatttctccaggaatttcacaacaaaaccatcgtgaccttctctataattatcattgatggtttttatgcacaaagcaatcatcaacgcaaattatacagaaggtcacatagatgtagtggtggatctagagtcctaacgtgtctatcgttatcatagcatgctaattatatttagaatatagtgttataatatatagacaagcaatttaaacatagcttttgtcgaatgtcatcgctgtcttctgacaccagtggtaacactgtagatccgcctgatagatggtaagcgctaacaaaatattatgttcatgttatcggatattatgataaaatagtaaccaaatttatcccataccttttagtaagttttaactctccaacaaagccatgatagtaatttcatcaaataacaattatcccttgtatatctaatctttatctttatttactacgtagtaaaaaatacatagtagtggtggtgagtcctggataatctaagggccgatattacccttaggatcctcgtgcagatcaaaaggctcagatacccctcatgctgtcccgcaccgcccccacctccgtatcacaccgtccgcccgcatcacaccgcctgcccttggacgcccccgttacctcctccttcatgccacttggcgctgcctccgtggcgcccccggtggctccttcgttgtgctgctgccacctcctccgccgcaatgctactccatcgcttcatagcccctctcctcctccagccctatgctccctgctccgtccggtgcaccgccacttcctatccccatcatgtattccaactttatatctccctactgctgtcatcctccaacttcatatctccctactgctgtcatcctccaggtaattgattctatattggtttggtttatcggatagtccgtggaagatcgagctgctgctaagtcaggatacatacatgtcacagcttaatttttgtttcaggatttataaattatttaataaattattaatagaatttatattaaatgttcattaatttataagtgaagttaaatgtgggaaataaaatttcctaaatataaagcatggatggatttaatttgtattaaattctccatgattaattatactctggaattttcttggatttttcagagctcaattattaattttaataatacaaagaatatttcagtaattattcacatattaaattaatcattaaatgagctggtttcaattttgttaaatactttgagtgttcaagtatattcaagatttttcttggaattacaattgaaagatcatttcagtgattaatttaattgggaaaagtaattaaaatccccttttcctttttgggccgaaacaggaaagttcacctttagtcctcggcccattcttctttctattcggccggccttatcccttccaatagtctagtttgcatccctgcttctatcgggctgtgcaatagaagcccagacaaaagtctgttttgcctccctgacactgttcatcttccagctcggacagagtccgagccagccatgcccgtgtcctgttgccgccgcctcctccttccaaaatccggcctcctcgttgctcctttttccaaattagttgagggaatggaatcctctcaatctcctctacaatttcccaagaaatcccaaaaagtttctatggaaatcctttccaatttcgcggatcaatctttccttttccggcgaagatccttaacattcccgcagtttttcccgtcgatatgggcttggacccgagctcccggtcctatataaaggaccccctagtcgtcctctacctatcccctcaaatcccgtcttccgccgtcgccggaaacgctctccccgcgctcgccttctctctccacctccggccgctgctccagccgccgtgcgccgtcgctgtggtcgtcgccttcggtcgccactgccgccattgggttcacgaggaggagaagaagatcgtcctccacttccccgaagccgaaatccacctgatgaggacataattagctcggatataaccatgactaccttatgtattaatcaaataaaggtgcatatgttctacattagatatatttgttatatatttgaacaaacgctgccacacaatgagtttcgtgtgtttttgtttgcagaggtacttgcttgggcgaaagaaaagagaccgagcgtaaggaatgcatggatgattgaagaagttgattggggaccaaaccaagaccttctgcaagtcttcttttttttttgaaggttttctttcatcttaacacgtcacttttggtccataaaagaaaagagataaagttctacacgttttgatttcggattcaggcctcctgacagcatcaactttaaatggacctagcctctgatctagaaggaattttgaggcctatgagtacttgttggaaagcttatgggtctactttcagatggttttgtccccatgtcaaaattcctaccgagctgccggaaatctgcaaaacaagccacatatctcatccagtccgaatctgatttgggttttgggccttgtaattgtgtcgtgggcttagcccaagggatgtgcgccatagggaaaccctaggacatccctaatcatattaattcagtagccgtcatcgtttagagttgggttttgcttagattatcctgtcaagaacagtttcgccgctagatcggtttgtggaaccccaaattcgagtgcttaattattcatatgcaatttggttacaatctatcttgttcttgcttgtgttctttaattcgcatgcagggattagccttctcggcgaggtaaaccgggtttcggcacttttgataaccagaggagacgtggtgctgcgattacggggctcagtagcgtgttcgttcagaagccggatcgagttgtgtcacgactccacccaaatctttgtttatcaataccaatcggaagatcgggacctaacatccctcatcaccaccggagctccatcagcgccgtcaacccgaagttcaccgtcgcgttttgatatccagcgaggccctgcagcacctcccattgtcgccaagttttgtcaccgcctcctttgggttcgcagctgcgaggtgaaggccgtccactcctccattgtcgctgctcatcgccggaaagtcgtcgctgccgtggaccagtacatcgccaccattcggatctcgtcaccgccatcttccgtcgctctccgtcatcacgtaagtgttggtaaggaccgtcgtctcgtgctctttctcccggtgtgctccctttttgccgctgctccgtagttcaccggtgatcgtcgctcccgtgtctgccgtccagtgatcccgcgtggttgtattatctttgccacgtcgttgcatctctgctgtcacttcaccgccacctagccacttcgttgtctctgctgtgccatgtctaactaaaccctagaatggattcaatctaatccgttggatctcagtcaactctcggttaagattaatctcagccatccaaaatcaatataaatccgttctctcttttcaatggcatattattcatttttaatatatgtcaactaccaaatataatctaattttttccagagattgttttaatcttttatctcagttataaatcatttgtatattgtttaattaatttggaatagtcttttctctaataggattaactggaattaaatcttgtaaaattcataactaattcatataaaatcggaatgaggtcgttctagtctcataattcatctacaatcatgatctacatgtttgtttactttatatgttctgtttatttggtttttattagtctttttcctcgttttgcatgttagcttgtcgttttcgtcgtttcgaaggttcgcgtgtgtgtcgtaagagttcaagaagataattgaagaccaattattgcaaggcaagccacacagatcctaatatacaattcctttgagcatgttgatcctatatttaaagtctctatttatttcaactgtgcatttattttcgaatgtcaccgggtggtgtgaacttattcctttgttatggccaatttgcgttcattactctattccttgataccttgtgttattataattttactagttgagctttgtatatttgttcagctagatgttagacataattgcttagccatgcttagaaacattagcacacaattgggataactaatgttttactattacttaatgatggatatttaattgtagctcacaatggttaatcgtgattggttaattaattaatatgccattaaaacttgataatggtgggttgtgagcacatggttttgatggttgtgctcatgacaattaaggactggttcacgagtttcggttgtgaaacattaaccgtgccaaccacaagccagcatgcgcaacgcctttaccttttgtatagcatggttcattgcggggcaccagattgagaagtggtggagataagcccacgggggtcgctggggagtccatgccttgtttataagggggtgattatgatccaggaacggtgtgctgtggtggattgtattatgcgaggggtactgtcacagctcctttccgaggtaccgtggtggtattgaggcgcatggtaacatgttgtggggctgtgtcttgtgggtacagtggtacacctctggctagagtaaaactattcgaatagccgtgcccgcggtcatgagcggctctaacaatgtctgtcgtgattagtctcacacttttcaccataataaataatgctataactggtaataatttgattagctcctggtttggaatgatacattcctggtttggagatagatctgtacagccgggtatggttgtttagtatggttgggtctgtgtagtatgggtgtgctgttcagtgttgattaatattgatgattaattactctactattttacaattctcgaatgtttgttaaatgctgcttttgtaaatgagccctatattatgccattctttggtatccttgtgcatttgcatatttgctgtgtggcttacggagtattccatgtactcaccttgcaataaacaatcaaacctcagttcaagaaaagttgcgaaggagaagacgtttggcttataccccaattgagctgcctgtgggagtgttgccggagcttcgctagaccgtaattccgctgctattttctcttttcttttgtaagtatgtaatgctgtattattgatgaatctgtatattaaattgtcagtttgtgtaccttgtctgattcctggacgaggatttgacacacaaattagttcagaaattactagtgaatttatgggcgtgacaagttagtatcagagccatctcaactgtaggataagccaaatggtcaaactttaaggactaattttcaaaaaacatgattttgtgaaaatgtttcctttcttccttctccagaattctttgcaaattgctttatcatcctttcctcttcctctttcagcttgagtagttctgaaactagttgttgaaacttgaagaagccaatgtggtctacttatcaagtggatcgaggaatatgaaggtgatgatcgatctgaagtgtccagttgtcaagaaggaatgaagtttggatcctaccttagaacttaaaccgccaaagtgactttgaagtatagttagtagggtagaacgcttttgtttgcttgtgtgtaggtatggttgcattctcatcattgaggaagttcattgatgagtgtgtaattgtactaggttgctcgtttaatcaacttgaacaatataatggtctacacacaccagatcagtgataacctagttaaggtctttatctttagtgtaacccctctccttctatcttctccaaatctgcaacgaatggtgaacactcatgctagtggaagtggaaacaataacaatgaagagaacccaacccttgctcaagttctggctcaacagactcagttaataaacatgatgatgcagcagatgcagaaccatctcaaccaagggaacaacaatgctccaccgccccagaacaagttagctgatttcctttgtgtgaagccgcctaccttttctagcactatcaacctagtggaagcaggtgattggctacacactattgagaagaagttggaattgctccagtgcacagatcaagagaaagttgtgttcgcttcacatcagttgcatggatatgcttcagaatggtgggatcacttccggatgaacagagcagaaggacaaccaatcacttgggaagagtttaccgaaggattgaagaagacacacatacctgcaggagttgttgctttgaagaagcgtgagttcaggacattgaagcaaaaggatcgtaccgtgactaagtttctttatgagttcaaccgtctagcacgttatgctccagaagatgtctgtactgacgaggaaaggcaggagaagatcttggaaggcctgaaggatgaactgtcagttacgttgatctctcatgactatgctgattttcatgagctggttgacaaagcaattcaactggaagataagaagaacaggatggacaaccgtaagagaagaatgactgttttccaggaggcacagggcagtagccagaggcagcatatcaagccatcccaagttggtgaatcaagtctaacatctcaagaacaatcgcaacagttgaacatcggtggtgagatcaattcagagactaatgcaagcaatgaagttaacatcaagcaagctactctatcggagccagttcagcaggatcagtctcaagaaaataacagtagtggaagggagcagcaagtatgtttcaactgttatgagccaggtcacttcgcaagaaagtgtccgaagccgaagcatcagcagccgcaaggtcaagtcaacaacattgtcgtcacaggagccaatgcagtgccagttgcgtcctcaagtgttacagctcagccaccagtttcaaagcagcagtagtcttctttaaagccttagaataattatcggagttatggaataagatagactgcagttgacctatgcccttttctttctagccgttccgaatctcgggacgagattctttgtaaggggggtagatttgtcacagcctgatttttgtttcaggatttataaattttttaataaatttttaatagaatttatattaaatgttcattaatttataagtgaagttaaatgtgggaaataaaatttcctaaatataaagcatggatggatttaatttgtattaaattctccatgattaattatactctggaattttcttggatgtttcagagctcaattattaattttaataatacaaagaatatttcagtaattattcacatattaaattaatcattaaatgagctggtttcaattttgttaaattctttgagtgttcaagtatgttcaagatttttcttggaattatttgagcattggaagtatttttaacaattgaaagatcatttcagtgattaatttaattgggaaaagttggcaatacaccgacgtataattgtattgacgtggatttccttacaaaaaccctaggtatacatatttaattataccctaaggttgatacaagtcctgattcgacacaatatagggccccatcatttggctttttcccaaataagccaaaacggcttattagggaataaaaaaatgaatttgtaggtaaaaattttatatatgtgttcttggtgacttaaaagccaatgcagaaaaaaaaactacgttgaaaatatctcaaaatcaatctcaaaattaattttaaaaatttaaaatttagctttttctttggctgattaggccatccgatgggagccataatatttcctaacaagaaaagaaataactaatcatgtctatttaagagatatactaaggaaaatataaagcagtattgtcgtagttttcaggattcctcattgaactcggcttaatctggataaatttccatctaccaatcagtttctttcattaaccaattccacaaaataatcgtaacaaattttggtgttaacaagaagtcaatgtgatttggaggatatatgaagatcttgtttcgtcgatcaccttaatggatggttcattccaccggtgctcatcgtctagttccatgaacaggcataatgacaatggtttcattgtctaatcagatctctttggttcccatttcttgattctccctttttgctaggaaccatttagttccaagaaaaactatcttagccaaagcaatgtactccctttgtcccgaattataagatctatatatttttttcacgatcttcaatgacttaagttaaccaataatttatttcatattgtatcatcaacaaatatacaattagcattacatggaagtattttataatacgaatgtaatgacataacatatataatacttggtgtagatattgttagtgtaattattaatcaaaagttatcgagtttgattttacttaaaaattaaggctccctataattcaggacagagggagtaagatgaagatgggctattatattgtattgcaaagttccaaaaaaaatctagtttattataacatgagtgatgtcagctatgaaacatgcgaaagtgaataaagccaaaatttaccgcagaagaaaataaaaatgccattttgtaacaacacaagcaagagagaaaaagaaaacctttcatgggtttgtggatcactggtttgcatgctagaaaataggcactgctgatgacaatgcaggaagttgatatctctggtacaggtcattgaactcatgaaaatttcagaacacataaaaaaactaaggggcaattgcttatttgaccctgttttgaactgtaactaccaatttaaccctgctttttaaaatgtgcttatttgaccctccttttaaaaaacgaagcactggtctgaccatattccgtttggatgagttaacggtgttaatttaggcgtaaatagtccattttacccatacttatttaacccagttgcttgtttgacctgcttcttatcctctctctctaatctctctctatctccctcgagcgctgcggcgacggtggcggcagttgcggcggaggaaagagcgacggcggcggcagctgcggagggccgacggctgcggaggagcagcggcgctgggagcgaaggggcggtggcggctcagcgacaccagcggtggtggtagaggggtgttgacgtaaaacacgaggcctgggagatctgctgaactccagtgcaggtccaaaactcgcgttcgggtatgctagcgtggcagttgatttgatcctgcaatcaacaagaaataaagacaaagaaaccgcagttaaacctataaatgatagctgatcggctagatgccgatgacatatcatttatctctgagccgatgtcatatgtaaatcaatcggcagttggaactagataataaaggactaaatctattcgatcggctatacatattaacaatatataattcttatatcgatatatatttaaatcaagtgattgggatagatcagtccctatgccgagacagtataaatcacttagatcgaaatatatattaataatagaactatatatgtttacagcaaatccgatcagatagatctagcatgtatcggctaatactccgatacagctctatgttaagatattaaaacaagcagaatataccaaaccgaagcttaatatacgtagatgcaataatatcttgacataaagagcagatttaacatgtcaacgaagcatatagagcaaatatagttaaaccagataagatcggctgaaactccgattctaccctaatcggcaaccagaaggcaggctagagactaatattctaagcacgacttaatagatcaaactcaactgatgcagcattaagtatgaaaagaagaacaatatgtagacaatcaagctgctggaagtttcatagagtggtggagatcttatataatctaaatcaacgtcaaaatctaacctaattggctgccctctattaacagatgttagccgattgtaggttagatagtgatattgccagagattatgtaagatatatcataactcgatgaattacataaacaagattagagtatcataaagatggaagcactaatcccgagaatgcaagccatcataacaagttttacctcttgttgaagatcgaaaccgatgcagctcaacccaaaagcaagaattcgtcgaaataaaacaaaagcaaaagggtggcgatgcgccgaaattgtattgaacgtgtgtgttaattgattacatggggttcggggtttatttatacacaaaaattacaaactatgtccatatcaaacatgactcgtatctctaacaaactctaagatacaataagtctttatggcagacttttgccctaaacatatctctaagaaaattacataaaatatcctaattaatagatacaattgccttctcaggactctatccaagtgcggcaaccatcttgaagcaccttaattcaacctgatatcgtatacgaagttgtattgtcagaatcggctatatcaacttactcagtccgattcggatccagccgatcctaatcgtagctgatttggactcctgccgattcttgctctgttctcgaatcgatctccgccttcgactccacttcaatctaatcctcttttccgatgctgatattaccaaatttggtcgttaacatatgccccccaagtctggaatatttggtaatgttccggatttgctgtatatcaactccgagcaagtttcgcactttgccgttttccgactgttacagttgtgctttaaatactaaccgtcaccctcgaaaaatttcacaccgtcctcctccgttttcaccgctaaaaccaactttgttctctctctctccagcgatctctccaacacacaaggcgatcccaggcgatttcatttccgatcagatctccgcctatggtgatgtcgtcttccgctagcccgtctaccgcgccatcggcagagtacgctgaggtaagttctcatcggatagatcccttttcctcgcatgaaatcgatttcctcttttctcatcgtgctttctgcttcccgattcctttggatttgcagcacctttccaacctagtcgcgattcccagccggtcgcacgaaaaccactattttcttggcccaatcggcaatattgaccccattgatttcatcattggtgaaaccaacagaatcccctttagactagtgtcacgaccggaaataacccaacgggcgttccttacgtgcgtgtattattccttgttccaggaggcaaggtacaccgaaagttgatacatttcagagtttatcaagcggaagcataaatagttacattattacatgggcggcgaaggcccagcacacaagaagacaaacgggaaacagcggaagacaagggcgacgaccacaggcgcttgactgcaggcacgagctaaacaccaaagccttcatcatcaaggggctccttttctgggtttggcaaaattgagcaagactgagtacaaccaccgtactcaacaagacacacccataagtgcagaataaatgcaagggagtacaagggggttataatataaagggttagggtttgcagtaaacagcattaaaagacacttagttgctcaaagctattttgtaaatacgatcctagagctatacaagattattaatcaaggccgtgaacccacacgaacctgccttaacccaaggcctacgatgattcagaccgaactggcaacccgaccctgggtcccagctcgtcccaagctaacccaggccaactatttccacatttcagttgttaagcaggttttaagaattaaaacactaacttgggtacattgctcggcttgcctataaccgagggcgcggctattcgaataggttatactctgatcagaggtgtacatctttacccacaagacacatcttcctcacgtgtaaccacgtgccacataccaccacggtatacggacggaagacgtgacatagtttccaacccatcctagccatagacaagagtaccgacccaaccccacctacggccggaacccctgggacaggtaggcaggactgagcccctatcagcaggacaccggccctatgccatgacatctcgactaccgggccgcagctcgtgtagccttcatttgtcctagagatgtccatcgacccccgacttcgtccatctccatccgtgtacttttgtttataaccagactgagccacaaactaagccttacccactagacatgtggaagtacggtagtgcttt

SEQ ID NO: 5885 - DNA, 16521 bp, Oryza sativa
tcaccctagaataaacaaaaccccaactagtggtcactctactcatggtaccactagtatgattttaggtagatgcttcgccgcttattaggtaacattaggtggttttacaactctagactttgggatattcatatcacctggacactatggaatggttggattattgtggaattggattcacacctccccctctattcaaaatcctcaaaatggttttaggttgggctcggggtgcatggttttgatagtagcacctcggccatataaggaccggtcttcgggcctctgttgcaaagcactaccgtacttccacatgtctagtgggtaaggcttagtttgtggctcagtctggttataaacaaaagtacacggatggagatggacaaagtcgggggtcaatggacatctctaggacaaatgaaggctacacgagctgcggcccggtagtcgagatgtcatggcacagggccggtgtcctgctgctaggggctcagtcctgcctacctgtcccgggggttccggccgtaggtggggttgggtcggtactcttgtctatggctaggatgggttggaaactatgtcacgtcttccgtccgtataccatggtggtatgtggcacgtggttacatgtgaggaagatctgtcttgtgggtaaagatgtacacctctgatcagagtataacctattcgaatagccgcgcccttggttatgggcaagccgagcaatgtatccaagttagtgttttaattttaaaacctgcttaacaactaaaatgtggaaatggttggcctgggttggcttgggacgagttgggacccagggtcgagttgccagttcggtctgaatcatcgtaggccttgggttaaggcaggttcgtgtgggttcacggccttgattaataatcttgtatagctctaggatcgtatttacaaaatagctttgagcaactaagtgtcttttaatgctgtttactgcaaaccctaaccctttatattataacccccttgtactcccttgcatttattctgcacttatgggtgtgtcttgttgagtacggtggttgtactcagtcttgctcaattttgccaaacccagaaaaggagccccttgatgatgaaggctttggtgtttagctcgtgcctgcagtcaagcgcctgtggtcgtcgcccttgtcttccgctgtttcccgtttgtcttcttgtgtgctgggccttcgccgcccatgtaataatgtaactatttatgcttccgcttgataaactctgaaatgtatcaactttcggtgtaccttgcctcctggaacaaggaataatacacgcacgtaaggaacgcccgttgggttatttccggtcgtgacactagtctaaaggggattctgttggtttcaccaatgatgaaatcaatggggtcaatattgccgattgggccaagaaaatagtggttttcgtgcgaccggctgggaatcgcgactaggttggaaaggtgctgcaaatccaaaggaatcgggaagcagaaagcacgatgagaaaagaggaaatcgatttcatgcgaggaaaagggatctatccgatgagaacttacctcagcgtactctgccgatggcgcggtagacgggctagcggaagacgacatcaccataggcggagatctgatcggaaatgaaatcgcctgggatcgccttgtgtgttggagagatcgctggagagagagagaacaaagttggttttagcggtgaaaacggaggaggacggtgtgaaatttttcgagggtgacggttagtatttaaagcacaactgtaacagtcggaaaacggcaaagtgcgaaacttgctcggagttgatatacagcaaatccggaacattaccaaatattccagacttggggggcatatgttaacgaccaaatttggtaatatcagcatcggaaaagaggattagattgaagtggagtcgaaggcggagatcgattcgagaacagagcaagaatcggcaggagtccaaatcagctacgattaggatcggctggatccgaatcggactgagtaagttgatatagccgattctgacaatacaacttcgtatacgatatcaggttgaattaaggtgcttcaagatggttgccgcacttggatagagtcctgagaaggcaattgtatctattaattaggatattttatgtaattttcttagagatatgtttagggcaaaagtctgccataaagacttattgtatcttagagtttgttagagatacgagtcatgtttgatatggacatagtttgtaatttttgtgtataaataaaccccgaaccccatgtaatcaattaacacacacgttcaatacaatttcggcgcatcgccacccttttgcttttgttttatttcgacgaattcttgcttttgggttgagctgcatcggtttcgatcttcaacaagaggtaaaacttgttatgatggcttgcattctcgggattagtgcttccatctttatgatactctaatcttgtttatgtaattcatcgagttatgatatatcttacataatctctggcaatatcactatctaacctacaatcggctaacatctgttaatagagggcagccaattaggttagattttgacgttgatttagattatataagatctccaccactctatgaaacttccagcagcttgattgtctacatattgttcttcttttcatacttaatgctgcatcagttgagtttgatctattaagtcgtgcttagaatattagtctctagcctgccttctggttgccgattagggtagaatcggagtttcagccgatcttatctggtttaactatatttgctctatatgcttcgttgacatgttaaatctgctctttatgtcaagatattattgcatctacgtatattaagcttcggtttggtatattctgcttgttttaatatcttaacatagagctgtatcggagtattagccgatacatgctagatctatctgatcggatttgctgtaaacatatatagttctattattaatatatatttcgatctaagtgatttatactgtctcggcatagggactgatctatcccaatcacttgatttaaatatatatcgatataagaattatatattgttaatatgtatagccgatcgaatagatttagtcctttattatctagttccaactgccgattgatttacatatgacatcggctcagagataaatgatatgtcatcggcatctagccgatcagctatcatttataggtttaactgcggtttctttgtctttatttcttgttgattgcaggatcaaatcaactgccacgctagcatacccgaacgcgagttttggacctgcactggagttcagcagatctcccaggcctcgtgttttacgtcaacacccctctaccaccaccgctggtgtcgctgagccgccaccgccccttcgctcccagcgccgctgctcctccgcagccgtcggccctccgcagctgccgccgccgtcgctctttcctccgccgcaactgccgccaccgtcgccgcagcgctcgagggagatagagagagattagagagagaggataagaagcaggtcaaacaagcaactgggttaaataagtatgggtaaaatggactatttacgcctaaattaacaccgttaactcatccaaacggaatatggtcagaccagtgcttcgttttttaaaaggagggtcaaataagcacattttaaaaagcagggttaaattggtagttacagttcaaaacagggtcaaataagcaattgccccttagtttttttatgtgttctgaaattttcatgagttcaatgacctgtaccagagatatcaacttcctgcattgtcatcagcagtgcctattttctagcatgcaaaccagtgatccacaaacccatgaaaggttttctttttctctcttgcttgtgttgttacaaaatggcatttttattttcttctgcggtaaattttggctttattcactttcgcatgtttcatagctgacatcactcatgttataataaactagattttttttggaactttgcaatacaatataatagcccatcttcatcttactccctctgtcctgaattatagggagccttaatttttaagtaaaatcaaactcgataacttttgattaataattacactaacaatatctacaccaagtattatatatgttatgtcattacattcgtattataaaatacttccatgtaatgctaattgtatatttgttgatgatacaatatgaaataaattattggttaacttaagtcattgaagatcgtgaaaaaaatatatagatcttataattcgggacaaagggagtacattgctttggctaagatagtttttcttggaactaaatggttcctagcaaaaagggagaatcaagaaatgggaaccaaagagatctgattagacaatgaaaccattgtcattatgcctgttcatggaactagacgatgagcaccggtggaatgaaccatccattaaggtgatcgacgaaacaagatcttcatatatcctccaaatcacattgacttcttgttaacaccaaaatttgttacgattattttgtggaattggttaatgaaagaaactgattggtagatggaaatttatccagattaagccgagttcaatgaggaatcctgaaaactacgacaatactgctttatattttccttagtatatctcttaaatagacatgattagttatttcttttcttgttaggaaatattatggctcccatcggatggcctaatcagccaaagaaaaagctaaattttaaatttttaaaattaattttgagattgattttgagatattttcaacgtagtttttttttctgcattggcttttaagtcaccaagaacacatatataaaatttttacctacaaattcatttttttattccctaataagccgttttggcttatttgggaaaaagccaaatgatggggccctatattgtgtcgaatcaggacttgtatcaaccttagggtataattaaatatgtatacctagggtttttgtaaggaaatccacgtcaatacaattatacgtcggtgtattgccaacttttcccaattaaattaatcactgaaatgatctttcaattgttaaaaatacttccaatgctcaaataattccaagaaaaatcttgaacatacttgaacactcaaagaatttaacaaaattgaaaccagctcatttaatgattaatttaatatgtgaataattactgaaatattctttgtattattaaaattaataattgagctctgaaacatccaagaaaattccagagtataattaatcatggagaatttaatacaaattaaatccatccatgctttatatttaggaaattttatttcccacatttaacttcacttataaattaatgaacatttaatataaattctattaaaaatttattaaaaaatttataaatcctgaaacaaaaatcaggctgtgacaaatctaccccccttacaaagaatctcgtcccgagattcggaacggctagaaagaaaagggcataggtcaactgcagtctatcttattccataactccgataattattctaaggctttaaagaagactactgctgctttgaaactggtggctgagctgtaacacttgaggacgcaactggcactgcattggctcctgtgacgacaatgttgttgacttgaccttgcggctgctgatgcttcggcttcggacactttcttgcgaagtgacctggctcataacagttgaaacatacttgctgctcccttccactactgttattttcttgagactgatcctgctgaactggctccgatagagtagcttgcttgatgttaacttcattgcttgcattagtctctgaattgatctcaccaccgatgttcaactgttgcgattgttcttgagatgttagacttgattcaccaacttgggatggcttgatatgctgcctctggctactgccctgtgcctcctggaaaacagtcattcttctcttacggttgtccatcctgttcttcttatcttccagttgaattgctttgtcaaccagctcatgaaaatcagcatagtcatgagagatcaacgtaactgacagttcatccttcaggccttccaagatcttctcctgcctttcctcgtcagtacagacatcttctggagcataacgtgctagacggttgaactcataaagaaacttagtcacggtacgatccttttgcttcaatgtcctgaactcacgcttcttcaaagcaacaactcctgcaggtatgtgtgtcttcttcaatccttcggtaaactcttcccaagtgattggttgtccttctgctctgttcatccggaagtgatcccaccattctgaagcatatccatgcaactgatgtgaagcgaacacaactttctcttgatctgtgcactggagcaattccaacttcttctcaatagtgtgtagccaatcacctgcttccactaggttgatagtgctagaaaaggtaggcggcttcacacaaaggaaatcagctaacttgttctggggcggtggagcattgttgttcccttggttgagatggttctgcatctgctgcatcatcatgtttattaactgagtctgttgagccagaacttgagcaagggttgggttctcttcattgttattgtttccacttccactagcatgagtgttcaccattcgttgcagatttggagaagatagaaggagaggggttacactaaagataaagaccttaactaggttatcactgatctggtgtgtgtagaccattatattgttcaagttgattaaacgagcaacctagtacaattacacactcatcaatgaacttcctcaatgatgagaatgcaaccatacctacacacaagcaaacaaaagcgttctaccctactaactatacttcaaagtcactttggcggtttaagttctaaggtaggatccaaacttcattccttcttgacaactggacacttcagatcgatcatcaccttcatattcctcgatccacttgataagtagaccacattggcttcttcaagtttcaacaactagtttcagaactactcaagctgaaagaggaagaggaaaggatgataaagcaatttgcaaagaattctggagaaggaagaaaggaaacattttcacaaaatcatgttttttgaaaattagtccttaaagtttgaccatttggcttatcctacagttgagatggctctgatactaacttgtcacgcccataaattcactagtaatttctgaactaatttgtgtgtcaaatcctcgtccaggaatcagacaaggtacacaaactgacaatttaatatacagattcatcaataatacagcattacatacttacaaaagaaaagagaaaatagcagcggaattacggtctagcgaagctccggcaacactcccacaggcagctcaattggggtataagccaaacgtcttctccttcgcaacttttcttgaactgaggtttgattgtttattgcaaggtgagtacatggaatactccgtaagccacacagcaaatatgcaaatgcacaaggataccaaagaatggcataatatagggctcatttacaaaagcagcatttaacaaacattcgagaattgtaaaatagtagagtaattaatcatcaatattaatcaacactgaacagcacacccatactacacagacccaaccatactaaacaaccatacccggctgtacagatctatctccaaaccaggaatgtatcattccaaaccaggagctaatcaaatattaccagttatagcattatttattatggtgaaaagtgtgagactaatcacgacagacattgttagagccgctcatgaccgcgggcacggctattcgaatagttttactctagccagaggtgtaccactgtacccacaagacacagccccacaacatgttaccatgcgcctcaataccaccacggtacctcggaaaggagctgtgacagtacccctcgcataatacaatccaccacagcacaccgttcctggatcataatcacccccttataaacaaggcatggactccccagcgacccccgtgggcttatctccaccacttctcaatctggtgccccgcaatgaaccatgctatacaaaaggtaaaggcgttgcgcatgctggcttgtggttggcacggttaatgtttcacaaccgaaactcgtgaaccagtccttaattgtcatgagcacaaccatcaaaaccatgtgctcacaacccaccattatcaagttttaatggcatattaattaattaaccaatcacgattaaccattgtgagctacaattaaatatccatcattaagtaatagtaaaacattagttatcccaattgtgtgctaatgtttctaagcatggctaagcaattatgtctaacatctagctgaacaaatatacaaagctcaactagtaaaattataataacacaaggtatcaaggaatagagtaatgaacgcaaattggccataacaaaggaataagttcacaccacccggtgacattcgaaaataaatgcacagttgaaataaatagagactttaaatataggatcaacatgctcaaaggaattgtatattaggatctgtgtggcttgccttgcaataattggtcttcaattatcttcttgaactcttacgacacacacgcgaaccttcgaaacgacgaaaacgacaagctaacatgcaaaacgaggaaaaagactaataaaaaccaaataaacagaacatataaagtaaacaaacatgtagatcatgattgtagatgaattatgagactagaacgacctcattccgattttatatgaattagttatgaattttacaagatttaattccagttaatcctattagagaaaagactattccaaattaattaaacaatatacaaatgatttataactgagataaaagattaaaacaatctctggaaaaaattagattatatttggtagttgacatatattaaaaatgaataatatgccattgaaaagagagaacggatttatattgattttggatggctgagattaatcttaaccgagagttgactgagatccaacggattagattgaatccattctagggtttagttagacatggcacagcagagacaacgaagtggctaggtggcggtgaagtgacagcagagatgcaacgacgtggcaaagataatacaaccacgcgggatcactggacggcagacacgggagcgacgatcaccggtgaactacggagcagcggcaaaaagggagcacaccgggagaaagagcacgagacgacggtccttaccaacacttacgtgatgacggagagcgacggaagatggcggtgacgagatccgaatggtggcgatgtactggtccacggcagcgacgactttccggcgatgagcagcgacaatggaggagtggacggccttcacctcgcagctgcgaacccaaaggaggcggtgacaaaacttggcgacaatgggaggtgctgcagggcctcgctggatatcaaaacgcgacggtgaacttcgggttgacggcgctgatggagctccggtggtgatgagggatgttaggtcccgatcttccgattggtattgataaacaaagatttgggtggagtcgtgacacaactcgatccggcttctgaacgaacacgctactgagccccgtaatcgcagcaccacgtctcctctggttatcaaaagtgccgaaacccggtttacctcgccgagaaggctaatccctgcatgcgaattaaagaacacaagcaagaacaagatagattgtaaccaaattgcatatgaataattaagcactcgaatttggggttccacaaaccgatctagcggcgaaactgttcttgacaggataatctaagcaaaacccaactctaaacgatgacggctactgaattaatatgattagggatgtcctagggtttccctatggcgcacatcccttgggctaagcccacgacacaattacaaggcccaaaacccaaatcagattcggactggatgagatatgtggcttgttttgcagatttccggcagctcggtaggaattttgacatggggacaaaaccatctgaaagtagacccataagctttccaacaagtactcataggcctcaaaattccttctagatcagaggctaggtccatttaaagttgatgctgtcaggaggcctgaatccgaaatcaaaacgtgtagaactttatctcttttcttttatggaccaaaagtgacgtgttaagatgaaagaaaaccttcaaaaaaaaaagaagacttgcagaaggtcttggtttggtccccaatcaacttcttcaatcatccatgcattccttacgctcggtctcttttctttcgcccaagcaagtacctctgcaaacaaaaacacacgaaactcattgtgtggcagcgtttgttcaaatatataacaaatatatctaatgtagaacatatgcacctttatttgattaatacataaggtagtcatggttatatccgagctaattatgtcctcatcaggtggatttcggcttcggggaagtggaggacgatcttcttctcctcctcgtgaacccaatggcggcagtggcgaccgaaggcgacgaccacagcgacggcgcacggcggctggagcagcggccggaggtggagagagaaggcgagcgcggggagagcgtttccggcgacggcggaagacgggatttgaggggataggtagaggacgactagggggtcctttatataggaccgggagctcgggtccaagcccatatcgacgggaaaaactgcgggaatgttaaggatcttcgccggaaaaggaaagattgatccgcgaaattggaaaggatttccatagaaactttttgggatttcttgggaaattgtagaggagattgagaggattccattccctcaactaatttggaaaaaggagcaacgaggaggccggattttggaaggaggaggcggcggcaacaggacacgggcatggctggctcggactctgtccgagctggaagatgaacagtgtcagggaggcaaaacagacttttgtctgggcttctattgcacagcccgatagaagcagggatgcaaactagactattggaagggataaggccggccgaatagaaagaagaatgggccgaggactaaaggtgaactttcctgtttcggcccaaaaaggaaaaggggattttaattacttttcccaattaaattaatcactgaaatgatctttcaattgtaattccaagaaaaatcttgaatatacttgaacactcaaagtatttaacaaaattgaaaccagctcatttaatgattaatttaatatgtgaataattactgaaatattctttgtattattaaaattaataattgagctctgaaaaatccaagaaaattccagagtataattaatcatggagaatttaatacaaattaaatccatccatgctttatatttaggaaattttatttcccacatttaacttcacttataaattaatgaacatttaatataaattctattaataatttattaaataatttataaatcctgaaacaaaaattaagctgtgacatgtatgtatcctgacttagcagcagctcgatcttccacggactatccgataaaccaaaccaatatagaatcaattacctggaggatgacagcagtagggagatatgaagttggaggatgacagcagtagggagatataaagttggaatacatgatggggataggaagtggcggtgcaccggacggagcagggagcatagggctggaggaggagaggggctatgaagcgatggagtagcattgcggcggaggaggtggcagcagcacaacgaaggagccaccgggggcgccacggaggcagcgccaagtggcatgaaggaggaggtaacgggggcgtccaagggcaggcggtgtgatgcgggcggacggtgtgatacggaggtgggggcggtgcgggacagcatgaggggtatctgagccttttgatctgcacgaggatcctaagggtaatatcggcccttagattatccaggactcaccaccactactatgtattttttactacgtagtaaataaagataaagattagatatacaagggataattgttatttgatgaaattactatcatggctttgttggagagttaaaacttactaaaaggtatgggataaatttggttactattttatcataatatccgaaacatgaacataatattttgttagcgcttaccatctatcaggcggatctacagtgttaccactggtgtcagaagacagcgatgacattcgacaaaagctatgtttaaattgcttgtctatatattataacactatattctaaatataattagcatgctatgataacgatagacacgttaggactctagatccaccactacatctatgtgaccttctgtataatttgcgttgatgattgctttgtgcataaaaaccatcaatgataattatagagaaggtcacgatggttttgttgtgaaattcctggagaaatcatatatggtttgttgataacgtgaaatcatgcttggtctgctgaattttattgagttaccatatacagatttgcccttctctacttcctctattttcccctatctatttgctttgctctgtttcatcgagccggttatcctcactccgcacagtgcgcgagtgcgtatgtccaggtgcagacgttctttattaactagtgaagaaaccatatttgatcagtctggcgaaaatcataatagtcccggttacactaaaaaccgagactaaaaatggatttttagtctcggttggtggttacaacaggactatttaatttttagtcccactatagatcgcaaccaaagaataacgacgatctaatacattaataaatactagtaataaacaaattggcgattattttctctaattaaacacactttaatctagctatgcataattaatcttgttcctgatcatcgacattcggcataggtacatactacgtggtgataaatccacaagattgcaaccgcaaaacagggagaggaaaacggtataatacaagctactttcctgcttttctctgggcatcgcgaaacagctaacgattattttcctttcgaccggagtgaagaatgggtttttacggaactgcccgtcatgtgtaacatggaaagacaaatttaccctcccgcttgagcccaccgccggatccgcatggggaagggcaggggagagccgctcccggcctcccgctcgagcccgtcgctcgatccgcgcgtggaagggccgagggagttgccgccttttccgttgccggcgcctgcattcgccgcagttgccagatcagctatcgaagcctccgtcgatgcgcggggaagcccaccgttgatagcaccgcctgccgcccgtcacgaggccggcggaggcagagccgcctgatgccaccggtcgagccctccacctgccaccagcagtgccccttgcctgccgcttgccacgctgcccactaccggccgcgccgcccaccgctggctgcaagaggagagtgagataggagagctgcgcagaggagagaagagtgagaagaagaggtgagagagtgagaaaggaaaggagagggtctcgccctgaaaaaaccatttatgcagtagggtaggaaactaattcgtcattggattgtttatactaccaataaattataccgtaaaaattcaatataaaagaccatcatccagcaaagcacgttcatcggaccatacactccatatacaacgtgacccacttaatttatgctcccattcttccgatattttttttcagttctaacataactacaacgttctttgatatgtgaaaatatttagtacctggtatattgaaatcaatgaagcggcgattttttattggttgcgcccgatgatcttttattttgcgtttttatttggaatgcgcggcatcaggctgatcctgggaggtgcaacagtctgtaccggtggtgttaccaaccaggattaaaaaattttttttcttttccttttatccggttggtcttttttctttttcattgttcttttactctttgcatatcgcccaaatcatcatagatcgaatgaataaaataaaaaaaagcccaaatcatcacaaatcaaatgaataaaatcaacatcaaagcatcaatattctttgcatttattcacatctacaatatctccaggacaacaagcattcatcatagacaacagagaaaaaaaaagttcacatctacaacatcgtcagcattcatcacagagaacagagaagagaagaaaaaaaaacatgttgtccgtcggccgccgcctcccaaccggcgccggccgcggcctcccgcccggcgccggccgcccccgacgcagccgccgcggccctcccgcctgccagctaggtcaaagataaggggaggggaggagtggagaaggagaagaaggagaaaactaaatgagaagtgcatctggaggaggagttgagaaggaggagaggaagaaaagaagagatggatggggaggagtggaggaggagaacagataagggagctgggcgcctctgattttttttgttctttattttttttgagaattgatcgacacgcttgctctgtttgatttttgttgatctacgcgctagggaggagatagaaaaaataccgctaccctttttaactgcgactaaaaatttttttagccctggtttttttaagcaaccgagactattatggtttttggacaacccattaaagatggtttctccagtagtgattattcatttttgtttgatgcaaatcaacactaaaggaaaattccatatcataatcatcataacacaaccattaatgtgtgtctactaaaccaaaacaccggatacaagtctagctgactcaacaggtgccaggctttttccaaattgacgaaagcttcaaatataatatgaccaaataatagaattttcacagtagttgagggatttattattctagctcggattttcttcaaataaaatataaccaaaaaaaaatgatgccacatcataaatagtgaaccgtgggtcggacctaggtataaaacttgagtttctttttgtgagtcgagggacaaataacatatagttttgtaattggatcactaagtggactaacgacgccatagtctatagttccatttttcatgtttttaggtgtgtttttaggaaaggtgccgtgaggacccagctttcataataagccacttctttcttatgtgtttcaattctcttgaaataagattgatagaaccgtaactctagaaggtgagctccgtccgcatcgctcccacctcaggggcgactaggatgcgaaacaaccaccaccgcctttgcctcaccaccgtccgagtcgccatcggaaaattcagatggtgaggtagaggaggaggcgacagtgctagggaagcgaccaatgatggatagtgggaggcaggtcgtgccttgggaggaaccaccaaatcttgtgctcatttggccagttctggcaccccggcgactggatctggcctcttatgtaatttatacaagtgggtattcatttaaattggttataaaagtatagaggtatcttgatatacagtagtatcgctatcgctactatttacataaaacaataaaaatgataatatagtttcgaccatttaatttcatccctaggagagaaacacctagagtcgtgatgcacgggattggaagaaacgatcaaatgtacacagatagatgcacaattgcgtgacagtccattgtattcacacgtggtccactgtattcacacgtggaccactgtattcacactttttgatcgataagcagcactagcaaccaaattggatgccgcatggcgccacgttagttgtgagatgcatgcatgcatgggattgaaaacgatcaaattaatatgtacagtactgatacatgcagcatgtactctttccgagtgattaattcacacattaatttgtctcatcgatcagcagctctagccacatgttttctattaagaatccatgcatatatccatctataaatatacctcatgcatgccagcttcttctactactcgcagcgcatcactcacagctacatccacaagtactaaaccaatctctgccagcagtagctctcagctatggctgatcccagcaagctgcaaatcacaccctgtggcatgcttgttcagggcaaccagatcaacttcaccaaactctacctgcaccacacgccggctggtccagaacaaaaccagtcggcggtcacaagcaatgacaaaaaaaccgggttgggttgcattgtcgttaacaactggtcagtatatgacggaatcggcagcgacgc

SEQ ID NO: 5886 - DNA, 32154 bp, Oryza sativa
  unsure (1)..(32154): unsure at all n locations
tatcgtgttgcttagtttgtttagagatgcgtgttttttgcttttaatatccccgcaccccgtaacgccaaaaacattttcggtaattagcttagaggggtatctaagtccattaagaagttgattctaatcggagctagtgctgtatgtaggtccaaaaacattttcggtaattagcttagaggggtatctaggtccattaagaagatgattctaattagagctagtgctgtatgttggtcaatttggcgttgtcacaatgataaagtttttaatggtaaacaattatctaaccctatgtaggttatcttcatgtcttcctactggctccacttttggtctacaatgctaccacaggaggagcaggatactatgcgcaatggtgctacactcttggaatcggtagccaagggtctcttattccactatgggtggcgttgttccataagaattgctagctaaaatattttatatggttgaacgctagtcaataataaaggggagttggggatttgtcccatcaccttatttctcattttgatttacttttatcttacctttttattactattaaacttatggctgtgtgtcttatgacagaagccggagatataatccatttccattatctaaaaaattcatccacttcatcgatcctgcaatgttgtaggtgggtcattactctctcatccctgtcatgctgatcaattatctcttgtctcactgtctcagctatatatatgaacccctcccgatcattattcacttcccttaaattggcacaaaaaaaaagacacaggggttggagaacacaaaagtcttgagacgctattttttttaatcgcaatcttttgctgatcatccccataggacagcataaactattcctgctttggaatgggtggcatcaggaattcagaatcttgccattgcctggtgaatcctgcaagagggagcttcaagtaacctgccacgttgagtgtcctctggaatacacatggcgacaacaaggagcccgtgtcgccataggcgatggtccgccatgtcctctcgagtgacgtcgtgtacactccgtttcttgctgatgcagctgctggttcaccatgaggccgcaggctcgcctgcaaccagatcagattagtactcctaccccgttctttctttgtgttaattaccaggaggagatatttcttttatgggtggattgggctcaatcggagattataatgcgacaagcaaccccacctgaacaacaaagtttttcagcccaacttataacttttcagccctgtaatttacactgattttcgttccaaaacttgtgttccaagaaggtcctgagggttgttttgtttccaagatattagttactatatttgttaaattctgtagtaagtacttcaggatagaaataactgctagattaaccaacattgcaggtatctgcatggaagtacaatgtgcgggactgaacaatctagggtttaattgaccctatcctatcaattaaacctaaggttttggtttaccagcccagatggtctgccatgtgagctgcctgtcatttcgttcagcctttccgtctcacaagcaatccctcatctccattaattcattgatccattaaacttaaaggttttggtataccagtccggatgatctcccacggagatcgcccagtccagacattgctacgttcgcattgtagaaactacatgtggagattacgggtttcatatatccacacagacggcttattcgactgcgagcgcttaagccgtctgcacgtgctaatagaaaatcgcaaaaaaaaaattccagaaatcaaaaccctagccacagaacagtaacctagaaaccgtcgccacaaccaccatgtcgtcgcccctcccaccgccactactgccgtcatcacccctcccgtcgtcggcggatccatgtgcgggagggggagggggttccccgattttgtcagcggctgatccgccctccccgcggtcgccgacgatgaatccgtctgtcctgcggtctccggcgacagatcggccctccctgcggttgccggcgacggagccacccgtcccacaatcgctgtcgacagatccgcgcaccgttgtcgctctcgtggatgggaccggccgaatccgcgtgctgtcaccacccgcccctgaggctgcctccgccgcctgccaaagagaccttcgtctctgcatgccgccagagcccgcctgcgaggccgtcatctccgccttagccaccggtggtggagaagagaacgaggagaggaaaggaaaagatatgaggtggagtgggaaaggaagggtgagaggagatgtggagtgagagttgaacgggaagagagaaaataaaaaggagtgaaatgtgtggtagagacgaggaggagaaaaagggatgcggggacacgtgtggcccacttatctccgagttgcccgcatgcgaaaatgattttcacatgtggttctttgataggcccgtctaaaaaatatccccatttttgcatacggctccttaagatgtttgtatgtgaaaatagtcttttccatgtaggccacttaacgagttgtgtgtaaaaataaaaataaaggtcgatttttccagacgtggacacttatgacccgtttacaatatattagggtgctcttataggaaaatcatttgtgtagtagtgtatgtaactatataaggaaatccatgttatgtccgattgggtttccctttgtaactttgcccccaacctatataaggagagcacgaagccctccaaggacataacataattaggtcatcagattaatatacatccggtggatacaatagccaaacaggagtagggtattgccattaatcaagacggtttgaacctatctaaatccttattttttttatccatttaattttaagtctcgtgcgttaccacttttattattgctgattttcagaatcgacttaccgttctctaaaccgctagatttgtgataatttgtgcctgcccatatccatgtgccaatgagcgtcctgtttgatgtacggttggtctggctagacatcgctcactgtgctctggaaacatcgtaggtgcctgtgacctgcctatgatttcgttcttccatctcacacgcaatcccgcgtctccattcattcatctttcgatcgcgcctctacacctgaccttttacggatttccgtcttcgtctgtgctcctccaccggcgtctacctgcgttattcttgcttctcgattatgtagctaggctctagaaccttattgtcaagctatcctgaaccttattgtcatgccatcatgccggccgtttgaatataccagcacatggcagggtcctcatccttgcaatttctagataagtatagacattcatgatgtgactttgcagtagtagcagcaaagtcacatcagcgttcagtagctattcctgcggcagtgcttgtgttgtgcagctgcagaacatgccagctgaacaatagaagagtagcaatgtatagtagtactactagtttcaagggttatcctcctataaaagcagaagatctctgttgttgtctacttctgcacaccggctgccgtagcagcggaccccccctcccctcgaagggggcgactacgactggcgcatcactctcctccaatgccacgccctcgtccctcatacttcttaggtagcaagacaatcaatatttcatgcaaaattaaaacatgtcgtcttcaccttcactattggcatgggacatgataatgacccatcaatgtgatattcaagcataaattggattgggatatctcttcattcattaaactgcagatcaaaatattttgagtaaattgtgctttgcacaaggtagagtatcctggtttactttgcaccggatcaggatatactttcactctacatttgggtatcttgaaataattatcactctgtaaagaggttcaccatataattgaagggaaattttagaaatcaagattgaatctcctggaactttctgaccttcgacttgtttcatgaaatttcattcagattttatgagaaatttctatatgctaaacttgatacaaagtgaaacatggtgagcttcatccaaggcaaagttcaatttaaatcaattcacttcaactggcagtatatatgttcaaaatttctctccgtttttttgttctggcagtgcttgatattatctttgttagatataatttaaaattttccattacaatatgaaacaaactaatggttcttttcatattttggttagaaaaatacaatatgttcagagaaattaaaataaaaggaatcaaggaagcaaaatatctacaaattgaaatcaggtaaggaaaagccagagaatgggactgatgaactccaagatttgttgctatgaagttccaggttcaggatcgtaacgtccactaattgcaattactccagaaaacagggaaactaaggtagggatgcatctacaatcgccacaataaatctacaatattatgcgattgtggccaaattcggcattgtcacccctaatgacaaaaggtggtcagttctttgcccaactttcctaactcacctccatcattttccgtgcgcattcttttcaaactgctacatggtatatttttttgcaaaaagtttctataggaaagatgctttaaaaaatcatattaatccatttttaaaaaatagtaaatacttaattaatcataagaaaatgcgttactccattttccgtgcggagaaatgagttcccaactcgacataacgatctagcaaagtagtactctctccatttttcaatatatgacgccgttaacattttaagatacgtttgaccattcatcttattaaaaaaataatataattattatttattttattgtgacttaatttattgtcaaatgttctttaagcctgacttaattttttttatattcactcaaaaattttgaataagatgaatgatcaaacatttgtcaaaaaaaaaagtcaataacgtaatatattaaaatacagtggtagtagttgctaaaagttacacattttcgtgcaatctgattacaacattatatgacccaaagcaaacaacatgttaatgactacctagctatatataggatcaagacccataattatttttcagtgaaaagcatgttgacatattcttattatccactaagccttaatcaaagttgtttacttattgtaggttgatagttctaagtgcattgacgccatattggcatacatgcaaagttgtttacttatgcacatgaacaattagaatatttatgcattgaagcttaaatatatctacctacaaccacattatttcttttagaaaagttataacttgaagttacaacaaatatgtgggtttcacaacaactattttataagtnttcttatgattggcgtgaaaagggggaggaatatgtgtattttgcaaattaatttcagaatatttgcaataaagaagcagaagaaattgtagatatgtggcaggcaaattggtgtgttataggtcaaatgctagaagcaaaaatagcacaaactattagcgaatcttatttgggataattatgaattattgtcacacaacgaagtgtgttatttattggccattgaaaattgcatattcatcgaggaagtatgaaattgcatatagctatttgaaagctattggtttacttgtagtaaacaatatcctaaataattaatgaccctttggattcgaatgattctgaatgatcaaatgacaccacatttactttggcgtaatgaataaaagttagacatgtcacccaattaatttattggcatattcaagaagaataaatattctcgtagaataatgtttgggtgatttgaaaagttccatgatggttaaactatgttcatagattaatgttttagtgttatagttatgttcttgaagacatcatgaagttatataatactaacacatccatcttatgatcatatctatgttgcatgaatataaacatgaagtgtattgatccaacttaattagagaattgaatatagtatgagtaattggatcaagtcttgggcaaataagaaaaaagctagaaaatagaggaattttgtcgactagtggatatttgtttgggcttcattgtcgcagaataataaccctctatgacttgggataacctacaatattagggatgtgcaatttttcatgccattgcattaatttttatgttagctcactgcatataatatctttaccccctttattttgtataagtgcatgttcaatgaatgaacatttccctcatatatcaccaccatagcatacatatatgggcctccacatgaagttggggatacaaatggaccgaattccattaatccagtgcctatgataggggatttttgtgatatgctattagataaagatcgaatatcagcatcagggggagaaaagcccatgtgttaaagatgccttatattttcaagaagaaaaagatctttataagtaagaataacgtacaagccaaactaaactagaaggtttagtttattctcgtgtaagccagaagcggaagcttgctagataattatgaattaaaggagtaatcagaagttatgtttacttgtagtaaactttctgctaacagtggtataccccgggttttgaatagtatatccacaaatgcagagtgacatgttagtcaatgttctaaaatctacgggaacacgtgcggattctaagatctaatgactattttcaatgtacccattaataactccttacaactcttgtagagtaatcaccatgaaggtgaattgcctcatgaagaggttcatcatgaagatgaaaacccagaacgcacatctatctaattctggggtgcggaacaaccatacatcttatgtttggaaatgactaagatattgtttataatgaattaacttcacggaatgagtatgtggagaaaataatagttgtcgacaacatcgcctctatgattactaatatttctctaatgagaatccggatccggaaccaaagtccatggcagagttgcatagtagcactcatatcaggtctattgaagaaagcaatgaggttgaaccatagtcgctaaataagtctatgtgaacatggaagttcagacttaataggaaatgaagtggtgaaaagcgacggctcatttggtcatggaaaagaccgatattctcctactatgaatgtattaaattccactatatatatcgctggcaaaagtcatgaatgaataaatgatatgcagtttatgggttatgaaaatccatatgaagttttcactagaaagaaaacaattccgcaacatatatgtaaatctcatactaattagtatcatgaagcacactatattttcatgaagagaattgcaagactcgtagaagagtttacgatgactcacgaagagtttttctcctagaagcgagaatatttctcatagtagagaaaatgacttccggaagaataagttgatccccgtaggattatggtaatgtatgaattaccggttaatctccatataacaccgataactcgtactcccatgaagtggacagacccgttcaaacgaatgaataggaaaatcacatccactagcttgcaagtggattggtagttttctacatactataaaggtgtaagaatttatatatcatgaagatatacttattgatggtatttggcattcttattaattcccctaataccaaaatatagaccgttttatgtcactctaagtggtttaagctaattgttgaagattagtgaaacaatcaaattggtaatgatgactgataaatccaccaagagaaagttgcataatatttaacctcttgtattgagctaattattttatacataccgcatatgtgtatcgttgcatcttattttcccataatcctccataaggattaaactttgtttgtattgcacatttgaataagtgattatacatattgctcctatacgttgatttatttcttatgttcatagtagaacttatgaaataagtaaacgaaagattaaacattgtggtaattttattatcattgttttacacattaataaaaatatggttatgacattggaacatggaagtttcaacggatgtcttattgagggggagcatatatgctaaacattgattatcatacttaagacttggaagtcctatatttgatttacaaagaattaatcaaattaatcattattttgataatttaccttgaaggttactaccactatattgttgtgttaatccaagttgattaatataataaatcatatagatcattagctatttatgaagaatagtcgatattaaagattatgcgatcaagaagatcgtgtgttgtactctttttcccttagtgagtttttactagaatatttctcacgcaaggtttttaacgaggcaacaagtgcaatataactagcgtgtacgatgtactcttttctcctatctttttctcccactgggtttttggacggagtttttaatgagacatgtgtatagcgcggtattcgcccaaggagtgttatgaaactattatctcctgccagagataaatatgggctcataccaaatatatggaaacgtatcctaataggactcttcctaatatgggtatatatactgagagagagggcttgagtggttggttgatgtatccgcatatggttaaagcaataaagctgtggtgcccctccctatatccgtgttcatctactatatgattgtgtgcatgagacgtcgtctactactctgaatcagcgaataggccactagttatttaacaagtagctactcccatgaaaccattcatcacttcatcgatcgtgcaatggtacagggtgggtcattactctctcgtccctgtaatgttcatcgcatctggtctcactatcttagttatatatatgaacccctcccaatcatttttcagttcccttcaatttggttacaacatgccctcggctgcaaaagagactttagggttaagcacacaaaagtcttgagagatgactttttgtaatttcagtgttatgaacatcccaataggacaacacaaacagccccggctttggaatgagtggcatcagcaattcagaaccttgccatggactgatggatcctacgaaaggattgtgatggcctccatgaagcttatggttcacgacacagggtggatttgcccttgacaactcctgtcttttctttgtggcattaggagatatttactttttaggtaggctaggatcaactggggttgtaattatagaaattaccatctaaaaaacgttctttagcccaactggggctgtcatgtacgttgaatttaggtccaagacgccttccaagcagataccaaggttttttttttaagtaagacatatatattgaccacattatcatataactagatttaagatgatgcatcacaaaactataaatttaacatcaaatttataaaaaaaacatatacatttaaggtgaaatatgacaaaactacatatttcaaatgatcggctcttcctagaggaggcgcgggaaggggaagatttcttcggtgctgacgagttcacgttctaggtcgatccgctctcaggcaacacctgtgttgttttgttattttatcttatgttgtgtatggtttttctatttgtagggagtgtgtcgttgtaagtttggtctatcggcccctaaaacctactctaatatactcatatgtaatgtttttatgtaaaatctcaaatatatgtaccgaaagatattttgtttatcaatctgtacacgatcaaaatcctggacgatcatgggtgatttcaagataccgtactcaaaccgagtatccctacagttttgtactccctccgtttcatattataatccgtttgactttttcattagacaaatttctttaggtttgactaagtttattggaaaatttagtagcatctataacatcaaattagcttcattaaatttaatattgaatatattttgataatatatttgtttggtattgaaaatattaatatgtttttctacaaatttgatcgaatttaaataagtttgactaagaaaaaattcaaacgatttataatatgaaatggagcgagtacaattgtagcactaaaattacattaataaactttcatattgcattcatcgttcacccctacagttgcagtcattgtgcggggaagatagatgtagtataagggttgcagtggcagtcattgtccagtaaatccccgtgatcacgcagtagtaccattaaattgcttcaaccaatcatcctattcatattcatcttttctactgtacataagaactgcgcagaaacatcccaaaggacattgatgctctttgttagacaatctcgttagcttggcctgcatctgggcatgactaaggaatgagaggcatagagaagagaagcatcggtatccacccgttaaagcaggaagcaaatgatgtctagctccaaccatggatggcgggctggctgctggggacaaaccggctgggaatttgattcatggcaagctgaagctgaagacggaagacaagcagatgtggctaatgaacgaacaacagtgctgtctgctgtgaggagatgttcgttgatgcaagaaaacctgaggctgctggtggctatcacacttgctgttgctaattctttcatcaatattttggttgctagttggtacaaaagatatcgcactacctgaaaaatataaatacatgctagctagcttagagaactgggggtctggaaaacattatgatcgtctccagtactgccactcttcatatttcaccaacatatgagctcttataaactatagcatgatgaagagtggaggtgctgtacacttgagttctaataaaggtcgaggcccccatcatttggcttattaagtgaataagaaacggcatatttacaaataaaaattaatctgtaacctttctttcgtcttctccgacgagaagaaaagtcgtgcagtcctcaaattatcccaacacgattgatatttgttcatttctaatagattcttgattagtttttgggacaattgcttatttgaccctattttaaagcccaactaccaatttgaccttactttttcaggtttgcttatttgaccctcttttttgaaattgaagtttccgtttgactctgtttagacttcaccgttggaacaacatttagaaaaaagaaaaaaaaaacatactaccccaaagtgacaaaaatacccccatattactaattaaccctatccccacctctccatcccaaattcccaatccccacatcttcagtttttagtcgccggcgatggcgagtgctgcggccgacggaggaagcggtggcatcggcgcgcaggaggaaggagcggtgtcggcggcagctgccgtgcttgaagcggacagagggagcggcggcgccggtggctgccgggctcggagcagagggagggagtggcgacggtggcgcgagggccctcctcatcgccgacccaacgcttccccttgttaacgaccaaatttggtaatatcagcatcggaaaagaggattagatcgaagtggagtcgaaggcggagatcgattcgagaatagagcaagaatcggctggagtccagatcggctacgattaggatcggctggatccgagtcggactgagtaagttgatatagccgattctgataatacgacttggtatacgatatcaggttgaattaagatgcttcaagatggttgccgcacatggatagagtcttgagaaggcaattgtatctattaattaggacattttatgtaatttccttagagatatgtttagggaaaaagtctgccgcaaagacttatggtatcttagagtttgttagagataagagtcgtgtccgatatggacatagtttgtaattttcgggtataaatagaccccgaactatcacgcccagaaattcccgaatagaattctaagtagaatgtgcattaaaatccccgtccattaccggccggggtacacaaacgacaaagttaacatatagatccacgtcttacaaatattataaaagtcttacataaatgcagcggaaaattaaaagataactggagctaagccttgacttggactgcagcgggaacaccactccacaggcattctcgacggcacggacgaagcctactcctcagagaaaccaccatctgatgcatactcaaactctgggggtttggggaaaataaagcaagactaagtacaaccaccgtactcagcaagtcataccggaacagggggtatgatgcaggatattaccaaaggatagctagagaggttcttttgtataaagcgagcatttataaacagtagttgaaagcaggaaaatcaggtgtaataattaatcaatattaaccatccactgtccaacgctataccacgttgcaacaggcccaaccaaccacctgaactaatcagttccatcagactaaactagggtgagactaatcacggtgaatctcgttgaccgcccataactgcggacacggctattcgaatagttttactctgatcagaggtgtacaactgtacccacaagacacagccccacgacatgtttccatacgccgacatgccaccacgacataccggaaagaggccgtgacaggactcttcgcataaccccatctagccaagcacaccacacctcaggtttcacccccgtccccagcgggcaacgggcagtcccctctcgtgcctaggagaatccggaagcaacagaggccgtcgcagggcccgcccggctccatcacgcccacccttgcctggatgcgtcagctagaggaaagctacactacaagcccagccgttgcccacgctagcttgtgataagtacgtggaattcttccaggggtttcccgcgaaccgatccttaagtgccatgggcgcgaccatcgaagccaagcacccacagcccatcgtttaatatattttaattaaccagcaccggagcggtggtattaaccaacatcattactagaatcagatatctatgctttaatgtattttccccactgtgtgctagttgaactaagcatggctaagcaatccctagtctaatatcaagtcatgttatatccccaagctaacaacggagcatgatacaaaactagtatggctgtaacagtaggtaaacatcccatggtgacattataaaacgatgcagcatttaaagtaaaacggtagagcatttgtaatataggatcaacatgttcaagtgacaagcatgacttgctttgctctactgctggaggaacctcggcgactatttcaaagtacaccggagcatccggagagccggaatctaagcgacatacaaagcaaacaatacaaacaggctataagactactgaaacaaagaacaaaaccatttttaatggattcttcacattcttcttgatttactgagacttgaatgggcttaaacggagctcggatgaattagatatgaattttagaagattcaatgtgcttttactataaacagaaaaatccttaattgatttattgcgtaataaataaaatcccggggagagagagggtggcgccgacatgcgggccccacatggcagtgactcggggagggcggtccacggtggaccgtgtccatggaccggggaggagcggcgcaccacgtggtgcacacgtggtgccgacgcggcgcacacgcggcggccacgtggcagccacgcgggcagccggaccgatggccccgatatacccggcggcagggagctcgcggccagcgcgcgcgggctgctcaagccgacccggggccatggcgcggcggcggcgcggcaccggcggcaaccagcggacagcggtggcgattcggcagacggcgacggcgcgacgatggctaagcggcggcgctactagggaaaagagaggaggaagaaggaaggggaaggagggatgtcctcaccgaaggggtccgaccggcctggagggagacgacggtgaccggcgacgaggaatgacagagggaggtcgacaagcggcggacggggtctgggacgacctaaggaacgaaatggagaggattagtgagggagagagaccatagagggcgggaatgccggccgaagacggcggccatggcgtttcttaccggcgcacgacggggatgaggctccggcggctaacctcgacggaggaggggtggacgaggtggacctcggccgcgcgaacccaacggtggcgatggcgcggtgcggcggcggccctagcagcggctagaggcggccggagtagaggaagaggcggcggctggtgggtgcacggtgcgggagcgatggagagctctggagaggccggcgcaaaaaggaaaaatgagaaggacgcggggatggattatataggggcggagaggtcgggaacggcctggagtggcccgatttcgccggccgacgtggggaggtggaggtggagagagaggcgggattcgaaattcgaatctcggccatctcgggggcgcgggcgagcgggagagggggttgaggggtgcgggaggggcggacgcacacgcgggtgtggccgacgtggcgcggggaaggcgggcgcgggcggttgcgaggcggcggctgcagacggtgggcggccaaaggttagggatgggcctaacaggtgggccctacctgtcagcgcccgagggagaggggaggctcgggcgagcggatgggctgtggccttcggtcggcccagcaacggcgcgggaggtggaggaaatgggccggcggcccatttgggaaaaaggaggggacaaaggaagaagaaaaaaagaaaagaatttccaaggattaaataatgctggtgctcatttttaattggttaaaattatttctagagctctaaaaattccactaaaaatcttgttagcatatttcgacatatagaactcaagaaaaatcccacatgccaattccgattattatttgcattaatttattagggtttgtcttgctttgacaccggtattttctctaggtgatttataattttcatttaggcttgggaaagaaacttcagggtgtgacacgaaccccatgtaatcagttaacacactcgttcaatacaatttcggtgcatcaccacccttttgcttttgttttatttcgacgagtccttgctttcgggttgagctgcatcggtttcgatcttcaacaagaggtaaaacttgttatgatggcttgcgttctcgggattagtgcttccatctttatgatactctaatcatgtttatgtaattcatcgagttatcatatatcttacataatctctggcaatatcattatctaacctacaatcgactaacatctgtcagtagagggcagccgattaggttagattttgatgttgatttagattatataagatctccaccactctatgaaacttccagcggcttgattgtctagatattgttcttcttttcatacttaatgctgcatcacttgagtttgatctattaagtcgtgcttagaatatcagtctctagcctgccttctagttgccgattagggtagtattggagtttcagccgatcttatctggtttaactacatttgctctatatgcttcgttgacatgttaaatctgccctttatgtcaagatattattgcatctacgtatattaaactttggtttggtatattctgcttgttttaatatcttaacatagaactgtatcagagtattagccgatacatgctagatctatctgatcagctatgctgtaaacatatatagttcggttattaatatatatttcgatctaagtgatttatattgtctcggcatagcgaccgatctatcccaatcacttgatttaaatatatatcgatgtaaaaattatatattgttaatatctacagccgatcgaatagatttagtcctttattatctatttccagctgccgatcaaatcgactggtacgctagcatacccgaaggcgagttttggacctgcactggagttaaacagatctcccaggcctcgtgttttacgtcaacactcttttggcatgcccgatgggaccgataagaagtcagacaagcaattccttctcatggccgagaaaccaccgctatcaccatcttcggctagttcaggcactgtcaaggagaagatccagaagttaggtttgaccgacgtcaatgaagggaacgtcgtacccatcgatccagaaaaattcacacctgatcaaaagaaagattttgaagcgatgatgcaggcagcacgtgatcaattcttgaactcattcatgcagactcgcaaggggacacttgttcagaagtataaaataaaggtggttcttgacgatcccgagactggttcctctaaggatggagaaggaaaacaaactcaagatggctcggctcaactgaatgacaaaggtgctacagatggttttccaccaaatcaaggtgacaactctcaaggggtacatggggttcaaggtgatggttttagggggttcaaggtgatggttcacagggagttcaaggtggaggtgttaatcaagacgacaatgcaacgcagttgcagttcaacaacattcaagatcaggttgactatgctgtaagtcacgcccggaaattcactagtaatttccaaacttatttgtgcataaaatcctcgtccaggaatcagccgaggtacacaaactgacaatttaatatacaaatccatcttaataataatgttacacgcttacaaaagaaaagaaaatagcagcggaataacggtctagcgatggcttcagctccaatcccacaggcagctcaactggggtataagccaaacgtcttctccttctggatcctttttcttcaactgaggttgattgattattgcaagaatgagcatatgacatactcaacaagccacacagcaaatatgcaagtgcacaaggataccaaaggatggcataatataggctcatttgcaaaagcagcatttagcaaaacatttaagagaagtaaaacagtggagtaattaatcagaaattttaatcaacactgaatagcacacccatgctgcacaggcccaaccatcctgaacaaccatacccggctgtacagatctaactccaaaccaggagctaaacaaattattaccagatatagtatccataattattgtgagaggtgtgagactaatcacgaaaaacattgctcaacccgcccataaccgcgggcacggctattcgaatagttttactctggccagaggtgtaccactgtacccacaagacacagcctcaacatcatgtctaccatgcgtcgcgatactggaaagtgcccgaatagaggctgtgacaataccctctgcacaacacaactcaccacaatgcaccattcctggatcataatcacccccttataaaacaaggcatggcctccccagcgacccccgtgggcttatctccgccacttctcagtctggtgctccgcaatgaatcatattatacaaaaggtaaagccgttgcccacgctggcttgtggttggcacggttaatgtttcacaacagtagctcgcgaaccggtccttaattgccatgagcacgactctcaaaaccatgtgctcacaacccaccattatcaagttttagttggcaagtaattaattaaccaatcacgattgaccatcgtgaactatcattaagccatcattaaataatagtgagtcataagttatcccaatagtgtgctaatgtttctaagcatggctaagcaatcatatctaatatctagctgaaccaatatataaagctcaactagtcaagttataataacccaaggtatcaaggaataaagtaatcaatgcaaacaggccataacaaaggaatagattcacaccacccagtgacattcgaaaataaatgcacagttgaaataaatagagaatttaaatataggatcaacatgctcaaaggattgtgtttaggatctgtgtggcttgccttgcaataatcggtcttcaattaatcttcttgaatacctccagcacactcgcgaaccttcgcaacgacggaaacgacaagctaacacgcaaaacgaagaaaaagactaataaaaaccaaataaacagtaatataaagtaaacaaacatgtagatcatgattttagatgaattatgagacttgaacggcctcattctgacttcaaatgaatttattacgaattttacaagattaaatctaattaaagcccatttaaaaagaattaaataaatttaattctatttatggataattttaatatgtagatctttattttacacaacctttgcaacttgaaccacattaaactgagttacaaagaattagttatgaatttttaaagattaaatcggattaaaacatttatatagattttaattgaattatgacgcaataatgaattatttttgaaaaggaaaagaggattattgcgtcaacgggctcgggttcacggtggaccgggtgcacggcggcggctcacggaaacgaacggccgagatctaccctatccacaacgaacggccaagatctaaacggtctacgaccggtctatggcggacggcaacgatgacgtcagcgatgacgtcatcaccggcgacggctcgggcggcgcatgctcgccggcgaacgatggcgcgacgacgcaaacggaggacaccaacgggtagagggtgacgcggcgaactcaccggtgaccaaaacaacggcggaagagcaacagacggcgccggcgacgaggaagaagcggcgacggtcttcgggtcgacggtgacggcggcgctccggcggtcttcggcggcggcgaagcggtggacggggatggcgacgacctcgcgatcccgatggtggcgacggcgaccgacgacggcggctgcaacggcggcgcggcgcggctgaaccgatggcaacgacggcgacggctagggctacgcggaggcggtgctagacgcgacggcgggctaaggcaaaggtggcggcggatagaggagagctcgggggtgcttataaaggggctagcgagcggcgatggaggccctcggcgatcggcggcgagaaggaaagctagggttctgaggagagaagtcgatccaaatcgaactcgaatccttggatttccaaacgaaagtagccgacgattccataagagaaaaggaagcggagatcgagaagatcattttccctctattgatttcaccggatcgggaaaggatagaccggattggaaagcggcggcggcgcggctcggctagggttcggccgggcgacggctggaggaggaagacaagtccgacaggtgggacccacctatcagcgactgagagagaggaggaaggagcgcggcgggctgcggctcggctgcgggccgacttgggccggggaggagagagagagcggttttgggccggctttcggcccaaagccaaaagagacttttaaaaacctttttcaatttaaattattcatgaaatgatattccattgattaaaaatacttccttggctcaaataaatcctagaaaaatctaggaactatagaatcaagtaaagtatttaatgaaattttatctggccccattttatattggaatttattaattaaaattagatcttctcttttaggcttttaagatcatttctaataattccttttaaacaacaatttataatttaaggatttttaaacaagaaaagctcttaacaattataattagatcattaatgatcaaataattactgaactgttctttgtatcatttaggaattgagctccgaaaaatccgagaaaatttcagagagtatacttaatcatggagaatttaataaaaattaaatccatccatgctttatatttaggaaattttattttccacatttaacttcacttgtaaattaaagaacatttaatataaattctaataataatttattaaataatttataaatcctgaaacaaaaatcaggatgtgacactgtacaccatgctttgatcaatcaatctgagaaatatggtgaagtcaatgattgatggttcaatggccgagtatcaggttacaggaccagtttacctacaaggaggggtgttcccgaattatcggccgttaatcaccgataatctaccagtcgccagtcagtccctcttaatgcaccatcagctcagccgacgataccagcatcggctcccgcacctactgcaccaccttcagccccaggccaattaattaatccccgattgttggtgagagaacagccacagcacactggacagaatgtgaatcggctaacgcaagaccaggttgcatctatgttcttacgtcctcaacacaccattgatccagcccagcagcagccgattcagcagacactaccaaggcagcaggttgtgcaaccagttcagcaaacacctccaatccaacatgttgtgcaactagttcagccaaacacctccaatccaacaggttgtgcaaccagttcagcagacgccaccaagacgacaggtcttgcagctgattcagcagacactgttgaggcaacaggttgtccagccgattcagcagcaaggtccgatgaatgcatcggctgggtttgcaacacctggtggtcaacccatgcagcatgccgcaaatcaggttgtcccagaacacttggttcatcatgtgcagccagatggcacggttgttcctcaagttattcctgaacatttggtgtgcaatattcagccagaccttcaaaattaccaggggggcaacttgaattatcaatatcacccaccatcacctcatgttcagtaccagcaagcaggatcggctcagccccaatttgttcctcaatacaatcaatttgagcctatgccacaacaacttcaaggaacacctcaacagcggccatgggccgatttgattgtagatgtcatgaaggagcagttcgggcttaggccgaaagacgctggaaacctatatcgacagccatatcctgaatagtttgagagagttcctctgcctaaccgatttaaagtttcagatttttcaaagttctcagggcaagatagtacatcaacttatgagcacattagccgatttttagctcaatgcggtgaagcatcggctgtagatgccttgagggttcggttattccggttgtctttggctggatcggcctttacttggttttcttctttaccgtatggatcaattaatagttgggctaatttagaaaagcagtttcatagctatttctatagtgggattcatgagatgaaattgtctgatctaacatcgatcaagcaaaagcatgatgaaccagtgcatgagtatattcagagattcagggagatgggaaataagtgttacagcttgagtttgactgatgcccagttagccgatttggctttttagggtatgattgctctaattaaggagaagttctcatatgaagactttgaaagcttgtcacaccttacacagaaggtagccttgcatgaacaaaggtatgcagaggctaggaaaaattctagaaaggttaatcatgtttgcccttatatatatggatcggacgatgaggatgatgattatgagatagctgcagctgagtgggtaaggagtaaaaaggttataccatgccaatgggtaaagagctcaggaaaaaaggagaggtatgactttgatatcactaaggctgacaaaattttcgacttgctactccgagagaagcagattcaacttcctgccagtcacacaattccatcggctgaagaattaggtaagaaaaggtattgcaagtggcataattctgggtctcatatgactaatgattgcaaggtcttcaggcagcagatccaagcggctatcgaaggaggcaaaatcaagtttgatgactctaagaggccgatgaaggttgatggcaatccttttcctgttaatatggtgcatacagctggccgaacagccgatcggggtcgtgcaaggggttttcaggtgaattcggctaagattatcaacaaatatcagaggaagtatgacaagcagcaggagaagcatcatgaagaagacgacgatggctttgatcctcattgggttgtgagttctttagatgttgttggaatgaaggtatgaggttgcaatctattgaagactgtcctaggtgcggtgatattgccgagagctcaagccgatcatatagtaggggcaatcggctaaggcagacaagagttcctgttcatcaaagattgggtccagtgaatcaagatcgtggctaagaggacaatgaaaacaagaaaaatcaatggtgtccttctggtatctttacgaagaatcaaaagagaagggttcaaagattgaggaacagggagcgctttcaggaggtcgagcaggaaattaaccatttgctgaagaaaacgaagccgaggcgggtgtggcgtgttaagaatcaggttcctgtagccgatgaagccacagctgatgaagcaaaaaggttagctaaaggaaaaagcgtcgtaactgcttcggtcaacatggttttcactttgcctgccgagtttgggatcaagtaagccgatatcgatgaagttgaagaagaatcggctaaattgattttgtcgccagggcaggtagtttttgagaagccagaggggacagagaattgacatcttcagccattgtatataaatggttatgtcaatgggaagccgatgtccaagatgatggtcgacggtggggctacaatgaacttgatgccttacgctacattcagaaagttgggcagaaacgctgaagatctcatcaagacaaacatggtgcttaaagactttggcggcaatccatcagaaaccgaaggagttttgaacgtggaactgacagtcggcaacaaaaccatccccacaacattttttgtcattgatgggaagggttcttatagcttgttgtttggaagggatgggattcatgctaattgttgcattccttcaactatgcatcaatgcttgattcagtggcaaggcgacaagattgaaattgtgccagccgacaggtcagtcaatgttacacgtgccgatttagctctttgggagatggatggtcttgattgtttatctggaaaagtttgggatggagattttctaaaagtgtccgattctgatatacagccaattgaagatggagagcccaagctattattttgagggcgccgtggaggattcacatgtctacaacaaggacacggtagatgatctcgatgacaaacaagggtagggttttatgtcggctgatgatttggaagaaattgatataggtctaggtgaccgaccaaggccgacgtttattagtaaaaatttatctgcagaatttagaaccaagttgatagagctgttaaaagaattcagagattgcttcgcttgggagtattatgatcaaatctttatggctgaagaagatattcataagacaactttcaggtgtcctggtgcaatcggcttgttcatatgggttgtgatgactttcggcttgaagagtgctggagctacatatcaaagagccatgaattacatataccatgatctaatcggctggttggttgaggtttacattgatgatgtggttattaagtctaaagaaatagaggaccacatagccgatttgaggaaggttttcgagagaaccagaaaatatggcctgaagatgaatccgacaaaatgtgcttttggcgtatcggctggccagtttttgggatttcttgttcacgagagggggatcgaggtgactcagaggagtgttaatgcgatcaagaagattcagcctccagagaacaagacagagctgcaagagatgatcggcaagataaattttgttagaagatttattactaatttatccggtaggttagagcctttcacaccattgttcaggttgaaagccgatcagcagtttacttggggggcagagcagcagaaagctttggataatattaaggaatatcttagttctcctcccgttttaattcctccatagaaaggaataccttttagattgtatctatctgccggtgagaagtcaatcggctcagtcttgattcaggagctatattgaaaggaatgagttgtattctatcttagtcgtcggctcttggatgctgaaactagatatttccctgtcgagaagttatgcttgtgcctatatttttcatgtacaagattgaggcattatctactatccaatgagtgtactgtcatatgcaaggctggtgttgtcaaatagatgttatcggctccaattttgaaaggaagggttggaaagtagatattctctttaactgagtttgatcttcggtatgagtcgccgaaggcaattaagggacaagctatagccgattttattgtggaacatcctgatgattcaatcggctcggtcgagattgtgccatggactttattctttgataggtcggtatgtactaatggttgtggcattggcttggttataatttcccctcgaggggcatgtttcgagtttgcttatactattaaaccttatgcgactaataatcaagctgagtatgaggcggtgctcaaagggttgtaattactcaaggtagttgaagccgatgctattgaaatcatgggggattctttgcttgtaatcagtcaattggcaggagaatatgaatgcaagaatgatacattaatggtttataatgagaagtgccaagaactgatgaaggaatttcggctggttactttaaagcatgtgtctcgagaacaaaatattgaacctaatgatttggcccagggggcatcgaggtataagccgatgatcaaagatgctaaggttgaaattgcagcaataacagccgatgattggaggtatgatgtgcatcaatatttacataatccatctcaatcggcttctaggaaattgagatataaggcgttgaagtacagtctattggatgatgagctttactatcggacgattgatggggtgttgcttaagtgtttgagtaccgatcaggctaaagttgcaatcggcgaagttcatgaaggaatttgtggtactcatcaatcggctcataagatgaagtggttacttcggcgtgcagggtatttttggctgacaatgctggaagattgtttcagatattacaaagggtgtcaagattgtcagaagtttggagcaattcagcgagtgccggcgtcggctatgaatcctattattaagccatggccattcaaaggttgagccattgatatgatcgatatgaaagtccaccatcgagtaaaggacataagtttatattggtggcgaccgattatttcaccaagtgggtagaggcgattcctttaaagaaagttgattctggggatgcaattcagtttgttcaagagcatataatctaccagttttgtattcctcaaactattacaaccgatcgaggcttaattttcgtgtccgatgagtttgttcagtttgctgatagcatgggtatcaaattgttgaattcttccccatattatgcacaagctaatgggcaagctgaggcatctaacaagagcctgatcaaattgattaagaagaaaatttctgattatcctcggcaatggcatactcggttgccgaagcattgtggtcttatcggtaggcgtgtcatggatcgatccaagtccctccttataaacttgtttatggacatgaggctgttttgccatgggaagttagaatcggctctagaagaacggaattgcaaaatactttaacagcagatgaatattacaaccttatggccgatgagagggaggatctagtctagtcgcgattgcgagctcttgcaaaagttaccaaggataagaagcgtgttgctcggcattacaataagaaagtagtacccaaagatttttcggagggggaacttgtatggaagttgattttgccgattggaactcgggataacaaattcagtaagtagtcggcgaattgggaaggaccgtttcaaatttataaagttgtgtctaaaggagcttacatgttgcaaggactcgatggagaagtttatggcagagcactaaatggcaaatatttgaagaaatattacccaagtgtttgggttaatgcatgatcggctgttgttgccgatacatgatagccgatgtattttcatcgtcttgagatggccgatattgttatatcgcccttagtcggtttttcaaattgtaatcggttatggtttgccgatatacaatggccgatattgttatatcacccttagttgtttttgtaattttatcaatgctattaacattataaaattagggggggcacatatgtacaaaaatgaaagtgaaaatttttgagcaaaatcagaagttatgttaatcggcacaaaggattgttaaaacaacagagtattaaggtatcttagccgattacaaaaatttctaggtcctattacacaaaagttattgagacaagtacagctggatagccgaaatagccctttgcgtaatttgttcgacttcttcaatggcttgggcatcttgagcatcagttccaggaatgatcttcaaagacttggtcagatcagcaacattcttgatagcctatttaagtcttgctttttgctcttcgacggaccgcgggagatcggctagtttcttgtgctccagatctaacttggcgttgcattcctgaagttgtgccagtagctcaatcttgcgagcctcgagccgatcaatgttggatttgatcggaccctccgaaagctgatcaagtttggatttctcctcatgcacaagctgacgattggcttgaattgtggcctcaatatccttgcgctcccgacgttcggctagtcttaacttggccttttccagcttgaattgatgttgctcaagatagacccctggagtaaggatgtcggctagctcatctaggattagagcttggatctcaagtagccgagtcctaattggcccacagtttaccaccaagttatctaatgatgatgcttccagccgatgacagatatcttcaagtgtcttcttcacatcatcggataagggagctagagctttgcttgaagtatcttcttctgtctcatcaagataatctctgatatcaaaggagaaaagatcggctaaagcctgcagagacaatttcggagagaataagagctaggtaaaatatagccgatctaatttcttgtatcgaaggaaaaatactgggatagcaggagcagctggttgttcttcctcaatgtgttgacttcccacagccgatggagttcggtcacttgacgattgctggacggaaggagaaggaggaggaggaggctgtaaaataaacgagtgttatataaaatcggctgggatcaactaattaaaatcgagactatcttattggtggagctggtttagatgttgctgcagccgatttcttcttcatagcaatcttgttttctgtaattacaaaatttgtgagtaatcggccataaagtaaaatgattacaaaagggatcaagaagagttgcttactcttgtgaaatgagtgcgagcagaaggagttggtgatgtctgcttgggtgaagttgatggtgttctttctatgtcactcacttcaactgcagcctgatcaacatcttcaccaatttcctcttcatctagagcttgttcgatggatggatctaaggcaggcagatcatcagtcggcttatcagtcgggttagttttcttggacttggcctttttctttggagctaaggccaaagtacccatagccgatgatctagtttttcttttcttgcctgcatcggctggttccctgaataggccgtgatggagagttgaagtctttggggcatggtagtcaataacaggggggatggtccacctccattaggaatcagacctggagcatattcaatgtcactgccactgttgctttggtgcggaggggaagagtcgatcccctgcaaaacaagaacaaaagattagtcaagtgacgaatcggctaaccatcattcaagttaataatgacaaggtttacctggggtatgacatcagggaataggtctgtcatatacatcgaagtcgattgatgaaaacaggtgcagcttccattcaccccaccatctgtcgaagtttctgctcttgaatcccgccaactcaatgttgtcaatgctgcctagagggggtcctgggaggttaagcagccgatccatcatcagcgttgatgtgatttctcctcggcactggatcttgtcggcaaagaataagccgattgggagttggcctaatccaagttgtctagccgagctcattgggtgataaaactcataggaaacttggatatttcttcttgatgaatgccgacaggaaggatgcatgggctgattgcagctgtaagaatttctctggatttttgatacttttcatgattgatatcttcaaatctaaagtctgatggaagttcaagatctactgagtcttcataaggaaaccaaactcgggcgtctttcttaaagccttcatagaagctgcagaaccaatccttgagcagctcggccgatagctttgctccagcatcggttggtgtggacgcatattccccatatgatgtgcatctgcgatgagtgtgttcttgtccatcatctcctacaatcggctctggcaatgggaactcagcttctgtcacagatggccgattgacgactttcatgaccattaggttcaaccaggtttgcagcagccaccatggtccacctgcaccgactactgagctgacggctatcttggccgatgcattgttcaatgtttgttataagtagccgaggaggatcttgctaagggaaattctttctttgattctaaggcttcggctacaaattgtcagttggttgtagggccacaactggatccacaaaagagaaatttttcgaggcacattagcaagaaggctacatgctctcgaggagtaacagacccttgacccatatatgctgctacatagccagaccaaccacctatgctttttgtcctgaagtcgaattgattcttggtgttcatgctcatgggattagccgatgaagtcacatccaaaccagtgatcatggtgatatcgatcaaagttggagtcatcggcccttggttgaacaagaaggcattgagggtgttggaccaaaaataggtggcggcagccatcagaggttcatccttagcagaattggctatggtgagagcaagcgcttggccgatcccaatctcatcccagtgaactttcttactagccgatacgtgctggtaccaggtggtccaactcttctcaggggtggttttctcaagagatggccaagatttgaaagtattcttccagtgacccagattagggttggttagttgtcacgtcccaaaacgactctaaaatacatcctctaaattaagcctagaataattaaaatccgtgtgaaagcctccaacaattaaaatgtgcaaagttaaaagtcaaataaggcttagaggatttttgtatatttcctaaaagcctaaaatgtgtacataaattttagtggaattttcagagcacaaataataattaagaagaaataaagaaagttaaaatgattttataaaaagaaaaaccataaaatccctccttctctctaatgggccgaattcggcccatctccctccccctctttctcctcttcccgcggcccattcggcctccctcctcgcgcgcgcgccgctgacgggcgggcccacccgccaccctcgctgacgggtggggcccacccgtcatccccttcctcccgccgctcctgccgccgccgccgccgaatccgccgcatcccgtcgtccccgcgtgcaatcaataggggggaattattccccgtgattccctctccctttcccctcaattttccctccctctctcccttggattcgtttggaaatcctcccctaatcccgccgacgccattgatggaacccgagaacgccgcgctggtttccttcccctccggccgctctctcccccttccaaccctatttaaaccctccccgcacctcctccgtccgtttccgcctctcaccgcccttcctcctcgccggaatcgagctcgcgccgtcgctctctctctcctccgttgctgacgacctccggccggctttctccgctcgccgggaccgtctcccgcctcagcgctgcctccttcggcttcgccgcatcctcgccgacttcgtccacctctccgtttcggtcgccgaccaccggagctccgccgtccccgacaacccgagccgcgccaccgcctccctctgctccggccgcctcctccgtcgccgccgtcgccccggggtgagccgtggaccgtcgcctcctttcccccttccctcccctctctcggccgccgctccgccgcgtctatggccgccgccggcgaccatcggggcgcgggcgcgccgcctcccgccgaccgcgccggcgtggccgccctcgtgcgcgccgagtggctgccgcgtggggcccggccgtcagccgcccgcgccctcgggtgcggctgacgcgtggggcccacggcgccggccggtgtgagcccgggtgcacccggtccaccgtggaccgtgaggctgccacgtgggccccactcccgtggacccggtccgcgcgcccctccccctcggctgatgcaataaacccctttttaaattaaaatttaaatgaagaaattcgcaaatattcatttaaatagcatataaacttcaaatggccataacttggccatttgaactcggaattggaccgttcaagtctctaatttttccttaagaagtcaagaacccatttttgtgctttgttcctacttgttatgtggagtttgttagagtaaaagccttttcttttccgttggtcgtgtagacgctgcagcttcggaagatccgctcttcgtggaggttgaagccgacgtttgggaaagtgagcaaggcaagtcacatcatccttgagcatattgaatcccagtttataaaattattttgatttaaattattgcattatcgctttacttaaattcccgcgttatcactgttttatctagccatgcctatttacctttgttatgaccttattattgttattgttattattaccttgttcaccctagaataaacaaaaccccaactagtggacactctactcgtggtaccactagtatgaatttaggtagatgcttcgccgcttaattaggtaacattaggtggttttacaactctagactttgggatattcatatcacctggacactatggaatggttggattattgtggaattggattcacacctccccctctattcaaaatcctcaaaatggttttaggttgggctcggggtgcatggttttgatagtagcacctcggccatataaggactggtcttcgggcctctgttgcaaagcactaccgtacttccacatgtctagtgggtaaggcttagtttgtggctcagtctggttataaacaaaagtacacggatggagatggacgaagtcgggggtcgatggacatctctaggacaaatgaaggctacacgagctgcggcccggtagtcgagatgtcatggcatagggccggtgtcctgctgataggggctcagtcctgcctacctgtcccaggggttccggccgtaggtggggttgggtcggtactcttgtctatggctaggatgggttggaaactatgtcacgtcttccgtccgtataccgtggtggtatgtggcacgtggttacacgtgaggaagatgtgtcttgtgggtaaagatgtacacctctgatcagagtataacctattcgaatagccgcgccctcggttataggcaagccgagcaatgtacccaagttagtgtttttatttttaaaacctggttaaccactgaaatgtggaaatagttggcctgggttagcttgggacgagctgggaaccagggtcgagttgccagttcggtctgaatcatcgtaggggtaccgagctcgaattcgccctatagt

SEQ ID NO: 5887 - DNA, 8161 bp, Oryza sativa
  unsure (1)..(8161): unsure at all n locations
aatttgatcttgcctccttcaatggctactagaatttgttgcctgaagacttgtaatcattagtagaatgagacccagagttatgccacttgcaataccttcttttgcctaattcctcggccgatggaatcgtatgaccagcggggagttgaatctgcttctctcagagcaacagatcaaaaatcttgttagccttggttatatcaaagtcatacctctcctcttttctagaattctttaccccctagcatggtataacctttttacttcttacccattcagctgcagctatttcacagtcatcatcatcattatccgatccatatatgtaaggacaaacatgattaacccttttagggttcttcctggcttctgcagacctctgctcgtgcagggttaccttttgtataagatgtgacaagctatcaaagtcctcagatgagaatatttccctgatcggagcaatcataccctgaaaagccaaaacggctaactgggcatcagtcaaattcaaactatagcacttattcctcatctctctgaacctttggatatactcatgcataggttcatcatgcctttgcttgattgctgttaaatcggacaatttcatctcatgaaccccactgtagaaatagctgtgaaattgcttctccaaatcggcccaagtgttgattgatccatatggcacagaagaaaaccaagtaaaagccgatccagacaaggacaaccggaacaacctaactctcaaggcatccacagccgatgcttcaccacattgagctaaaaatcggctaatgtgctcataagttgacacaccatcttgccctgagaattttgaaaaatctagaactttgaacctattaggaagaggaactctctcaaaccactcagggtaaggttgccgatacaagtttccagcatctttcggcttaagcccgaactgttccctcatcacatcggtaatcacatcagcccacggtcgttgctgagttgctccttgcgactgttgttgcttgggctcgaattgattgtactgaagaacaaactgagattgagtgggcccccctgctgatattgagcttgcggcgaaggaggttgatattggtaattcaaattgcccccctgataattctggtagttcggctgaatattacgcaccgagtgttcaggaacaatctgaggtaccaccgtctggtccggctgcacatgatgaactaaatgctctgggacaacctgatttagagcatgttgtcctagctgattgttaggtgttgcaaacccagccgatgcattcattaacccttgctgatgaatcggttgaataacctgttgcgttaatggcatttgctgaatcgactgcaaaacctgccgtcttggtggcgtctgttgaattggttgcacaacctgttggattgggggtgtttgctaagctggttgcacaaactgctgccttggcggtgtttgctgaatcggctgctgctggactagaacaacaataggttgaggtggtaagaacatggccgcaacctgatcttgcgtagccgattcacatcctgccccctatgctgtggttgttctctcatcaacaaccgaggactaactagttggcctggtgccgacgtagacgcagcaagtgcgggagccgataccggtgccgtcggctgagctgatggcgcattgggaggaactgtttgaacagatggctgagtattggtgatcagaggccgataatctggaaagacacctccttgcaaataaactgggcctgtagcctgatattcagccattgaaccatcaaccattgatttcatcatgtttgacaaggtattgactaacaccccagactgattgatcaaagcattgtgcacggcatagtcaacccgatcttggaagttattgaaaagctcatgtgctgcattgccattctgactaagatttccaccttgtaatccttgggaattatcaccttgagaaccaagaccttgaacttcttgaaaaccatcgccttgatttccttgagaaccatttgcaacaccttgatcacctggctgagccataccatctggagcctgttttagttcaccatctttggaagaacctgtcccaggaacatccgcaaccaccattaatttatacttctgaaccaacgttcccttgcgggtctgtgtaaatgaactcaaaaattggttctttgcttgctgcatcattgcttcaagatccttatgctgttcaggtgtcaatttatccagagtgatgggcataatgttgctctcatcaacctcagacagacccaacttaaggatcttagctttgacagaatcaggttctctagccgaggacggtgacggtggcggtttctcggccatgaggaaaactgctgttgtgactctgacttctaatcagtcctatcaggcatgccaaaagcgtattgacagaaaacacgaggcctgggagatctgcttaactccagtgcaggtccaaaactcgccttcggatgtatgagcatgccagttgatttgatcctacaatcaacaagaaataaagacaaagaaaccgtggttaaatccataaatgatagtcgatcggctaagtgccgatgacatatcatttacctttgggccgatgtcatatgtacatcgatcgatagccataaatgaataaaaaggaactaaatctactcaatcggctgtagatattaacaatatataatccttatgtcgatatatacttaaatcaagtgattgggatagatcggtcgccatgccgagacagtataaatcacttagatcgatataatctaagccaacgtcgctatttaacctaatcggccgccttgtgttaacagatgttagccgattgtaggttagatgacgatattatcaaagattatataagatatatgataactcgatgaattacataaacaagattagagtataataaagatgcaagcactaatcccgagaacgcaagccgccataacaagtcttacctcttgttgaagatcgaaaccgatgcagctcaacccaaaagcaagaactcatcgaaacaaaacaaaagtaaaagggtggcgatgcgccgagattgtattgatagtgtgtgttaataattacatagggctcggggtctatttatacccaagaattacaagatatgtccaaatcggacacgactattatctctaacaatctctaagataccataagtctttacgacagacttttacccacatttatctctaaagaatttacataaaatatcctaattaatagatacaattgccttctcagaactctatccatgcgcggcaatcatattgaagcttatcaactcaaacccgatgtcgtacacaagtcgtattgtcagaatcggctgtatcacttaacccagtctgactcggacttagccgatcctagttgtagccgatccggactccagccgattcttactctgtttccgcgacaatccttatattcgattccgcttcgatctaatcttcatctccgatgctaatattaccaaatttggtcgttaacaagcgtatgtaatattgttgtgctaatgttgagtctagttgaagagattttatgctccaatatgcatggcttctttgtaggttcatgtgtaggtaagtcttgatgcctcgggagagcgttgtcagtgatggatcgggagtcaacctgggagaagatgatgtccggataattaggatatcatgtgggatgtttaagctaaacatcaatgcacgtggttggtatagattccatatgacatacgacggagatatggtgtgcgtatgggatgtggagttgaatttggaaggagtccaaatttggtacaatcactactaaaaaaggcacatacaagtcggcactataggggctagaatagctaaaaccagcacatatagtgtttttcccacctccactgactaaaaatagaaaaaacctatacttatactataagtgcctttgttttataacaaaccgagccaagccagcgagcccagccctcggcattatctctttctctccaatccccttgatcttatctatctcacgcgtctctctctctctctctctctcttctctctctcatctctcgcggcggccggagtggcccggcggaggcggtagcggtagcggtcacaccccgccgccccttcgctagatctagtgggaggagaggcgtcgactgcctccgacggcagaaggggcagcgcccttcccttcgccagatacggcgggaggagaggcatctgcattctctgatggatggaggagatgcggcaggggtggcaccctccccttcgccagatccggtgggaggggaaaaagcggccttccacgacggcaatggtagcacccacaccttcgccaaagcagaggcagcggcggctgtagtggaaggggagaaggaggctcgcccctccccctatcctcctttctatctggcgacggcggcaggggtagagtacttcttgatctgtgttcttgatgttgtttttttagaccgtgttcttgatgtattgatgaacttgtttattgtgatctatgaacttgttgattgtgtgatgtgtacttgttcctttttttagatttttaatttatgtttggtggctttcaagcatcggctcggctcctggttttttctttttgagtaaatttcactttgggcgtgatttattaaccaaagtttcaccatgaaaccaggcctaactcgaccttttcagttaacactaggtatgattaccttcttttgcagtttggaccgggttttaagactttgggccaccacgctggcttgatctgagcctagtgaactcagttcggggaagagaaattatcgaggaaaactagtgtatgggagagaaggaagatagtgtcgtggaggcggaggcggacatgctcaacgcctcggtctccaccctcgccaccggtggcttctacgcctgcggagcggcacgatgcggtggccgtgtgcacatctccggttctggcgaggcatggcgcagcggccgtgcatgctcttcttcggctccggcgcggcaggacggcggcatgctcttcttctgctcgaccgcggtgccggcaacggggtgcacgcactgctccttcagctcacggcagaatgggaggattccaaaagcctcaccaagttagagtaggaattattagctaattgtattgtaaataagtaccactaaagagaaggcactggaaagggaaattatcacaagtacctcatgatcaggtacatgtacatatggaacttggaacctctttccatgtttttagtggcaaaattgacagctctatcttacttgcatacacatttagaaacaacacagattcattccaccaacaccacaccgaagctgaagagcacgccgccatgccaattcggagccggagaaggtcacgccgccgccacgccgtgctgctccggagacttggccgggagccgccggtggcgagggtggagatcgaggcgttgagcaagtccacctccacccccacctccacgacactatcttcctcctttcccgtgcgctagtctcccttgataactctctgcgctgaactgagttcaccaggctcaagccaacatggtggcccaaaagtattgaaacccagtccaaactgcaaaagaaggtaatcatacctggtgttaactgaaaaggtagagttatacctggtatggtgaaactttggccaataaatcaggcccaaagtgaaatttactcttttctttacaaatcgtatacatcaaaggtgttggttcctaaaccggcatcttggagtcttctcatcagtgccgttttcgtggtgtcggttgggaaatccagcacctttgtgtagttcccaaccagtaccaatctacatttctgtagttgtgaattggagtttataaagtttgtttctcgtccagcatggtttcctagaggattaggacttcttgtatgagtttggttcatggttttaggcaacctacctcagctataaagagaaatggaggctaacttttaattccgttaaaaattttgatttttggttactccaaccatttgacccctctaattggcttagtttttgttgtacgatcctgcatttacatggtaaatcctgcaaaaaggagctgcaagtaacctgccatgttgaatgtcgtgtggaatacacatggggagaataaggagccgtgccgccataccgatgggccgcaatgtcctctccagtttttttttttttttttttttttttgcggggaatgtcctccccagttaggtcgtggacactcggtttatttcatgctggtgcacctgctgatcctgcctcaagtgtaagctgtggggtgcctcacttcgcgtgttgctagtgcgggcgatggcttcgtttgtcccgttcaccatgaagccgcaggctcgatcgccaggtaaccagatcagagatatactactcattaggactcctagctcattctttcattgtgctatcaggaggagagatatttcttttctcggtggattgggctcaatcggcgattatagaatatgacaagcaacccacctgaacaacaacgcttttcagaccaactagaataacttttaagctctgtaatttacagtgattttgttccaaaacttgtgtgccaaacaggtcctcagggttgttttcattccaatatattagttatttgttaagttgtatatagcaggtacttcaggataaaaattattgctgaagactggattaaccaacattggaggtatctgcatcgaagtacaacaatgtgcggaactgaacaatctagggtttaattgatcatatcaattaaacttaaggttttggtataccagtcctggtgatctgtcatgtgaattgcctgtcatttcgttcagcttttctatctctcacgcaatcccgcgtctccattcactcctctttcacctctcagccaatctattccccacatgccttcctgcgcttttccatcttcgttggttcttcctccaccggcgtatacggtatacctttgtctgagtcattcttgcttgtcgatcatctaggctccacaacgttattgttatgccatcgtgccgtttgtatatatcagcgtgtggcggtgtcctcatccatgcattttctagacaagtaaggatatttatgatgtggctttgcagtactggcagcaataaaagggtagcaatgtactagtactaccattttgaaggaccttccccctggaggaggaggggaggaggactgtgagtagcgcaccaacgacagggggaggggggcggggaggggggggtgagtaacgcaccaacgacctatatcactctcctccaccgccactcccccgtccgtggcccctcctagttagtaagaaagtctatgttctacgtaagaattaaaacatgtcttttcatcgtaaccattggcactgggtacgataatgacccgccaatgtgatattctagcaaaattagactgtgatctctcttcatttattaaactgcagatcaaaatgttctgagtaaattgcaatgttctgaataatttccactttccgctagaggttcaccatataatggaagggaaattttataaatcaagagtgtatcttttggaactttcgaatttggacctgtttcatgaagtttcaatcagaatttatgagaaaatttccatatgtttgatgatttatattgaccttaaagtgaaacttacttctatgcacctagtttaaagtgaaattatatgctaaacctgatacagaaacatggcgagcttcatccattgcaaagttcaatttaaataaattcacttcaactggcactctatatgcatgctcaaaatttctctgtttttttggcaatgcttcatattatcttggttagatttgatttaaaattttccattacaatatgatagaaacaaatggttactttcatattttggttagaaaaatacaaggaaatttttgggtttttccaaagggggaaagaaaaaaaaattttaaaaaaaaaaaaaaatttttaaaaaaaaaggggggggaaaacacaatgaagcaaaatagtttacaaactgaaatcaggtaagaaaatgccagaggatggcaccnntnaacttcaagatttgttgctatgaagttacag

SEQ ID NO: 5888 - DNA, 10249 bp, Oryza sativa
tttatataaaaattgtagccctcgacgcgacctataactttgtagttgaaaagtttttgaactaaaattgtttaaggtcccaaaatattgttgcatgtttatagattttgaaattttaattttaaaattacattttgggacaaaaaatgacttaaaataaaaaaaaattcaactaaaaagttgtagatcgcgtcgaggactacaagtttgatataaagtttgtctttattagagttcacatgaaaaagttatgaactatttttaaatataaagtctttagaccgtcctatttaacccagatgatattcaaatccaagtttagggaccggggtgacacaactgaacaggttggaggacctaaacgagtgatctaaaagtttaaggatcgggatgacacagttgaacaagtttgaggacctgaacagtcgatttgcgagtttcgggaccgggatgacacagcggtacaagtttagggaccggtgatggactttactcttattattttgtgatgaacaattatcatttgagattattgttttgatatttttagattattggtgaagtggttttggagaaggttgattttcagatgataaatagggactgctgtcagtttggaccagttagagcgaactgtggttgccgatcagaccggcgtgtgttgcgcggtcagaccggtcagcccgcggtctgatcggccgaatatgtgtcgatttcggtttcaggttgttttctgtagatatttgtggataaatcatgtttatgatttctagatgaatactaagcgttgttgacagaaaacacgaggcctgggagatctggttaactccagtgcaggtccaaaactcgccttcagatgtatgagcgtgccagttgatttgatcctgcaatcaacaagaaacaaagacaaagaaaccgtggttaaatccataaatgatagccgatcggctaagtgccgatgacatatcatttacctttgggccgatgtcatatatacatcgatcgacaaccataaatgaataaaaaggaactaaatctactcgatcggctgtagatattaataatatataatccttatgtcgatatatacttaaatcaagtgattgggatagatcggtcgccatgccgagacagtataaatcacttagatcgaaatatatattaacaacaagattatatatgttcatagcatagccgatcagatagatctagcatgtatcggctaatactccgataccactctgtattaagatattaaagcaaataggatataccaaacagaagcctaatatacttaaatgcagcaagatcttaatataaagggcagattcaacatatcaatcaagcatataagataaggtagttaaatcaggtaaggtcgactgaaactccgatactaccctaatcggcaaccagaaggcaggctagagattgaaattctaagcacgacttaatagatcaaactcaactgatgcagcattgagtatgaaaagaagaacaatatctagacaatcaagccactggatgtttcataaagtgatagatatcttatataatctaagccaacgtcgctatttaatctaatcggccgccttgtgttaacagatgttagccgattgtaggttagatgacgatattatcaaagattatataagatatatgataactcgacgaattacataaacaagattagagtatcataaaaccgccataacaagtcttacctgttgttgaagatcgaaaccgatgcagctcaacccgaaagcaagaactcgtcgaaacaaaacaaaagtaaaagggtggcgatgcgccgagattgtattgaacgtgtgtgttaataattacatagggctcggggtctatttatacccaagaattacaagatatgtccatatcggacacgactattatctctaacaaactctaagataccataagtctttgcggcagacttttgcccacatttatctctaaagaatttacataaaatatcctaattaatagatacaattgccttcttaggactctatccatgcgcggcaatcatcttgaagcttatcaactcaaacccgatgtcgtacacaagtcgtattgtcggaatcggctgtatcacttaacccagtcagactcggacttagccgatcccagtcgtagccgatccggactccagccgattcttactctgtttccgcgacaatccttatcttcggttccgcttcgatttaatcttcatatccgatattgatattaccaaatttggtcgttaacacatgccccccaagtccgggatatttggtaatgtttcggatttgccgcgtatcgacttcgagtaagtttggcactctgccattttctgacggttatcctcagtgctttaaatactaaccgccgccctggaaaatctttaccccattacttccgttttcaccaccgaagccaattttgttctcttcctctccggcgatttctctgacgcacaaagcgatccccaggcggcttcatctccggctagatctacgcctgcggcgatgtcgtcctccgccagcccgtctgccacgccgtcggcgagtacactgaggtaagtcccggtcggctagatcccctttcttagcatcagatcgattttctctcgccttatattgctttccctttctcgattactttggatttgtagcatctctccaacctagttgcaattcccagcctatcgcatgaaaactactactttctcggcccagtcggcaaccctgatcccacagagttctttattggtgaaaccaataggattccttttagattggccaacccagatctaggtcactggaaaaacaccttcaaatcctggccatccctcgagaaaactcgacccgagaaaagttggatcacatggttcaagagcatgtcggctagcaaaagagttcattgggacgagattggaatcggccaagcactcgatctcaccatagccaactcagctaaggatgagcccctaatggcaactgcctcttatttctggtccaacaccatcaacgccttcttgttcaaccaagggccgatgaccccaactctcatagatatcatcatgatcacgggtctggatgtcaccttatcggctaactctatgagcttgaacacgaagaaccaatacgacttcaagaccaagagcataggcggctggtcaggctatgtagcagcatacatgggccagggttccgtcacccctcgagaacatgtggctttcttgctaatgtggctagagaaattcctcttttgtggatcaagctgtggccctacaaccaattggcagtttgtagccgaagccttagaagcaaagaaacaatttcctttaagaaaaatacttctcggctacttgtaccaaatgctaaacaatgcatcggctaagttagctgtcggctcagtagtcggagcaggtggaccatgatggctattgcagtcctggctgaatttggtagtcatgaagtttgtcaattggccatctgtaacagaagctgaatttccaagactggagccgattgtagacaatgatggagaagaacgtactcatcggagatgcacatcttacggagaatatgcctccataccaaccgatgcagaagcaaagctatcggccgagctgcttaaagactggttctgcaatttttatgagggtttccaaaaacatactcaagtttggttcctctatgaagattcaacacttctagaaaatccattggacttcatattcgaagacatcaacaatgaaagatatcagaaacccagagaaatttcttcagctgcaatcagtccatgtatccttcctgtcggcattcatcaaggaagaaacatctaagtctcctatgaattttatcatccaataagttctgccaggcagtttggaatgggccaactcccaatcggcttattctttgaagataagatccagtgctgaggggaaatttcgtcaaccttaatgatggatcggctgcttaacctccaaggaccccctctaggcagcattgataatatagagctggtaaccttcaggagcagagcattcgacagatggtggagtgaatggaaactgcatctattccatcaatcggcctctatgtatatgacagatctctttccagatgttgtccctcaggtatgtcttaatttactcaatttcatttgaatagttgcttagccgactaaccttgactaactttcctttcgacctgcagacaacagagttctctcctcctcgccaaagtaacagtggcaggaacattgaatatgcctcgggattaattccaaatggaggtggaccatctcctcctgtcatcggctatgatgcccccaagacttcagctcttcttcaagggctcatcagagaaccagccgatgccggcaagaaaagaaaaaccagatcatcggctgtagatacttcagccccagctccaaagaagaaaaccaagacaaagataactaagccatctgatgatctgcctgccctagatccatccattgaacaagctctggatgaagaggaaattgaagaagacgttgaccaagccgcagccaaagtaagcgacacagaaagaacaccatcggcttcacccaagcagacccctccaactccttctgctccagctcacttttcaagagtaagcagctctctttgatcctttttgcaatcattttactttatggccgattactcacagattttgtagttgtagaaaaagaagactgctgtgaagaagaaatcggctataatgacatcttaattctttcattagttgatctcagccgattttgtctaacacttgtctcttttacagtctcctcctccttctcctgtacaacagtcatcaagtgaccagactccatcagctgtagggattcaccatgttgaagaagaagtccaaccgactgctcctgctatcctggtaagcttttctttgacacaaaatacccagatcggctatgtctatttgacctctaacttctctttaaatcattattgcatgtcttagccgatcttttctcttttgacattagagactatcttgatgaaggagaagaggataccacaagcaaagctttagcccccttatccgatgatgtgaagaaaattcttgaagatatctctcatcggctagaggcatcatcgttagacagcttagtggttgattgtggctcaattaggactcggctacatgagattcaagctctgatcccagatgagctagccgatgtcctaactccagctgtctatctcgagcagcatcaattcaagctggagaaggccaagctgagactagtcgagcgtcgggagcgcaaagacatcgaggccacaatttaggccaatcggcagcttgttcatgaagagaaggccaagcttgatcagttatctgaaggtccgatcaagtctaatattgatcggcttgaagctcgaaagattgagctcctggcacaacttcaagaatgcagtgccaatctggacatggaacataaaaagctagccgatctcccaaaatctgttgaaaagcagaaagcaagactaaaatcggctataaaaaatgttgctgatctaaccaagtctttaaaagtcatccctggaaccgatgctcaagatgcccaagccatcgaagaagtagaacaaattaggcaaagagctatatcggctatccagcgctatttgtctcggtaactttctgtgtaatagaccttagaaatttttgtaatcggctaagatactactgatgtttatcttgataatcctttgtgccgattaatataacttccaaatttgctcaaaaattgtcaaaatttgtaactggtgtatatatgtgcccccctaattttacaatgtcaaaagcattgatttaattatagtttaaaacttagggcgatatagcaatatccgccattgtatatcggcaaaccacaaccgattacaacataaaaacaactaaggacgatataacaatatcggccattgtaaatcggcaaacctcaaccgattacaacataaaaacaactaagggcccgattataacataaaaacaactaagggcgatataacaatatcggccattgtaaatcggcaaacctcaaccgattacaacataaaaacaactaagggcccgattataacataaaaacaactaagggcgatataacaatatcggccattgtaaatcggcaaacctcaactgattacaacataaaaacaactaagggcgatataacaatatcgcccatcccaaggcgatgcaaacccatcggctatcatgtatcggcaacactaaccgatcatgcattaacccaaacacttgggtaatatttctgcaagtacttaccattgagcgctcgtccatagacttcgccatgaagcccttgcaacatatatgcccccttagacacaaccttatagatttggaacggtcgttcccaattcggtgaccatttgccgaatttgttatcccgagttccaatcggcaaaatcaacttccatacaagttcaccttccgaaaaagtcttgggtaccacttgcttgttatagtgtcgagcaactcgttccttatctttggtaacttttgcaagggctcgcaaacgcgactgaactaagtcctccctctcatcggccataaggttataatactcatcggctgtcaaaccatcttgcaattctattcttctcgaaccgattttaacttcccatggtaatacagccgcatgcccataaacaagcttataaggaggaacttgaatcgatccatgacaagccatccgataagaccacaatgcttcggctaaacgagtatgccaatgccgaggataatcagaaattttcctcttaatcaacttgatcatgcttttgctagatgcctcggcctgcccattagcttgtgtataatatggtgaagaattcaacaatttgatacccatgctatcggcaaactgaacaaactcatcggacacgaagattgaaccttgatcggttgtaatggtttgaggaataccaaatcgatagattatatgttcttgaacaaattgtatagcatccccagaatcaaccttcttcaaaggaatcgcctctatccacttggtaaaataatcggtcgccaccaatataaacttatgccctttacttgacggtggattaatcatgccgatcatatcaattccccaacctcgaaatggccatggtttaataataggattcatagccgacgccggtgctctctagatcgccccaaatttctgacaatcttgacatcccttgtaatatctgaaacaatcctccagcatcgtcggccaaaaatatccagcacgtcgaagcaaccacttcattttatgagccgattgatgagtggcacatatcccttcatgaacttcaccgattgcaagtttagcctgatcggcactaaaacatttgagcaacaccccatcaatcgtccgataataaagctcattatctaacaaagtatacttcaacgctttatatcttaacttccaagaagccgattgagacagattctgtaaatactgatggacatcatatctccaatcatcggctgttatggcagcaacttcaatcttaacatctttgatcatcggcttatatcccgatgccccttgggctaaatcattagatattccttaatattatctaaagctttctgctgctctgtcccccaagtaaactgttgatcggccttcaatctcaacaacggtgtaaaaggctctaaccttccggacaaattagaaataaaccttctaacaaaattaatcttgccgatcatctcctgcaattttgtcttgttctctgtaggcttaatcttcttgatcgcattgacacttctttgagttatttcaattcccctctcatgaacaagaaatcccaagaactggccagccgatacgccaagagcacactttatcggattcatcttcaagccatatttttcctagttctctcaaaaacttttctcaaattggctatgtggttcgctatttccttagacttaataaccacatcatcaatatagacttcgaccaaccagccgatcagatcatgataaatatagttcatggccctttgatatgtggctccagcactttttaatccaaaagtcattactacccattcaaataagccgattgcaccaggacatctaaaagccgtcttataaatatcttccttagccataaagatctgattatatcccacatttccatccataaaactcaatatcttatgtcctgaagcagcatcaaccaactgatcggctactggcattggatactcgtcctttggggtagctttattcaaatctctaaaatcaatgcacaccctcacattgccgttcttcttgataacatgaactatgctagaaacccactcagcatatcggcaaggacgaataaaaccagcatcatataaacgcttaatctccgccttcacaggttcgagcatatcggctttgcatcttctcggaggctgctggtgcggtctaacccctagtttgataggtagtcgatgttcgacaatcgatcggctaagtcctggcatctcataatactcccaagcgaagcaatctctaaattctttctagagctctatcagcttggttctaaactctggagataaattcttactaataaatgtcggccttggccgatcgcttggacctatatctatttcttcgaaatcatcggccgacattaaaccttgaccttgtttgtcatcgagatcatctactgtatccttggtgtagacgtttgaaccctccacaacgccttcaaaataatagcctgggttctccatcttcaattgggttctccatcttcaattggctgtatatcagaatcggactattttagaaaatctccatcccaaacttttccagataagcaatcaagaccatccatctcccaaagagctaaattggcactggcaacattgactgacctgtcggttggcacgatctaaatcttgttgccttaccattgaatcaagcattgatgcatggttgaaggagtacaacaattggcatgaatccaatccctaccaagcaacaagttgtaagaacccttccgatcgatgacaaaaaaggtagtagggatggttgtgctgccgactgtcagctcaacatttagaacacccttggtttccgatggattgccaccaaagtctttgagcaccatgtttgtcttgatgagatcttcagcgtttctgcccaacttctagaacgtagcttaaggcatcaaatttactgcagccccaccatcgatcatcatcttagacatcggcttcccattgacatagccatttatatacaatggtttagcatgccgattttctgtcccctcaggcttctcaaagattgcttgttctggtgatagaaccaacttagccgattcttcttctactttgtcaacatcggtttgtttgatctcgaattcggctggcaaggtaaaaaccatgttaactgatgccgttacaacactattcccttttgccaacttcttcgcctcgtcggctgtggcgtcatcggcttcaggagcttgattcttaacgcgccactcctgcctcggctttgtcttcagccgatgactgatttcctgctcaacctcctaaaagcattctctattcctcaacctttgaacccttctcttttgattttttgtaaaaataccagaaggacaccactgaatcttcctgtctccatcatccttttggctatagtcttggttcaccgggcccaacctttgatgaataggaactcttgtttgcttcagccgattgcctccatcatacgatcggcttgatctccctgcaacattactgcacccaggacaatcctcgatagatggcagcctcataccctcattatagcagaacctaaataactcacaaccccaatgaggatcaaaaccaccattatcttcttcataacgcctctcctgttgcttgtcgtacttcctttgatacttgtttataatcttagccgaattcacctgaaaacctcttgtacgtcctccattagctgttcggccagctgtgtgcaccatgtttacaggaaaaggattaccatcaaccttcatcggcctcttggaatcatcaaatttgatcttgcctccttcaatggctactagaatttgttgcctgaagacttgtaatcattagtagaatgagacccagagttatgccacttgcaataccttcttttgcctaattcctcggccgatggaa

SEQ ID NO: 5889 - DNA, 12543 bp, Oryza sativa
gcaatcaataggggggaattattccccgtgattccctctccctggattcgtttgaaacccccccttttccccccccggggcctttaaaaaaaattttcctctcccttggattcgtttggaaaccctcccctaatcccgccgacgccattgatggaacccgagaacgccgcgccggtttccttcccctccggccgctctctcccccttccaaccctacttaaaccctccccgcacctcctccgtccgtttccgcctctcaccgcccttcctcctcgccggaatcgagctcgcgccgtcgctctctctctcctccgtcgctgacgacctccggccggctttctccgctcgccgggaccgtctcccgcctcagcgctgcctccttcggcttcgccgcatcctcgccgacctcgtccacctctccgtttcggtcgccgaccaccggagctccgccgtccccgacaacccgagccgcgccaccgcctccctctgctccggccgcctcctccgtcgccgccgtcgccccggggtgagccatggaccgtcgcctcctttcccccttccctcccctctctcggccgccgctccgccgcgtctatggccgccgccggcgaccatcggggcgcgggcgcgccgcctcccgccaaccgcgccggcgtggccgccctcgtgcgcgccgagtggctgccgcgtggggcccggccgtcagccgcccgcgccatcgggtgcggctgacgcgtggggcccacggcgccggccggtgtgagcccgggtgcacccggtccaccgtggactgtgaggctgccacgtgggccccactccagtggacccggtccgcgcgcccctccccctcggctgatgcaataaacccctttttaaattaaaatttaaatgaagaaattcgcaaatattcatttaaagagcatataaacttcaaatggccataacttggccatttgaactcggaattggaccgttcaagtctctaatttttccttaagaagtcaagaacccatttttgtgctttgttcctgcttgttatgtggagtttgttagagtaaaagccttttcttttccgttggtcgtgtagacgctgcagcttcggaagatccgctcttcgtggaggttgaagccgacgtttgggaaagtgagcaaggcaagtcacatcatccttgagaatattgaatcccagtttataaaattattttgatttaaattattgcattatcgctttacttaaattcccgcgttatcactgttttatctagccatgcctatttacctttgttatgaccttattattgttattgttattattaccttgttcaccctagaataaacaaaaccccaactagtggacactctactcatggtaccactagtatgaatttaggtagatgcttcgccgcttaattaggtaacattaggtggttttacaactctagactttgggatattcatatcgcctggacactatggaatggttggattattgtggaattggattcacacctccccctctattcaaaatcctcaaaatggttttaggttgggctcggggtgcatggttttgatagtagcacctcggccatataaggaccggtcttcgggcctctgttgcaaagcactaccgtacttccacatgtctagtgggtaaggcttagtttgtggctcagtctggttataaacaaaagtacacggatggagatggacaaagtcgggggtcaatggacatctctaggacaaatgaaggctacacgagctgcggcccggtagtcgagatgtcatggcacagggccggtgtcctgctgctaggggctcagtcctgcctacctgtcccgggggttccggccgtaggtggggttgggtcggtactcttgtctatggctaggatgggttggaaactatgtcacgtcttccgtccgtataccatggtggtatgtggcacgtggttacatgtgaggaagatctgtcttgtgggtaaagatgtacacctctgatcagagtataacctattcgaatagccgcgcccttggttatgggcaagccgagcaatgtatccaagttagtgttttaattttaaaacctgcttaacaactgaaatgtggaaatagttggcctgggttggcttgggacgagttgggacccagggtcgagttgccagttcggtctgaatcatcgtaggccttgggttaaggcaggttcgtgtgggttcacggccttgattaataatcttgtatagctctaggatcgtatttacaaaatagctttgagcaactaagtgtcttttaatgctgtttactgcaaaccctaaccctttatattataacccccttgtactcccttgcatttattctgcacttatgggtgtgtcttgttgagtacgttggttgtactcagtcttgctcaatttttcccaaacccagaaaaggagcccctggatgatgaaggctttggtgtttagctcgtgcctgccatcaagcgcctgtggtcatcgccctagtcttccgctgtttcccgtttgtcttcttgtgtgctgggccttcgccgcccatgtaataaagtaactatttatgcttccgcttgataaactctgaattgtatcaactttcagtgtaccttgcctcctgggacaaggaataatacacgcacgtaaggaacgcccgttgggttatttccggtcgtgacaagttggtatcagagcccccttgaccctaggacgagccttagatcccaagccttagcaatattttcgaaataaaaatcctttcttatttgtgaaaatcctctagtctctctctgtcctgctgcttcatttatcgccaaaatctaatctttaaaatgttgcttttctcttttgtctttttgtttgtagatggccggcagcatcaaccgtcgtggtctggacctgactagcttcgttttggagctgcggggcatgtgcgttgtcctggggtatccgcatggagtggattaccagggcaagcagctcccggagcaggagggtgacgatgtagagccccatgctgcttgggaggtcactgcagtgatcctcactggctcacctgagaggacttcgttggcagtcaccgcgggaggagattctttctctgccgcttgccagaacgccgcactcctcgccatcggcactcttcaccagcgctacccggacgagttgcagcactcgccctaccgctaccaccctcgtcgcggaggagcccgcgactacgccaccttcagggatgctagctcggaggatgacgctaccatcatgcacctggcacgcatggtggaggcgtacgacgcggctcgtatcgacttccatcagatggtgcgccgcgggttggtcgagaacaacatgaagatcctggagctgcgacaggagaatctgcagctgaagaaggacctagacgcagtggaggcgcagctgtgtcagctcaagatcgcccagggagaggtctgtcgccccaagcgccgccgcgtctgccgcagcctgaagatcaccgcccgcaagagtacctccaggcctgagcttgttcgtcagtccctagcgtggacctgctttgtcgagacccctcgtgccgagcccgcgcccttggttcctcaggaggagggagcctctggcgtgggtagcacgaaagatgcgctactgctcaccttccgccctggcccgtcgcagaagtagacgagcagttagtaggcttgcacgtgtgttcttctcgttggtctttctgcttgagtcgtgtggggcatggttataccggtgtggggtataactgtatcggagcctgtctttattttatttgcttaagcaacttgaaccttaatgaaccaatttaatagcagtaataaattcaagaattatggtagtcgtggctagttagttttaatagtcagctctctctgtttgccggttctgtgtgggattttgagattgtgacaaccaggagaagtgctgctaccggtgaaggcagtcaccccgaaggcagcaaccacaacaaccatggcagcccacctccacctcctcccctgcctccaccaccaccaccagacaccaactccatcctcacccaaatcctcgcccagctggccaacatgacgactgctttcctccaccacatccaaaatccgccacagcatcatgctccacctccaccaccacccccacaacactctaaactcgctgagttcctccgcatccgtccgcctaccttctctaactccaataaccccgtggatgctttggattggttgcatgccatggggaaaaagttagacaccgtgcagtgcaacgatgaggagaaagtcatctttgccgctcaccaactgcaggggcccgcatctctatggtgggaccactaccaggctacgcagccagaaggacagcctattacttgggcccgtttcaccgccgctttccggaggacccatgtgcccgccggagtcatggcccttaagaaaagggaattccgagagttgaagcaaggcaaccgctctgtgatggagtatttgcatgagtttaacaacctggccaggtacgccccggaggatgttcgtgaagatgaggagaagcaagagaagttcttggcaggaatggaccctgagctgtccgtgcgtctggtctccggggactatctggatttccagcgtttggtggacaagagcatccgcttggaagccaagcacaaggaactggagtcgcacaagcgtcgcctgacgaatttccgcaaccaacagggggctaaccaaaggatccgctacaccaatccctatccagggggatcctcctcgcagcagcagcaacagcagcagcaacctcgctccgtgccccaacctcaattcgtggtgcgcgtcccacagccgcagcagcagcagagtgtcacatcctgatttttgtttcaggatttataaattatttaataaattaataatagaatttatattaaatgatctttaatttacaagtgaagttaaatgtgggaaataaaattttctaaatataaagcgtcgatggatttaatttttaaattctccatgattaagtcaactctctgaaattttctcggatttttcagagctcaattcctaaatgatacaaagaacagttcagtaattatttgatcattaatgatctaattatatttgttaagagcttttcttgtttaaaaatccttaaattataaattgttgtttaaaaggaattattagaaatgatcttaaaagcctaaaagagaagatctaattttaatttgctaaatctcaatataaaattgggctagataaaattttgttaaataatttgcttaattctataattcctagatttttctgggatttatttgagctaaggaagtatttttaataaatggaattgcatttcatgaataatttaaattgaaaaaggtttttaaaagtctgttttggctttgggccgaaagccggcccaaaaccctctctctctctttccctcggcccagtccgccgcgccccttcctcctctctctctcagccgctgacagatgggccccatctgtcggagccgtcttcctcctcgcgccgccgccgccgcccgaaccctagccgagccgtgcgccgccgctttccaattcggccgcgtctttccttctccggccgaatcttttgaggggaaatgatcttcgagatctcctcttccttttctcttatagaaactccggtcaatttcgtttggaaatcgacggattcgaggtcgattcggatcgacttttctccctccaaccccgacctttccttctcgccgccggtcgccgtgggccttcgccgccgcctccttgcccctttataaggatccccgagctctcctctacccgccacctccctcgccttcgtctctcgccgtcggaagcgccctagcgtcgtgtgacctagcgccgccgtcgtcgccgctccagctgtgcgccgccgccgttccggtcgtcgtcgtcgctcgggaagatcgccattgtgatcgccaagtcgccgccgtcctcgtccaccgcttcgccaccgccggagaccgccggagcaccgtcgccgccgtcgacccgatctccgccgccgcttcttcctcgtcgccggcgccgtccgttgcttttctgccgccgttttggtcaccggtaagttcgccgcaccgcgctctacgtcctggtgccctccgttctcgtcgtcgcgccgtcgttcgccggcgagcttgcgctcccgagctgccgccggtgctgacgtcatcgctgccgtcatcgctgacgtcatcgttgccgttccccgtgagccggtcgtggaccgtttgatctcggccgtccgttttggatagggttgatctcggccgtccgttcccgtgaaccgctgccgtgcgcccagtccaccgcaaaccctagccgctgacgcaataaatccctttttccttttcaaaaataattcattattgcgtcataattcaattaaaatccatataagtgttttaatccgatttaatctttaaaaattcataactaattcatttgaactcagtttaatgtggttcaagttgcaaaaattttataaaataaagatctacatattaaaattgtccataaattgaattaaatttatttaattctttttaaatgggctttaattagatttaatcttgtaaaattcataataaattcatatgaagtcagaatgaggccgttcaagtctcataattcatctaaaattataatctacatgtttgtttactttttatgtattgtttatttggtgtttattagtctttttcttggttttgcgtgttagcttgtcgtttccatcgttgcgaaggttcgcgagtgcaccggaagtgttcaagaagattaattgaagaccgattattgcaaggcaagtcacacagatcccaaacacaattcctttgagcatgttgatcctatattcaaattctctatttatttcaactgtgcatttatttttgaatgtcactgggtggtgtgaacctattctttgttatggcccttttgtacttgattactttattccttgataccttgggtgattataacttgactagttgggctatatatatattggttcaactagatattagatataattgcttagccatgcttagaaacattagcacactattgggataacttattattcactattatttaatggtggcttaatgatagttcacgatggtcaatcgtgattggttaattaattacttgccaactaaaacttgataatggtgggttgtgagcacatggttttgagagtcgtgctcatgacaattaaggaccggttcgcgagctactgttgtgaaacattaaccgtgccaaccacaagccagcatgggcaacggctttacctttcgtatagcatggttcattgcagagcaccagactgagaagtggcggagataagcccacgggggtcgctggggagtccatgcctctggtttttgaggggggtgattatgatccaggaatggtgcactgtggtggattgtgttgtgcgaggggtaatgtcacagctcctttccgaggtaccgtggtggtactgaggcacatggtgacatgatgtggggctgtgtcttctgggtacagtggtacacctctggccagagtaaaactattcgaatagccgtgcccgcggttatgggcgggttgagcaatgtttttcgtgattagtctcacacctctcacaataattatggatgctataactggtaataatttgtttagctcctggtttggagttagatctgtacagccgggtatggttgttcagaatggttgggcctgtgcagcatgggtgtgctgttcagtgttgataaaatttctgattaattactccactgttttacttctcttaaatgttttgctaaatgctgcttttgcaaatgagcctatattatgccatcctttggtatcctcgtgcacttgcatatttgctgtgtggcttgctgagtatgtcatatgctcattcttgcaataatcaatcaacctcagttgaagaaaaagaatccagaaggagaagacgtttggcttataccccagttgagctgcctgtgggagtggagccagagcttcgctagattttattttccgctgcagttttcttcatggtgaggactaagtgcctcttaagtaagtatttatcgttttagttaatttgatgaatctgtatattaaattgtcaatttgtgtacctcggctgattcctggacgatgttttcatgcacaaataagttcggaaattactagtgaatttccgggcgtgacacagagtcagcaagggacccgtgcgccccatcctcctacgccagccgtgcagcctggacaaggccgcagagacgttcaatgtcagcagcgtctgtgcttcaactgcttcgagcccgggcactttgcggataaatgcccaaagccgaggcgccagcaaggccaagcgcctccccgccccaacaacggtggtaaggatgtcattcggggtcgtgtgaaccacgtgaccgccgaggatgtgctgacaactccagacgtcatcgtgggtacgttcctcattcattctatccctgctaccattttgttggactctggagcttcccactcgtttatatctgtgccattcatggggagaaatcaattgggggtagaaaggcttagaaaccctctgctcatcaccacccctggaggggttatgacagcaaagtattatagccctgccgttcctatagaaatccagggaattccttttccctcagatctgattcttctagacaccaagaacttggatgtgatccttgggatgaattggttggctcaattccaaggagtagtggattgcgcaagacgcactgtcactctgtaccgagggccggaacaaccggttgttttctttgcacccccaacctctgtcggcagttccgaacttcatcagataggactgtcggaaaccctcatcgtcagtgagttcggagatgtgtttccggaagaactacctggtatgccgcccaagcgagagattgagttccggatagatcttgctcgaggaaccactcctctgtacaagcgaccctaccgcatggcagcaaatgaactagtcgaagtcaagaaacagttggaagagttgaaagaaaaggggtatatacggccgagcacttccccctagggtgctcccgtgttttttgtggaaaagaaggacaagacaaagaggatgtgtgttgactacagagctctcaatgaagttactatcaaaaataagtaccctcttccccggatcgatgatctgttcgatcagcttaaaggtgccactgtcttttcaaaaatcgatcttcgctccggatatcaccagttgcgtattcgtgaagaagatatcccgaagaccgcgttcaccacgcgatacgggctgtatgaattcacggtgatgtcgttcggtctgactaatgctcctgccttcttcatgaacttaatgaacaaagtgttcatggaatacttggataagtttgttgtggtcttcatcgacgacatcctggtgtactcacaatcagaggaagaccatcagcagcatctccgtctggtgttgggaaagttgcggaaacatcaactgtatgccaagcttagcaagtgtgagttctagttgtccgaagtcaagttcttagggcacgtgatctctgctaaaggagttgccgtggatcctgaaacagtgaccgccgtcactgattggaagcaacccaagacagtcactcaggttcgcagctttttgggtttggccgggtactaccgaagattcatcgagaatttctccaaaattgccagacccatgacgcagttgctgaagaaggaagaaaaaattgtgtggagcccgcaatgcgagaaggcgttccaaactctcaaagagaagctggtttcctcgctagtgttaatcttaccggatactcgcaaggacttcctggtgtactgtgacgcttcgcgccaaggattggggtgcgtgctcatgcaggaaggtcatgtggtagcctatgcctcccggcagcttcggcctcatgaaggcaactaccctaccaatgatttggtgttggccgctgtggttcatgctctaaaaatctggcggcattatctcattgggaatcgctgcgaaatatataccgatcataagagtttgaaatacatctttatccaatcggatctgaatcttcggcagagaagatggttagagctcatcaaggattatgatgtgggaatccactatcaccctggtaaggccaacgtggtcgccgacgctctaagtcgaaaaagccattgcaacactcttggcgtccgtgacattccatcggaacttaatcaacagatggaagccctgaacctaaacatcgttagccatggattcttggctacgctggaagccaagcctaccttgctcgatcaaatccgcgaggctcagaagaatgatccagatatgcatgggatcctcaagaatatgaaacaaggtaaagccgctggtttcacagaagatgaacatggagccctatggaacggaaatcgtgtatgcgttccagacgacagggaacttaaacagttgatacttcaggaagctcacgaaagtccctattccatccatcctggcagcactaagatgtgcttggacttgaaagaaaaatattggtgggttagtatgaagcgggaaattgcagagttcgtggccctttgtgatgtgtgccagcgtgtcaaggcggagcaccagcgaccggccggacttctccaacctctacaagtaccagaatggaaatgggatgaaattgggatggatttcatcaccggacttccaaaaacccaaggcggttatgactctatatgggtagtcgtggatcgactaaccaaggtagcacggtttattcctgtgaagaccacctatggagggagcaaactagccgaactctacttcgctaggatcgtgagtctccatggcgttcctaagaaaattgtatctgatagaggaagccaattcacctctcacttctggaagaagctccaagaagagttgggtacccgcttaaatttcagcaccgcgtatcacccacagacagatggacagaccgagcgtctaaatcagatcctagaagatatgctccgtgcctgtgttctagattttgggaagacctgggataagagtctcccctatgccgagttctcctacaataacagctaccaagccagcatacaaatggcaccctatgaagcgttgtatggacgcaaatgccggacaccgctattgtgggaccaagttggggaaagccaagtgttcgggaccgatatcttgagagaagctgaagcgaaagtcagaaccattcgggagaatctaaaggtggcccagtctcggcagaagagttatgcagataaccgacgccgtaacctggaattcgcagtggatgactttgtgtatctccgggtcacgccgctgcgaggcgtacgctggtttcagacgaaagggaagctcgcacctcggtttgtgggtcctttccgtatcattgctcgacgcggagaagtcgcttaccagttggagctgcccgcctccttgggcaacgtgcatgatgtgttccatgtgtcgcaactcaagaaatgccttcgagtgccgtccgagcaggccgactcagagcagattgaagttcgcgaagacttgacctacgtagagagactagtgaaaatcctggacaacatggagcgcaggaccaggaaccgggtaatccgtttttgcaaggtccaatggagcaaccacgccgaggaagaagctacttgggagcgtgaagacgagctgaaggcagcccatcccgatctcttcgccagttcttccgaatcacggcgtcgagattccgtttaaggggggtaggtttgtcacgtcccaaaacgactctaaaatacatcctctaaattatgcctagaataattaaaatctgtgtgaaagcctccaacaattaaaatgtgcaaagttaaaagtcaaataaggcttagaggatttttgtatatttcctaaaagcctaaaatgtgtaaataaattttagtggaattttcagagcacaaataataattaagaagaaataaacaaagttaaaatgattttataaaaagaaaaaccctaaaatccctccttctctctaatgggccgaattcggcccatctccctccccctctttctcctcttcccgcggcccattcggcctccctccccgcgcgcgcgccgctgacgggcgggcccacccgccaccctcgctgacgggtggggcccacccgtcatccccttcctcccgccgctcccgccgccgccgccgccgaatccgccgcatcccgtcgtccccgcgtgcaatcaataggggggaattattccccgtgattccctctcccttggattcgtttggaaaccctccgctaatcccgccgacgccattgatggaacccgagaacgccgcgccggtttccttcccctccggccgctctctcccccttccaaccctacttaaaccctccccgcacctcctccgtccgtttccgcctctcaccg

SEQ ID NO: 5890 - DNA, 25551 bp, Oryza sativa
tgtttgaggtagtaggagagagtgatagtgatgatagtgccagtgattctgattatgttgatagtgactatgatttgtctgattctgatgatgacttgtatgtggacaatattgatgtggaggtagaagacttaactggaaagaagaaaaggaatagtaagaaagctagaggcagtgaactgaagggcaaagaaatagtagtttgtacaaattcagagggagatgatgaggactatgacactgatgaaggcttggaggcagctgattctgatggggataaaagtggagttaagtttaagtttaggtcatttagtaaggaggatgtcaataatccagtgtttaaggtgggcatggttttttcttgtgtagagttgcttaggaaggcaatcactgaatacagtatgaagaatagagtttatataaagcttcctaggaatgatcagcaaagacttagggctcactgtgcagagggttgcccttggaatttatatgcttcaaaggacagcagagctaatgctttcatggtgaagacctacaatggagagcacaaatgctagaaggaatggatcttgaaaaggtgcactgccaaatggttggctggagagtacattgatgcatttagagcaaatgagaagatgacacttggtggttttgccaagacagtgcagctggaatggaatctgacaccatctaggagcaaacttcagagagctaggaggttggctttcaaggccatatatggtgatgagatcaagcagtacaaccagctttaggattatggtgttgagctaaggaggtctaatccaggcagttgtttattcctgaacattagtgatggtgctttagcacattgtatatgtcacttgacgcatgcaaaagagggttcttaaagtgctgcagacctcttatttgtttggatgggtgccacataaagacaaaatttggtggttagattttgacagctgttggaattgatccaaatgattgcgtatatcctataccattagctgttgttgagactgaatctctaagctcttggaggtggtttctacagaccctgaaggaagatctaggcattgataatacttatccttggacaataatgatagacaagcagaaggtagttctctaagctcttgatttatttcttctaaatgtcaccaaactgttttgtgttaattgttgttcttggtttgtgcttgattgcagggtttgattccagctgtgcagcaaatttttctagactcagaacacaggttttgtgttagacacctctactccaactttcaagttcacttcaaaggtgaaaatctgaaaaaccagctctgggcatgtgctaggtctagttcagttatagagtgggtggcaaatatggaggaaatggctactctcaatcaggatgcacatgattggttgaaaaaaatggaacctagtacatgggttagagcatattttagtgacttcccaaagtgtgatatactcttgaacaatagttgtgaggtttttaacaaatacatcttggaggctagggaattaccaatgttaagtatgttggaaaagattaagcaacagttaatgactaggcactttaacaagcagaaggaggctgcagaacagtggaaaggtcctatatgccctaagattaggaaaaaagtgctaaagaatacagacctagctaacacatgctatgctcttccagctggcaaaggaatctttgaggtccaggatagaaactttaagtacattgttgatatcaatgcaaaacattgtgattgtaggaggtgggatctcacagggataccttgcagccatgcaatttctagcctcaggtaccagagaatcaatgctgagtcagtattgccagtttgttatagtgtacaagcattttcaaatgcatatgagttcaatatttggccctgtcaagacacagctaaatgggaaaagacaaatgggccacatgtgaagcctgctgtctatgaaaagaaagttggcaagccaacaaagtccaggaggaaagcaccacatgaggtccagggaaggcatgggccaaaaattagcaagcatggtgtggagatgcattgcaagtactgcaatgaggcaggccacaaccaaaggggttgcaagttgaaaaaagctggactcaggcccaatcagcaaccaaagaagtctattcaaaaccctgaagtcatcacaacagaggtaatgccatcttttattcaatgatttccttctaaaatcaaaacttccatttaccatgacttctctgtaggtgcaatctcaatctcaggtgcaaactcagtctcatgttgaatctcagtcccagcagttgctgacacaggttaacaatgcaatggtatctcagatgtttgaggagtcctcccaagttactcaaatgaacttggcacctaggcctctgcctgacaaccaatttgtcatggcaaacaaaccaacagccaggccaatgcctctaaccacaacagcaaaggaaggaaagctgagagcaacaaaaagaaaggctgcaggtgatggtcctgaaaagagagctaccaagaagaagtagaattgctgatagaactgcataagagctaggctagagagctatcagtactttcttttgtaatgacaaatgatagtgtcaatctgattatggctaccatgtctccttttataattatcgaagaaatggctggcatcttttattttgtaatgccaaactgaatccaggcattaactacatcttcctgttctggctacatattctcagaatgcaattactgattatagcttcaatttctcattctgtttaaattttgcaatgctctactgtcattttgtctgaactttgaaaagttctactgtttgatgtgcacgtgtattattctgagccatgcatgtgtaactgaacagattcaacagagactgatggatatgcacattatttgttcattgcaaacataagaaagttaaaaacttcatccaaaattcagaattgaaatataacattgcttattcacagcacattgcacattgcacttcatttgaaacatcacattttttttctgcattgtttttcctgaatacaaattcacttcacatagcacattgcatatacatcacttaaaccacagaacgatgcaaatacacagtagcagaccaactaaacacacaccaccagctaggaacagcttcaacaacaccatcatcttggtcaaaatgaaaatcatatcttccagctccttgaaatgtccaacatcgggttccttcttgaattcctgagcactgctcttcttcagctcatctccatccttcattttggcctctttcagcaactctgcacaggcagcttcataaatgaagccactcctcttcaggaatttgatgtaggcttcctcccaataccagaaattacaaccacttccatccttctatacatttcacagattgcaacatgtaaatttcaagcaaaatgacaaaaatccacaaagggcactttatcagaggcaagagatttatcacgtggtctggacatgtgaagaaaatgcgacctcgattagcttccgtggtcgcggttagctccaagatctgcttcaccccgcatgaagggcacttaatcagcgggattgagggcctcctcctcttgcgactcgagtggcttgagctgcttgcagaagccatgccgacgacgatgaacacacctcggccgagtgccctccctcgccgttgactctcagccggaagccctccctcgccgtcgactctcagccgccctcccacgccctcactcaccgtcgactctcagccgccctcccactccctcactcgccgtccaggggaaaagagagcagaaaagagagggctagggtttggagaattcgagggaactgaggggcttagatgaaaaagtgcacggtgcgggacggtgcagtgtggcatcacacgtgtcgcgacacgttgctgtccacgtatgcacgaaacgagtcaaagcgttctctggaccggattgatacaataaaacaagattagtgaccttgaccctgtgtttgtatgttcatggacctggatgaaacctcctcacaagtttaaggaccgccagtgcaatttactcttcttttagccaggttatctttcgttagaattactttcttgtgaagaaaccacataaagaccattgaattactttttttcgttagaattactttctttagatgaagtggatgaatgaagctaatatgtcaacaaacgattcatgaaaacataattaagacttttggccccaatagctatacatagctaggtatgtacgtactccctccggttccactgcacccctgctcagcttcactgttttctcgtgtaatagaaatcaccggacgttatgaccctgaaggcctgaacctggcatttctgggaagatggcaatcagcttccctcttttcttgagtccatcctctgttttttttccccctgtggtttcaatctgtacactaattaagaacagaggaagtatgcaagtctgtaaaatgcaaatttggaatggtgcatattatgtactacttgacaattagattacttaaatatctgcttggatgttttcataataaatgcttatcataaacactaaccaaagagtacaaatcagaaccaccttgctagatcaaatccctctcatgagtcatgagaatatattatgttggaagatcttatggtcatgaacccttgacatgttaattagcgcgcgcgtactacgaaataatacatgaatataatccgggttttgtggataatagtaaaatgttgcaacaaagccaaataatactgatgagattcggttgtatcactggtgaccttttatttcgtgattgaatcatcgctgtatgaaaaaaaaattcatacaactgaaattagtttgcgccaataaattatcatgggtagggagctacacaccaatgtgataaaccatgacatatgggtcttttccatgccaactaccatcagcacatctggcggatcagtaatcctcggttgagcaggcagacatctgactgttctgagatatcattttcctgatcccgcgcattccaatcagacattcatatttcaattgaaatggaattaaatgtgaaaaatacccccctacaaatcacttgtgtttcttctttgcctactactacttgatttcgtacattaaacctccacacaagacaatttctcctaacaattgtggttggtctctcgcaacctccttcctcccttctagtatctgccttcccaaatccctgtatgagctaagatgatggcagaacacgatggcacaacttgtgcgctagctgtaatttctataataccaacctatcgaggtggcatgagtttctattgtcccatgacgctggaggcccatgcagcactagaaattgaaataactaggtgaaataattgacaatgggactttggggaagttaggacataaattaacttgttgggaggattttctgtataaaattgagttgtagggggaaatagaaaaactagtgagttgtagggggttatttggaatttcactggaattaaattatgagcaaagaatggcggatttcttttttgaatatttaaatgtcatgattcagctcctgttgtttttgcgtgctctagggcgcataattcctctggaaactcaggatgtatcctggcagaataagagagagaatgtggggatacgtgttacggctactgtacaaaatacaacaacgatgaacccgatcaaagtgaggcgtgctccacgcatgccaggcgtgccaatgttcaccttgctggatccgaatgggcagatgtgctagctgtaaagggtgcgactatataagcactcgagaggaggctagggccgcatagaatttgtaaacagcaaactgaatccccaaactaatcctctgtctcctcaatctatctctgatttatttctgcagttaagggtaaatacaacaagacctagatccgggatttcaaaaaattcaccggttatagatatatattttggtccaaagttgtcaacgctggttcatttggtgcaaattaggagtaacatgcatccgaatggtgcttaactagtttctcttttgttcccgatctgcttaattaaatgcttagcgattaacaagcccaatatcttcttcaatcatgcaagaaattaagcgcatcgattttgcaagaattcaattacttcaaacttttcaattccatttaacagcctctgagccaatcaatgcttaacaaaaatgaatcaatgctattctgtaaccatcatgagcaggcatcatccatcaacaggattcaacaacaatcacattagccatggtacgtgtcagccggttgccacagatgtgcacgctggcgctcagctgccccagctcctcacttctttctcttagggttagatacagatggagtgggttactgatcatatcgatatagaacgctactagccacaacagataaggaattactaagctacctttattaatattatttcttgttcctaaattatcctttagaaatcaacggtgcatattatttcgttgaggtacctgtatatgttgatatgctgatatgagattgatcaggtagtgaccaacgcagtgcttaattagctttctcttgtgcttacgtttttcaaaaaataaataaatgaataaataattagctcagatttgtcattttggtcatatacaacggtcatgctatatagagtcagaacttttgaaactttaactatcattagtttttcaaatgctctatttaaaaagggaaaacaatagtatgcttagttttgccatgaaaaagtattatcatagtataaaaacttattagatattctaatacaaaattgatagtcaaagtttgaaaattgagagattttacggtctcgaggtaccacattttatctctcggtgtgtttggtacgtactaggagctacgggtacctctagtaactcttgaggactgtaaaatttctcattaaaatttcaactcaaattttgctctaaatattaatacttatgagttatgaccggatggagtatatgatacggatctgtatcctcaataaaaattttaactcaaattttgttctaaatattaagcacttatgaccggatggagtatatgatacggatccgtatcctcaataaaaatttcaactcaaattttgttctaaatattaagtacttatgaccggatggagtatatgatacggatccgtatcctcaatactagtgtatacacatcgttcttcatgcagtttgtccttgatatgaagttctgaaaaaaaaaaacttgcggcggttttttaacccattgacctgctctcttgtctgctctggactttcactacccacagatacacaccttcttctcttcttgcccgatcacctatcccttattgttacaagtctcattttatttttcttattaccccatcactgcatgctacaagtgataagctactgcttagctgtgaattctgttaagagtattatgtgtttaggggtatattagtaatttctcatatctattgtactcatatatgtcctttgggctaactcaatggcaattgttaatctccaaatcttatctcaaagtgacatggtatcagagccctaatccaaaatcgccactaaatccgtcatcaccggcgagccatcgtcgtcgtcctccgccgttaatcgttgaagcatcaagcaccagtttttggcctcaaccagcagcagtgaccggtcgttatatccagtactccgagactgccgcccgttgccgttcatcgcagccgctcgtcacggcgcctttttcatcgctgcaggtcgcggcactcgtccctgctgctcctccaccagtcgcatggtcgtcccgcgccatcctctcggccccaaccacgcggcgcttgtctcgctgcccgtcgcgtggatcgaagcaacctctgcgatctgtagcagcaacagcagcggcataccatcgtccagttcgccttcaacacttcaagcagtaaacaagtagcagcagcaaatcaaaatccccttttcatcatcattctctccaaatctggtgatgttctctggcaccgatcgaatctatgatccttgtcctcgagctcctcttttcttcaaacagtagcagcagtgaagttccaagatgcagcaacaagtctcattcccattgtgaatattctgttcttcacccagtggttatcctctccttctccatgttcattcactctctacactaattttgcatatttctgttgtggctctgtgctgctacagcctactatttgattagtagaggagtacatgccatatcatgacataattagtttcattgctcgtcataatcatcttgtgcagctgcctgttccctcaattaattcctactttcagtggtagaatttgttaaaatcgtccccttaatttatattgatccctactgtcaccatcagtggcttatgcatctatcaagggcagggcacttctttcgttgctcatttccatagcagtcaccaagctcatcgcctgtatatatcctcagcattgtgcttgcttgtacactgctgctgtcaaccatctagtagtatatatcctgtgtccttttgctagtatatcaatgtcttctacaaatcaatttcccatgtttcctataaaatctgtcaaagtccattgtattgttcagtccgtcgaagtcatgctagtcaatcttttcccagctccaagtcggagttggtcttcatcataatcatcataccatcgtcaactccatgtcggagttagtattcgtcttcagtttaccagctccatgcaccaccaccctcatcaatcagtgaaggactgaagaacagtctgtgaagttccttcaccatcattgtcaccgtctttgaatcaatgaaaagccaaagaacagtttgtgaaggcttctggtaccaagggctgaataacagtttgtgaaggctcgaggtccacttcattgaggaggggatggttttctcttgttcttcatccaagagcaatgcttcgacaacatctttaaatagggacttcgtatttatagtagtatattgtttatctagtgtttagtttcaaatgcaatgctattgtatatacattgcatttgagtggggctgttaagagtattatgtgtttaggggtatattagtaatttctcatatctattgtattcatatgtgccctttgggctaactcaatgactatggttaatccccaaatcttatctcaaagtgacacaagggagggattaggggaagcaagggattcattccgcacagggtttgagtgacaatgggaggattcactcaatccggtggtttgcttcccattggggatttaatctccaagaatcgaacatgccctaagggtgtctgccacagaaacacatggtaagcaagccagggtcctaagaagcagaggagcataaccaggacaagctgcagtatagatggccaaaaggcccgcccggcacggccaggcccaggcacggcccaccagccatcgagccggcacggcccggcggccgtgccggcccatgggctgcgcctcctgcccaggcacggcccaccagacgtcgggccggcccgaaggagcgggtggcccatcgtgctttttttaaataagtctattttctgtccctcctctatgggctgtgacatctatataacgaaaataagtctattttccatccctcctctttgggctgtgacatatatatatagtgaaaataagtctattttccgtccctcctctttgggctgacatatatatagctaaataagtctattttacgtccctattctttcaattgtggcatataatatgtctatttttactccctattgtttatgtgtcgggcctggcctgcggcccatcgtgccgtgccggtggagaggcccaggcacggcccggtgattgggccgggccggcacgagcccgacccttgacgggccgtgccatgcttgggccgggccaaaacgccatgccatgggccgggccgtcgggcctcgggccttttagccatgtataggctgcaacactaagttgatagttaggttaaacaaagaaactgggaattggtttgtgagcacgttcatggatgggcacaaccatgacctgatatctagctccgacctgacatgtgttatccggtgtcaacgtattgtcacctacgtgcctccttgcaaggtgggtatcaatgaagcactgagctgactttataaaaaaaaccaataggtgataaatatgcgaagggatatctggtctggtggtaatagattttcccagcaacaatcttacttttccggaatcccatatagtcatttttctcgtgtattagtggatctaggacatgatcctcacttatgttactattaaacactagaagaccaattgacagtggcgactcatagcgacgtgagaagcaggccacggcggccagtcgtcaacgcgtgcaaatgttggtcaagcctcctatttcttcagtcttccagatgctattgattctctttttctttcgaacagactttcttgtgtgtacatcttgattaatcttaagaacaaacaaactataatattgatgtatttgattttcatttattttaattaatcttaagaacaaacaaacaaacaaacaaactaaaatagtaaaaatctgaccattgattttcatttaaattggtgggtctattaattttgattgttagatttattttacaagaaaaaaaaatctccgcccggagtccggacgtcagccttcatgcgcacgtatgtacgatccctccaatgttccaaccaccgttcctctcttttttttaatccccataacaattaaaattaaatatttttatgggcctaaaaagcccattagcctattatatctagccaactctttatatattcaaaagtccattaaacttcgatcaaacgctcctatgctaccatgtggcatactataaacgctctcgagtcgccatgtgtcactctaataaaatagtaaaaatctgaccattaattttcatttaaattggtgggactattaattttgattgttagatttattttacaagaaaaaaaaatctccgcccggagtccggacgtcagccttcatgcgcacgtatgtacgatccctccaatgttccaaccaccgttcctctcttttttttaatccccataacaattaaaattaaatatttttatgggcctaaaaagcccattagcctattatatctagccaactctttatatattctctcctaataaatagtccattcaatatcaaataaatatttctaaacaatgtccagatttgttgttattggatatatcccatcatattctaatttgaatttttataggacggaggaagtatatagcactcttaaattagaggaaatcttaaagaaaaataataaaacattcgacaatcgaaattttaggttattagttctatctttttttttaaaaaaaaacatcccaaatctccctccgcactcccatgcggccttaaagcaaattaaccatcttataaatatttttaaaccacccagtgacacttctaaattagaaaaaatcataaaaatttaagaacaaaacatcaaactatggtttcgacgtaaatcgatggacatatcatttaggttgttattagatttttattttaaaaaactcccaaacctcatttcctccctccctgcccctacaatgttaatgacttaaaactacattaaatatcttataaatatttctaaaccactagcgttaaatgatattgttttttgtcataatgtgtaccacatctagtgttaattttttatagacaacataatgaaaataaaaacatgctcagttgaacatcatattgatcgtacaagcatgtaggttggaacaaagaatcttagaagtgaaacaatgatgaggtggccttaccaatataatgagtcaattccatataggaattaaaaatcatgttcatttatttctttttggtagaacttgctacgctccgttgtaaattcctaacatgtagtgtagaacaacttagaaatgtgtatttattacatgacctctatttttaatatttcttactctattgaagtgagataatttagaagagatgactttacctcatgtttgtaggctcgacccacttatgttttcaacccaaattacagagatcaaataatttcaaagatgcttcatagaatggaattctccaaatttctttaaaaaatggacatgaaaacaaacaaaatttatctatttttttaaaacaaattggttttaaaaaccattctaaatagaaatatttaaaatttttgctgcgctaatggaatgaaaatatgtaaaacatcaaatagcacctaacaaaaaaattggacattttgagcaaatgttggggggggtaagatatctacgtaggaagtcaaaattccaaaaatttactcatagaaactacacatattttcgacataatattttctcataaattgagaagtgtgcagtctcgagtaattttagtttagtatttatgtgctgaaggggtaatcagaagaaaattataaccagcattcaaaacacattaaataagttcaatttttattttatgtgcattacaaaggatatttgtaataaaattttacgtgcattaaaatggtgcacgcgcatgtgcgcgggctaccttcctagtttattgaaaaatctgaaaacctcaaacttttccatgtaataacaacataattttagcggtatatttttcaaaaatattctaaacaccaaaatgaaatgtttaaagaaacattttcacacagccacatattagtattgcttagcttccaaacatcctcaaacttttccatgtaatagaaacaaaattttaacggtataattttcaaaaataaattaagaaccacatatatattttttgtggaagtttaagaacatttcaatgatgatatctaaccttttccatatgtgttgtgttaattttgcacatgtacaagaacaaatggcctttggaggcaacggctctcatcggatggcctaataagccaaagaaaaaacctaaaatttgaattttcaaacttaattttgaaatttattttaagatattttcaacgtagtttctttcagcattgacttttaagtcacaagaacatatatataaaagttttacctataaattcatttttattttctaataagccgttttggcttactagaaaaaaaagcgaaacgatggggcccaacaatggaagtcaacaatcatcaaccgaatggagatggcaaaaggatactaatgtaagagtggcaaaatacatagaaatatttttggatgccaatagagagaacatagtagaaagatctctagtagaaatgagtggggaataggataagctcggagtgcaggtaatccatcttttctttgcttgtgtttaatttcaattcttagtgccttcgtctgcaaattaagagaatcaatcattgaagctcaaaagaacgcatcaactctatgttggacaggctgtggacaggtttttgactcaccttcgaaataaagtggagaaagtcgatcccacctccctttggtttgatcaaagtagtcaactacaggaatgtgtttgacttttacatttgaggaaccttgtacatgttccatgaatttttggtgcatgcccaccaaactgagctcttcaacagacccaaggaattccatgccctcaggcaaatcctctaaatttgtcaagcagatgagagcaaagttatagagatttggcatgctatgcttttcaatcactattgaactgacattttgcagctcagccaaagtaagtgtatgaagcttaggaaaccactctgcctgaaagagcaaggtttctccaatataatggttgaacagaccaagaagggtcaggttacagaaattagatagtgatggaagtggatctatgctcagcctgctattttcaagagtcaactccatgagggttagcctatttgcctcaaataggtcagagcctataaccctatcatggagtctacctttcacaaagagtatttcaaggttctgaggtgcaggatctagggcttctaagctgacatactcatcactattggcagttccaataagaaggttctttagaagctgcatctttctgatggatgcaaatagctttgtatagtggatattttttacgtctgtcaacttcaatgatctcagctgtgtaaagctggccaattgttccaccaaattgctgcttgcagaaatgcctgtgaggacatttagatccagtgatcgccataatccattggggactttgacacctgtgaagacatcttcgaggccaaaataagaagcaacagcctttccagcaatcagatggcgtagcatccttagcctggttacgccacgtggaagacttgctatttcagtaaggaagatgtccaaagttcggagattttggagcctgtcaatcgattcaggaagttgcttgatcttggttcgtcttaatcctaaataatgtaaattgaacaagttcccaatgtctctcggcagttttctgattggaacactacctagttccagaaccttcaggtacctagcagtccttgatacccattgcacttttgacacggaggaacaatcgatatcaaattgatagaaagaacgaacacgtgaagcatttatacttagctggactctgactgaattctcatgaattgataaccgacgaggctcgcactcaaccaccgatctctgagctttattatgtatcatgcagaatccttccttttcggatattgaaattgccagctccctgataatgtcatgcatctggagttcccatactcttccaagcttatttctccgagcaacttgaagcaggcagcgatctactagcttttctatgtactccattgcaatctcctccagtgtcatgttttttcttggttcaacaagaccttctactactaatagtttacatagccgcttcccgcgtatcatatagtcctctgggaagatactgcataaaaggaaacagttcttcaagtggaccggtagatgcttgtagcttaaaccaaggagtcgagtcaccatgctgagtccttggttatccaagcgattgtgcaactcccagttcagttgattatagaatttctcccactccatcaaatccagccgtttgaaggatagcaagttgcctactgccgttatagccaacggtagaccttcacacctgccaacaatctgtcttgctactcggtccattgcaggaggacatgtttgatcttcaccgtgccggaaagcccacatgcaaaagaggtcccaagactctgcctcatctaatcctcgtagttgaagacggcgcttgtcttctgccaaagaagcaacatcatttatgcgagtagtaattaccaccttacttctgatgctgctttcatctagaaagccttccaagctgaaccaaacatttgtatcccacacatcatccaagaccatcatgtatgtccttccctgcaaagtctcctggagcatcagcactacgccttcactactcatgcttcctaagtcagctgagcatgtatccttcaatgcacactgtataatcttcctcattatttcagtaatgtcatatgtttgagacacggtaacccagatctggcaatcaaaacggttcttgctagctttgctttcggaaacagttttgacaagagtagttttaccggaacctcccataccccatatggaaattattgagcatgatctttcatttgccattagcaactcttgcagcttctgtcgctcatttacaaaaccgacaagtttcttattatgcattatgtggtggagtgtgtgacctttgctatcttcatacctgatggagctggcactttcttcagataagtcaatattgtactgaagtttcaagtttcgaatattttggagacgattctgcacttctttgagttctgctgctattctgcgcaatggcatcacactttcagattttctgaagaagttcttcaacaattccacagatggggtttcttttctgccaaaataatagacaaattcatccaggatgtcttcaacttcaaatgctatctgctgaacttcctgcagaaaggtttcagcctgcctgctggagctttctttttcttggccatcttgcaggaaagattgcatcaacctaaactcacttctaatttgctttacaatgctttcaacctcaattaaaactgatacctccttccccagatgtgaaactaatgcctgcgtcagatgtgaccccaatattgatccaattttgcataggattccaaacaccacagactctgccattcagtgctcgatctctcagttcagatattttcaaatgcaagacctgaaacaaaatgaacaagcatccaataataaattttcatcctacaaattactttgtaccagagttcttgaaaaattgcattaagttaaaaaataacagaacggttgtcatttcagacttatttcacaaattttttggtgccagatgtatccatgtaacaattcaaataagaaaccggtgaagtttaagtggcatataaggaattttctcttcaaataaacagatgctacacaatctaatttctggtccaatcgaaggcaatatactctttctttttcagccttttttatgtaaaaaacatggaacccaaaccacaaaaccacctataagcctatacataagggagagaaacagactaaataaggcaagatagaacggagaaggtacatgaattacctgtgtttgctcgccgaagcttttctcgcagatgggaattgcaatggcaaagtagacgccctggaggcatttgatcgaacagttggcgggtggttgaactgacgaccggccagagtgtgcgccgtggtttgcacactatcaatgggaacctggtaaacccatagacacaccaataatagtgatgtcggtagtttatttagtgtttagcatctaataaaaagtggcaacttgcaccttcgaagaaattgagagcaagaaagctgcatgtttcctaccgaaatccccattcgagggacaaccgatcaagatgtcaattgcagcttggaaaggggaaatggtttaaatggagagagtgggactggcgtgtcagcctaggacaagcatataatatactccctccgtcccataatacaagagattttgactttttacttgcactgtttgtcccctcgccttattcaaataaaatgtgcaaatataaaaaatgaaaagttgtgcttaaagtactttggataataaagtaagtcacaaataaaataaataataatttcaaaattttttgaataagatgaatggtcaaacagtgcaagcaaaatgtcaaaatcccatatattacaagacggatggagtattttattaagagtgtatttttttaagttcattttgtcttaatatttatgttggccactttccattgagtaaatttcacggaacactacaattttcagggaatctgtatcactaccaaaccacattcaactatcggttacctgataagaaaggctcaccggtcagtgactagccgtatacccccccttgtgcgtctgatacgcaggcattcgctggagccgaagttagcgaatcagaaacgacaaaaaaaaaaaaaaaaccacgctaagcttttttcaggagtagcgtcaccagacccatgtgcacaacacgaagacaaccaactctttttgaagctcacgtttgcttgcctgcctacttcggtagttcggtcttttggttttcggcccaactcgagtttacgacgtatataagaagttccaaacctagtatttgcaatgatgctctgattttctgcatacatatacatgaatatattttttttatctaaagtgtgatttcaaatcttttattaaagaaattagttactataaattctattactagatataaattttatcttagggatgccaagtcttttataatattttcttattatggatgaaaacccacaatattttttaaaaattatttctatatgtattttatgtatgttaactttacatgtataaactttttatatgtaaactttatatgtacaaattttatgtatataaactttacatacacaaattattggtagaaaatagtttgcatacaaatcacaaagctgcatccgcccatgaacattttgcacttttgaaagatcatgggaaaaaaagaaaaacaaaaggtgcaaacaacgggagagggccaatgcaggaaaatgtccatccatttagccctaagaaaacttcaacgcatgcagaccatatgctgaaatccagaatgggagacggcccatgtgcttaaatgcagaaaatagaaatagcatgtttgcttgttagacttttcggaatcaaaccaagagaggaaacagaacgctatagttgaaagagaaagtgggacgttcgcgcgtgtgactaatcaggaatgcgcattagtcgttccgccgcttccttcctatatgccattcacccgtttgccccgaaaaattatgtagttgcaaacctaaaaactagtctatagtaagataaaaaaaatggggcaattacgcatctgagcttgttttgaagcctaactactaatttgaccctctttaatcaattttgtttattttacccttcttttcaaaattgaagatccaatcttaccctattctgttcagggtatataacggtgttaatttgagcaaaaaatgtctcttctacctttggtcatttgaccctatttaatgtctcttctacctttggtcatttgaccctattttatcagaattataaataaaatatatcaaaattttggatagcaaccaaaaaaaatataatctctttgccacggcggcggcgtcgccgacccggcggcggcgcacccacggaggaagacggaggcctccgcgcgcggggagggagggagtgagcggcgccctatgctcttcgccacggcatcgtcatcgtcattgctgaccatcggcggcgcgcgcatggaggaagatggagaacgacgcgcgcggggatggagggagcggtgccctgatctttgccacggtgtcgtcatcggtgtgcgtggaggaagacagaggctggcgcgctcggggagggagggagcggctccctgtgatcttcgccgcagcgtcgtcgtcgttgccgacccgggggcagtacgtgtgtggaggaaccgaggaagacagaggccggcacgcacggcgacagagggagcagtgccctgtgaggcgctggagctcgccggcgtgcggagggcgggcggcggcatcacgcgcacggagaaaggaggaggccggcgcaccgaggacgagcagtgacagcttggcgccgaaactcgccagctcacgggagaggggcgccgctagatctgcggcttgtacgcccagcctccgccggatccaccgccacaacttgagctccgccaccgttgctcctcctcgtcgtcatcaagctgccgccgctccttccgctcgtcgttgctgctggtccttctgctcgccgtagctgtcacctgtcctttctccgcgcgcaccgcctcctccgcgcacgggctgccacaggtctgctacctccgcgtgcgccaccacaggtccacgcccctccatcaccgctcgtctcaatcgtgtgccgccgccgccgccgatagacaagatagagacgggagtgaatggatagggttagatgtggatggggtttcttcagaatagtttggtcaatacgaataataattaaatttctttttttttcaaaaaaatgaaactttaacggtgtagtggaaacagggtcagacggagtattcatttttgaaaagcagggtcaaataagcaaactaaaaaagtaggatcagtttagtactccctccgtattttaatgtatgacgccgttgactttttagacaacgtttgaccatttgttttattcaaaatttttgtgcaaatatgaaaatatttatgtcatgcttaaagaacatttgatgatgaatcaagtcacaataaaataaatgataattatattaattttttgaataagacgaatggtcaaactttagataaaaagtcaacggcgtcatacattaaaatatggaggtagtatttatgcttccaaacggagccaaataagtaattgtgcctaaaaaaatagacttttaagatttgcactatatatttttccataagtaaaaaattttactactttcaagtatttgcactatatatttttccctgtttgcccttgccgaaattcttctactgttacaagttgaacttgttagtgtgctacggctgtatattttccaagtttgtcctttctgaattttgaaggcaaagtattatccttccggaaacctcattgatatagttttcatcccaacgtcttccgtgacttagaaaagtactgagtacagctttattgaaaaaaggcgtaatttggagaataggggatggtgacaaggtgtatatttggagagatcaatggatcccaaaggctgctgggttaaaggcaacaggcaagaaagagaaatcgagattaaagtgggtatctccactaatctttttctaggatcgaacagcaagaactaagccaaccagggagggtcaatggttgtagtatccaaaaccaaaacttttagcgaaattaaaagttaccctcgaatcgatgacacgtggtctgactagggtaaatgcgctggtctaaccgcctggacaccattggtctaaccgtagtagtcactccagctgtctgaccgctgtaatcagccgccatcgcctatagccgccgccggtctgaccgccgttaacctgccggtctaaccagtccgacgccattcgtctttgccagtggaccgctgagcctgagcaaacacaaatcgaagaactctcaaagtcgatcgcaactttattactcagatctgtgtttacaaagtgcaacaacagtgctcctcacgaaatgtcggctaaactcgaaaccctagctatcctctcaactcaatgctctcttaaacgataccaggaggccacaccctccctctctatatatacacgaggtaggcagcctaaagccacgaaccaaacttgtacaagatgttctaatcctctaggaaaccttctcgtacaagaaactaactttacaaactccaattgtaccaaatttagacaccctccaattcgaccagtcagatcgtgggctggccggtctgaccggtagcacctgcccagtttgaccggacccgacaatctagcagtatctgttcatcacctgcaaatcactttgccaataatctccaaatattaaaaccaataatcttatatgccaattgttcatcacagaataagaatcaaacacactttgattttacacttctacaatcatgatgctgattaaatcctaaaagtcaagccttcaccgagaatatctgaagattttgttacctggcattacgagaaaaatggtatcttttcaatatgcagtgcttataaattggtgctagcagaaagagaactaaaagatggaagttcttgtagcaatgctactgatgggagtagacattgctggtacatggtttggacagcaaacgtgccctagaaagttagagtgttcgcctaccgcatcgcacgagacaatctccctacttaggccaataagtttcaaaggcaattagtgacataagaaaagtgcacgatttgtggatttgaaattgagaattttcacacaatggttagatgtacaaaaagcgaaagctctgcgacatgctctgtgcaggatttgggctctcctaggggaaagctcttttaatttttttggcgtgattgctggaaaggttgtctatccttcttatccttcttagctctgtaccaactaactcttgtcatatccttgtgctgttttggggagcttatagtatttacgtaatgatattgtccatggcaaaggtgaggagatggtggcaagatctgcaatgttcttacagagttaccatgactcttttgcacaagccgtggtacaagaacctggtaaaaaggtaaggcagttttgagtgcagtataaattaattccccaaacccgaagataaatagaactttgggcgtgggttgcagctcatgggaattgccagaactggttgggccaagattaatgttgatggtgcttttttgcaggctcatgcaatgtggtatagttctggttcagtcttgttatcatatttgaagtacattcgccacggggcagcggtggaaaaattagaattgttagcttgcagagatcaaggctggcctcaccaacgagcacagatcgcggctggcgagcaagccgaggatggctttccgtccctctcccagctgccaccaccttcacctccccttccggtgacgacctcgaggctggccatcgagcttcgacggggactagatcggggcgtcagcgcgctgcggccgtcctgtccacgtcgcgagcgtcctctgccgacagcctccagatcaaggcgacggtcgtcgagctcgatcaaggcgacggttgtcgagctctccggaggatcgagagatggcgacgaggtcggtggtgggcagcgggggatggcgacgagccccgcggaaacgcagagccgagggtcgtgaccttcttggcagtgtggagaaggggatgacagcaagctcctcggtgcggcgcggagctgggaagacgggggatgatgggctcccttttcggtcatcgagacgggctccatttcctcatcacccttctccctttccctacccaggcggtttctccctttcccttcctaggcggcacaggcaatggcaagccatgccctccacaacgcctctcctgccttctctccccatgccaccaaccctcgaacaggctgaagaacgagtgaccatctttggttccgcattcttcgtgggaccgcacgaggatgatgtggcagcgaatctttgatgtggatggccaaggccgaacgccaactatatgcattatgcattatgaatggacttaatagatggcaggcagtaccgcggtagaggcggccatgcgtaggtacctagatgagctaccgcgcgcgccgactgcatcgacgacctaccgtacgatcgagttcattgccctggaagtcgcacgtactcggactctcgaagcagcatgttagctcgttccttgacacactgcaggtggctctgtatatttatctgaagagctgccgttgatatttgcactgctctagcatttgtgagttagtagctcttatatactagcacatcatgtcgcgcattcaccacactcgttctaaaatcatgttattcgttctaaaatcatgttatgtggtagagtggcaatctatatatctcttttaggtttctggttgctcgtaaaaaaacatgtatcggataagtgatattgtatatgctgaaataataaatgatttaaactttaaatatatgcaaacttttacatctgtatgagttatagtcctatagttgttttcgtcattacataattaacccccttatcctctccttattttttttgtgtgcacctttatatccgccacgcatatattttgtaagtttttaaggaatattttagttttgttttaaattagtgtggaagtcattaaacttatatttgggagaccacgacctcctcgttcgaaagaatatgtaggtccatatagcaatttttatctcaaacacattaataattgatttttagaaacataattaattatatgaatatacattttgaatatgctcttaatagttcgatcttgccaaaaatagtttttcactataggtgcaaatggtaaaattatatatgtaactttatatcctctacttattctctagctttctctttcttttctacctttcctgttccagtagtttccgaaagcctcttgaataactttttttaccatctgtcaaattcagtggcgaagattcattcactatcttttatctttttaaaatctgtagtttgtgataaatttgatattaaatttataatactgtgatgcatcatcttaaatctatatttttgtgataatttgattaatatacctatagttttatgaaatttacttaaaacaaagaaacaaccatcagtgtctgcttggaaggcctgttttggacctaaaatcaacgtacatgacagccccagaaattgttcaagttgggctgaagaacgttgtttagatgggtcatttctagaattacaatcccgagttgatcccaactaccaaaaagaaatatctcctggagtcgtgaagggctactccgctctccttgtggcttcatggaggccatcgcccgcaaggaagaatcgataaatcatcttattacagccttcacgattatgtcattacaaccatgagtccttatcaggaccttgccatggactgatggttgtaacgacatgaattgctgatgccactcattccaaagccggggctgtttctgttgtcccagtgggatgttcatcaacactgaaattataaaaaattcatctctcaagacttttgtgtgctctaattaacccccaagtctcttttgcagctgaggctatgttgtagccaaattgaagggaactgaaaaatgattgggaggggttcatatatagagctgagagacagtgagaccagaggcgatcaacattacagggatgagatcatgagagagcaatgacccaccctgtactattgcacgatcaactaagtgatgaatggagctaatatatcaacatgcttttcactgaaaaataattatgggtcttgatccactaggcactagatatatacatagctaggtagtaacatgttgttcgctttgggtcatataatgctgtaatcagatcgcagggaaatgtgtaacttttagcaactactacctccatctatctatctatctatacctatactaattgagcactttctcggagcttccacgttaatcagattaatctggccattgattaactagatcgtaaaatcatgaccatagattaaatattataaccactagccgtcaacctgtgcgttgcacgggttactgtgactaataattaaaatattattactttcactggataatgataaaatatgttactttgaatgaagctgatagttgccaaaatcttaattagtaatttcatatataatccattctaatatttcttctattactctattttttcaaaattacataatttaaaatttcaatattagaaatatagatttatactcgttttgttgctcttgttagcatttgctataaaataatttagcaattttgaattaataagtacagaaataaacttagtttggagttaagctttttcatgatttaatgattcctatattcataataattaaatatcaagttgtattctgtgtggagtctcaattataacatcttcataatttaattttaaaattgctaactaaaaatattatactcggtttga

SEQ ID NO: 5891 - DNA, 4852 bp, Oryza sativa
aacatctaaccattgatttttacttaactcggtggacccatcagttttgaccattagtttaaattctcatctctccaccctaatatacgatggttgcatgatttggtcccaccaaaataattagttaagacttaagagcaaacaaacgcagagaatcagttatttctctcccaaaaaaatcaccgcagtattaattcttggaaagaaaaccgacgttgtaggtttaatgcaggagcctgggtgtgtgcttccatcatccaaaaaattataccatcgaaaactttttaagtgaatatcacctttgcatcaaaaaagtgaatatcactaactgctctaaactatttacagagttaggttcggattcatgaatattgccctcaatagttagtttctgaattttcatgtttctgtttgattaccagggcctgatgaaattttcacggatgctaaatctcactatatcaaattctcatctctcctccgtaatatatgacggtttcatgctttggtcccaccaaaataattaattaggagtaaacaaatgcagagaatcagttgtttctctcccaaaaaaaatcaacaaataaattttcagatgcaaagccataggaaaagaaagcaatgcgcctctagcttactttttcaaccaatatcaacgacatccatctacattttttctggaacaagcagcaacaaccaaggttgaaacaatcctaatcgtatcaaacaggcgagtgatgcaagcagcaacttccatctttttattgtttgatctcttaacatagccttccactcctctatttttttaagcatataatttcgcttttttacctacaattttatactacgtactccttggtgatgttgttcgtattctgatctgtcgctactagcttctacaacaaagcgatatatcaaagctcttgcctcttggacaatatattcactaattaacatcgggtatttgggtgctgtcagtttaattttgagcacttagtcaagacgtcttgatgctgcgtgctttgccaccagaaatttgttaattgattttttggataatcattttggaagggtaatgcatgccgcttttttaggagaaacatattacaaacacatgagtttatatacacacgcgtacacttatccatagaaaacatattcgagagactgagccaatgatatatcttcaaattagtgaagtcatcataaacgcctcgctattgataggaacgttgtctactacaagaataattagccataaatatgagacccatgtcaagtctagatcttaaacctaggtgggtaagttccaccataggtaactaaccagccacactcactaattgcagataatgtacgtggagcccctcttccctctccttaactccttttttccatacattatttgagataaatgtagtatataaataataaataaactattgtaatttttaaattatatatacaatttttttattcgaccacaattatattctttagaattaaatcagttcatatcgatttgaccgattgcgttatatctcacagccaaaaaaaacacgaaaacatatgttatagtgtcatatatcacattataatcataaataactagaattagctctaatatgtttgaaaataaagtttactaaattatattatttaccattaacttaatattaactatactttaatctgtaaaataaaattatattttaggtcatatttttattcttggtctgtaatccaaacggacgtgaaaattataaaaaaagatgacagtatggagtatatatcactatatattctttatcggttataataatatgtaccattaaattagatttacaatataacaagaaatatgtcatatctttgcgctttacatggcatttgagaattataacaaaacgtgaaaaaacaatttagtgatatgggtaatatcatcacataaatatgcttactatgtagggtgcactctatttggcccatatcagttcacaaatatgcgcgactgaattagatttacaatatcaacaagtagcaagtcacatccggggccttgcatggcaatcgagaattatgacaaatcatgataaaaaataacaatatggattatatgatcatataaatatacttatcatgtggattctaatctatccggactatacggggataatctaaaatgtcaattcaatttaccaaatcatgtataagttgtacgttttgtagactacaccctaaatattaagtaaaataatggattgagtacacgtcgtgttttctctcctttgatttctattaaatacgtatggtgtgtgggtattttgtatatactaagtttggttaattagggaacataaacaatactaaagttatatatgagaattcatgcattaaaaatacacttcataacaagaacgtacttaacaaaaatgtactttagtctatggtgcttcaatatttataaattctctaaacatactaattatttctgctcttatttcaaactaaattcattttctccacataatataagagatcatatgagaaaaaaagaggagggagaagaagtaaatagatgtctgccattaaacagatagaataaagacatctataacatacaagaaaatttgttgattaaggtttataaactccaaatgtaagatatgctaatttctaaaaaaaacacacacatggtacacataatagttccatatgaagcaacactattgttgtgaaacaatagtttctcataaattaaaaaccacatggtttaaataaatttgatttagaatttatatgttgaaaggtaattagaagaaaattaaaagcgacgttcacaacaatctcaaataaattattgataaaaaacatgttcagaatagattaaaaaaatattttaagaaatactcatccacacataagtattcataattaaaattcaagcaacattaaataaggtgtcccgcacatgtgcgcgggcaacctttctagttctaacaaaagagcaaacttaggaagccaaaacaactctagctagtctggttcatggatgatcctccaatggatgatcaggagccacatgcgtatatgcagcttctggtgcagcctagctatgcactgcagaagtagctgaagggcagcttgggcctcgagtagtcggcggagaggatcttgccggcgacgacggcgttggcggcgtcggtgtagtgcacgccgtcccagctcacgaacttgctgccgtcctcgcacacccggtaccccgccccgaggcagctcacgttgaagtcgtagttgtacggcggcccggcatggccgcagcacgccattagcggctcctcgaaccctacaaaaaaaaacgtttgcatcttcttcgccatcaggagatcatcaatggcgtattaattagtcatcatctgcaggacacgatcgatcgattcgagatctcgattgggctagctagctctctcaccgtagctggagtggttggcgatgaggtcgtacttgatggcgaggatgtcggtgaagacgatcgttgcgcccctgagctgcgagctgagctggtcgcagatggaggagagctggctgttgaactcgtaggccccggcgttgagcgttttcaggcagccgctggggtcgaggtcgccgtcgtcggccctcggcacggcgagcttctggggcaggcagccgagaggccccgttccatggatccacaggttcttggctccattgtaatacaaactctgcacacacgtacgatttcagaattaattagcactgacacactgacacaaatcaaacatgaacactgtaaattcaacgattaagggagtgtttagatccaggggtgtacactgtaaagttacactgtaaagtacaccgtaaagttttgatgtgtcacatcggatattatatacggtgtcgcataggtattcgagcactaataaaaaaactaattacagaatctgtcagtaaaccgcaagacgaatttattaagcctaattaatacatcattagcaaatatttactaaaacaccatattgtcaaatcataaagcaattatgtttaaaagattcatctggcaaattagtcacaatatatgtaattagttatttttttagcctatatttaatactttatacaggtattcaaacgttcgatgtgatatggtgaaaaattttaaggctagaatgtaaacagggcctaaggttcacatgtatgtactatgtacctggatggcatccttgatctcggagaggatggccggaaacctctggcggacgacgtcgtcgtaggggaggccgccggcggagaaggcggcggagaggtcgttctggccgatgtcgatgaggtagagcgcgttgcggaagccgtcggcgtcgacggggacggcctcgccgcggctagcgagctcgagggagcgctgcttgaagtggatgaactgctgcacctggatgtgcagggagaatgcggcgttgcggggcgccgtggcggcgccggagatggcgaagttggcgccattggtgaagtcggtgcccaggggctccaggtacgggctcaggtagctcatgttcaggctctcacctgcacgtaacgtttggtgcatacacattgcaaaccaagtataattaattatacacaagcttaaaaaaaaaacataacgcgtgttccaatatatgctcaaaactacttcaaacatgcatatacttagtatacagcagggttttcaatttccaaataaggtttttgccggtggtgaccaaaatttccaaaatcatcaaaaatttgggttttttttgaccgaaattatttaaaaatttgattaattttgaatgaatttgaataaaatttg

SEQ ID NO: 5892 - DNA, 4493 bp, Oryza sativa
attgttgcagaaccgtgaaatgtgctttacggaataaattgttgtttaccgtcattattgctttccttccgagagtcccctttccccgtagtctcccatcatggcgtgattcgggcaccccgattgggcaaaggtctttaataaattctatgcagaattcaatgacctcctgtgttccataccccttggcgatgcttgcctctggacgagcatggttatgaacatacttctttagaacgcccatgtacctctcgaaaagaaacatgttgtgtaggtacacaggtccaagaatacagatctctttgacaaggtgacaaagcagatgcgtcattatattgaaaaatgaaggtggaaatatcaactcaaagctgacaagacattgcatcacatcattttgaagggcttctaatctatccagatcaatgatcttatgtgaaattgcgttcatgaaagcacatagctttgttattgttgcccgaacattgtcaggaaggataccccgaattataactggtagcagctatgtcataaacacgtgacagtcatgagactttaggtttgtgaacttcttctccttcgtgcttattattcgctttatattcgaggggtatccagacggtactttgatgctctccaagcattcaaacatactttccctctctgccttgctaagagtgtagctggctggactcaagtaatggcttcctttcttctttggttccaggtgaaggtcgtcgcgttgttccatatgcttcagatcattacgtgctttcagtgtatctttcgacttcccaaatacacctaggaagccaagcaggtttacgcaaaggttcttagtgatgtgcatcacgtcaattgcgtagcggacgtccaagaattcccaatagggtaactcccaaaaaatagagttcttccacatcgccgtgtgatcatcttcgctctctataggttagctgccatgccccctttccaaacactactttaagatatttcaccatagcaaacactgctttcccgctgcgatgtttaggcttcgtacggtggtctgccttatgtttgaagtgctttcctttcttccatacagggtggtttgcaacaaggaattgacgatagcccatgtacacaaccttcctacaatgctttagatgcgtactttcactttcatccatacagtgagtgcaagccttgtacaccttgtttgactacatggatagattgttaagtgcaagctaatcgttgatggttacgaacagcagcgctcataggttaaactcctcctgtttgtcctcatcccacacggggacaccttctttcttccacaacaatttcagatcttcgaccagtggtcttaggtacacatcaatgtcattaccaggttgcttggggccttgaataataatcggcatcattatgtacttccttttcatgcatagccaaggggggaggttgtagatacacatagtaataggccaagtgcaatggccgctgctcatctctccaaaaggattcatgccgtccgtacttaaaccgaaccttatgtttcgttctgtcgatgtttcaccactacgaaccatcggcggggtgtctcagcatcccgtcttgttgacgttcttctgcgtaccaacgcatcattctagcatgtcccttgttcctgaacaaacgccttagccatggtaatatagggaaataccacatcaccttagcaggaattatcttcttcgttggctgcctgtcaacttcacctggatcatctcgtctaatcttgtatcgtagtgctttacaaacagggcatgcttctaggttctcgtactcctcaccacgatataggatacaatcgttcggacatgcgtggatcttctgaaattctagtcctagagggcagactatcttcttagcctcgtacgttgtctcgggcaatttgtttccctccagaagaatgttcttgacgagtttcaataaatcgccaaatgtcttgtcactaacactatttttggccttccattgcaagaattacagagtggtacccaactttttgtgcccctgttcgcaacctgggtacaacggcgttctgtggtcctctaacatacgctccaatgtatggtcttacttttcactttcacagtccttcttgacgtcctgcaacatctgaccaagatcatctgcagcgtcgttatcgtcaacatccccgtccacctcgcccgttctatttccttcaaatccagcgtactgagcccagtccggaatgttctcgtcttccatttcatcttcttccatttgaaccccttgctctcagtgcgatgtctaacaattatagcttggtatgaaccccgagtacaagtggaaatgaatagtccttgatgttgaatactccttctagttcttgcacttattgcatggacaacaaataaaacccttatgtttgttagcatcggccactctcaaaaaaataatccacgccatcaataaactctttcgaccgctggtcagcgtacatccattgcggatccatttacatgaaatgcaaaaaaaaaatcataaaaatattcaacgaaaatgaaacccactaaacagtgatataataatgacatatcaatattcatagaataattattttttaattatttttgaagttttaaacaaatatttaatgtattgtactccttttaattttcaatttagcttgttttctattattttagattaattttcaatatattttccttctcaactattatataaaaccttttataaaattgtaaataaacaaaatttctatgtattcttcttacctacactgattttctctctcatcaacttccaacaaagttttagatacaataatgtgtacgaaacataggtccaaatgtaatataacaacaaaaaaaacattggaggataaagttgctaaccttttagacacctccgattgtatataatcaccaaaataaattcacaagaaattttgacatgaccttccctcttgtttgaagaattttgaagcttggctcgggctggaggaggaagaagatatatataaaggggttgatatttagtcccggttggttactaaccggagctaaaaatccccgggatctttaggcccggttggtaacaccaaccggaactaaagttaggatctttagtttcggtttgtgttaccaaccggtagtaaagatcccggggggctgacaaggtctgacagcatatgaaccgggactaaagatcaaatagtccctttgctcttattaattgggactaaaaattctttttagtcctggttttcagtggaactcagactattatggattttggccgactgacgaaagatagtttctccaccggtgtgatctaatgactatatcacaacaagccttgttggggacggagtcttccaagtctattagactcaaggagtgggtacaagatgttgaattgttaatgctggtggattcactgaacaaacatcaaacaactttcattcagttataatcagaaggaaaaccaccagaatttcaacaatataaattatctcggagaatagatcgaccatagtactctttcttcgcctttgtcgtttcgtcaaattaattatcgataccacgatatgacaaatcaaatttagttcatctatctatctatcttctatctatctatctatctattatatattaaaagtccatgaaacatcctgaaaacgctcctaagtcgacacctggcacccctaaaaacgctcccaagctgctaagtggcgctctaataaattagataaacatctaaccattgatttttacttaactcggtggacccatcagttttgaccattagattaaattctcatctctccaccctaatatacgatggttgcatgatttggtcccaccaaaataattagttaagacttaagagcaaacaaacgcagagaatcagttatttctctcccaaaaaaatcaccgcagtattaattcttggaaagaaaaccgacgttgtaggtttaatgcaggagcctgggtgtgtgcttccatcatccaaaaaattataccatcgaaaactttttaagtgaatatcacctttgcatcaaaaaagtgaatatcactaactgctctaaactatttacagagttaggttcggattcatgaatattgccctcaatagttagtttctgaattttcatgtttctgtttgattaccagggcctgatgaaattttcacggatgctaaatctcactatatcaaattctcatctctcctccgtaatatatgacggtttcatgctttggtcccaccaaaataattaattaggagtaaacaaatgcagagaatcagttgtttctctcccaaaaaaaatcaacaaataaattttcagatgcaaagccataggaaaagaaagcaatgcgcctctagcttactttttcaaccaatatcaacgacatccatctacattttttctggaacaagcagcaacaaccaaggttgaaacaatcctaatcgtatca

SEQ ID NO: 5893 - DNA, 1875 bp, Oryza sativa
tttcctcacagcccggcctgtgcttaacagcttaggaatactgaagcaggagtaaggtagggacgtagggtaaggaatggtattgaatggacattatccatgatgcaagtagttgctaataatatatacctttattaatttgacgcttcttatgagcttctacattagatagaaagatccgaccattaatgtgatggatagtattatcgtgaatatagatcatgttgagagtacgtgttaaataaatcgtgcaattgaaaatagcataagttttaatttaataattataaaatctgcatttaataaatatgatattacgcctattttggattctcaactcaatgttttattaatttcattccaaaatttgaaattaataatgagacagttttagctgatgtgaactcttctcgcatataggcaactaaaattttgaaaaggtaccctctccgtcccataaaaaacgaatttacgaccagatgtgacacatcatagtattatgaatttggacagatgtattgtctccgtccaaaaaaaaatccattcctagcattctgaggtggaattagtggagatggagaatgactaaaatgtccttaatcattgaaaaaagtagtaagagtgatagataggtaaatggtattgaagggataaaacttctcgttttacgtgttgagggtaggtaaaatggtagaagttggtttttttggaacaaaattcaaattctagaagttgagtttttttgggacggagggagtatgtccaaagtcgtagtaggatgtgtcacatttagtattagattggttttctacgggacaaagggagtaaccaacatatttaacaaatattataattttaatatttaataatattttgtgcaaatgcatgattgatgactagttaatccacaggaatgttcaggattgacatgccaactactccctctgtcacataatataagagattttggaaagatgtgatatatcctaggataacgaatctagacaaactccctaccagattcgttgtcatagaatgtgtcacatccctctaaaaatcccttaggtagtgtttggtttcggaactaagtgggatgggatggaaccatccctgatttttgggttgggatgattccaatcacatgtttggtttgtaagatgggacgatcccaatttttttgtttggttgaagggatgagaaagggaagggatggacaccgtttgcaatcaccgtcaaccgatcgccggatctgccgccacagtcctccccatcgccggaggaagagcaagaggatgagccggcggcgagcaagagcaagaggaaaagccggcggtgagcaagagcaagaggaaaagccgtcgccgctcctcccatcgccggatccgccgccgcccctcgtcctcctcctcgcacgccgccgccgctcctcccccgcgagctcctcctcgcgagccatcgcagtccccatcgccgaatccgccgccgcccctcgacctcctcctcgcatgccgccgctgctcctccccgtcgccgaatccaccgccacagtcctccccatcgccggatcagccgccgctgccctccccaccactggatccgccgtgccatcgccgatgccccgccgccgcggtcgtcatcgccgagccccgcgtggtcaccgtcgccgagcctgccgctgtcgccgtcgcccgagccgtctcccgttgctcccgagggcgaacagcgcgagcgcggtaggaaggcgttgtcacgccgttcgctcgtcccaggtgggacgagttcgtccgccacattttccccgatcagatggttccggatctgagaggaatattcctcttcagggaccaacccattccactcaccccttaaccaaac

SEQ ID NO: 5894 - DNA, 5541 bp, Oryza sativa
tttctttttataaaccttttcaactttgtttatttcttaataattattatttgtgctctgaaaattccactaaaatttgagggctccttttagaccaaggagaatttaacaaaaattctccgggccatatttgaatttttcttgtacgtattttagtgtttgccaatttcttttcgaattttaattaattctattattccttttagaagatgatttttattttgggatgaatttatcaggacgtgacaccctacaaccaactggcagtttgtagccgaggccttggaatcaaagagacaattccccttaggcaagattctcctcggctatttgtaccaaatgctgaacaatgcatcggctaagatagccgtcggctcagtagttggagcaggtggaccatggtggctgttgcaatcttggttgaatctaatggtcatgaaattcgtcaatcggccatccgtgacagaagccgaatttccaagactggagccgattgtggaagatgatggagaggaacgcacccattgtagatgtacatcttatggagaatatgcttccacaccagccgatgcaggagcaaagctatcagctgaactgctcaaggactggttctgcagtttttatgatggctttcagaaagacactcagatttggttcccctatgaagactcgactctcctggaaaatccatcggactttagatttgaggatatcaatcatgaaagataccaaaagtccagagaagttttctcggctgcaatcagtccatgcatcatccctgttggcattcatcaaggaagaaatatccatgtttcttatgagttttatcacccgatgagctctgccagacaacttgcgatgggtcaattaccaatcggcttgttctttgccgataaaatccaatgccgaggggaaatttcatcaactttgatggaccgactgctcaatctccaagggccttctcttggcagtattgaaaatatagagctggccaggttcaggagcagatcatttgacagatggtggggtgaatggaagttgcatctgttccaccaaccggcctcaatgtacatgacagacctctttcctgatgttatacctcaggtaaacggggattctcattaatttcattcgaacaattatcaaccaattcataacttaactaattttctcttatgttttgcagacaacagaatcctcgcctccacatcaaagcaatagtggcagagatatcgaatatgccccaggtttaattccaaatggaggtgggcccatctcctcctgtcatcggctataatgcccccaagacttcaactcttcttcaagggctcatcagagaaccagccgatgctagtaaaaagagaagaaccaggtcatcggttgtggacacatcttctccagccccaaagaagaaggctaaattaaagaaacctaatccagccgatgatctgcctgcccttgatccatccgttgaacaagctctagaagaagaagagatcggagaggatgttgatcaagctgcaaatgaagtaagtgatactgaaagaacaccatcggcttcacccaagcaaactcctccaactccttctgccccagctcatttctctagggtaaatatctttccctaattcccttttataaccattttatccttagccgattatccattaatcttgtctttgcagaaaaagagaattgctgtgaagaaaaaatcgacagcaccatctctcaaaccggctccactagtaagatgttcttaaacttttcactagtcgatctcagccgatattgtctaatacttgtctttttcagcctcctcctccttcttctcctgtccagcaatcatcaagcgataaaactccatcggctgtagggagtcaccatattcaagaagaagtacaaccagctgctcctgctatcccagtaagtttcttttaagcaccaagtcttagatcggctatatctgtttgtcatctaattgtctttaaatttctcttttgtaggctttagccgatctgttttcttttgatatcaaagattactttgatgagacagaagaagaaactacaagtaaggctctagcccctttggacgacactgtcaagaaaacacttgaagacatatcccttcagctagaatcttcctggataatctggtggctgattgtggttcaatccgggcacgatttgctgaaatccaagcctcaattctggacgatctggtaaacaccatcactccagccgtgtaccttgaacaacaccaatttaagctagagaaggctaagcaacggatagccgatcggcgagaacggaaaaacattgaagctactatccaagccaatcagcagcttgtgcatgaagagaaagccaagttagatcaactctatgttgggccaattcagtcgaatatagatcggcttgaagctcgcaaaattgatttaacagctcaactcgaagaatgcaacgccgagctggatctagaaaagcaaaagctatccgatctaccaaatgccattgaagaacaaaagtccagattgagatcggctatcaagaatgtggctgacatgaccaagtctctcaaggttatccctggaaccgatgctcaagatgcccaagccatcaaagaagtagagcaaattaggcaacgggctgtttcggctatccagtgttttttgtctcagtaacattctgtgtaatagaatctaggaatttttgtaatcggctaagaaactctgactctttatgtaactcatcttaataacttttatgccgattcaatgtaactccacattttgctcgaaaatttgcaatttctcatatatatgtgcccccttaattttataatgtcaaaagcattgataaaattataaaatcaactaagggcgatataatccatatcggccattgtacatcggcaaaccacaaccgattacaataggaaaacaactaagggcgatataaccatatcggccattgtacatcggcaaaccacaaccgattacaataggaaaacaactaagggcgatataaccatatcggccatctcaaggcaatgcaaatacatcggctatcatgtatcggcaacaccagccgatcatgtattaacccaaacacttgggtaatatttcttcaagtacttgccatttagcgctcgtccatagatttctccatcgagtccttgcaacatgtaagctcccttagacacaaccttatagatttggaacggtccttcccaattcggtgaccacttgccgaatttgttatccccagtcccaatcggcaaaatcaacttccataaaagttcaccttccgaaaaagtcttgggtaccactttcatgttgtaatgccgagcaactcgttccttatccttggtaaccttcgcaatggctcttaatctagattgaaccaagtcttctctttcatcgaccatgagataataatattcatcggctgtcaaatcattttgcaactctgttctctgtgaaccgattctaacctcccatggtaaaatagcctcatgtccataaacaagcttataaggagggacttagatcgacccatgacaagccatccgataagaccacaatgcttcggcaaatcgagtatgccactgccgaggataatcagaaatctttctcttaatcaacttgatcagactcttgttagatgcctcggcctgcccattagcttgtgcataatatggtgaagaattcaacaatttgatacccatctatcgacaaactgaacaaactcatcggacacgaagattgaaccttgattggttgtaatggtttgaggaatatcaaaacgaaagattatatgctcttgaacaaactgtatagcatccccggaatcaactttcttcaaaggaatcgcctctacccacttagtaaaataatcagttgctaccaatataaacttatgccctttactcgatggtggattaataataccgatcatatcaattccccaacctctaaacggccatggtttaatgataggattcatagccgacgccggtgctctctgagttgctccaaatttctgacaatcttgacatccgttgcaatatttgaaacaatcttccacaatagtcggccagaaataccccgcacgtcgtagcaaccacttcatcttatgagccgattgatgagtaccacaaattccttcgtgaacctcaccgattgcaaccttagcttgatcggcactcaaacacttaagcaacaccccgtcaatcgtccgataataaagctcatcatccaacaaagtgtacttcaacgctttgtaacgcaatttctgagaagccgattgagatggattttgtaaatatcgatgtacatcatatctccaatcatcggctgttaatgcagcaacctcaaccctgacatctttcatcatcggcttatatcccgacgccccttgggccaaatcattggcttcaatattttgttctcgagatacatgcctcaaagtaaccagccaaaattccttcatcaactctcggcacttctcgttataaaccattaatgtatcattcttgcactcatattcccctgccaattgacaaatcactagcaaagaatctcccataatctcaatagcatcggcctcaacttccttgagtaactgcaaccctttgagaactgcttcatactcaacctgattattagttgcataaggtttaataatataaccaaactcaaaacttgccccccaaggggaaattataaccaagccgataccacaaccatgagtgcatactgatccatcaaagaacaaagtccatggcacaacctcaaccgagccgattgaatcatcatgatgttcaacaataaaatcggttatagcttgtcccttgactgccttcggtgactcataccgaagatcaaattctgttaaggaaaatatccactttccaacccttcctttcaaaattggagccgataacatgtacttgacgacatcggctttgcatatgacagtgcattcgttggacaatagataatgccttaaccttgtactagaaaaatacaagcacaagcataacttctccataggggaatatctagtttctgcatccaagagccgacgacttagatagaacacaaccctttcctttccttctagctcctgaattaataccgagccgattgacttctcaccggctgacagatataatctaaaaggtatccctttctgtggaggaatcaaaactggaggagagctgagatattccttaatactatccaaagctttctgttgctctgcccccaaagtaaacttttgattggctttcaatctcaacaatggtgtgaaaggttctaatcttccagacaaattagaaataaaccttctaacaaaatttatcttgctgatcatctcctgtaactccgtcttgttctctaggggctgaattttcttgattgcattaatactcctttgagttacctcaacccccctctcatgaacaagaaatctcaaaaatttgccagccgatacaccgaaagcacattttgtcggattcatttacaagccatatttt

SEQ ID NO: 5895 - DNA, 35818 bp, Oryza sativa
catgtcgaccgtcgggacgacgacgccccgcccgcgccgacagaacacggcggccgcagctgccgccgccgcctcccggcggccgcattccggcgcagcagcagccggcaccaccatggcgttaatgttgctgctgtggctgcttctgatgctgctcctgcacttgtgctgttgtgcagatggtggcattgttggtaaaggcgatatatataaggaattggttgtcatatgtgttcatgtggagattcctgtggaaatgctgaccataggttctgcatttgacctggtgtccttaagctcgatagtaattattatgcaactttagtttaagtgttttatatataaacttgggaatgatcgatcagacctaggaggtagctagttagacggcctctccaatcatctgaattgcaggccgttaattattatataatcttatgccgctggctagcttgtgtacgtccatatacatatagaaaattttggacacatcggatgtttgacactataattaaaagtattaaacgtagactaatgacaaaacctatttcataacactggactaattcgcgagacgaatctattgtgtctaattaattcatgattagcctatgtgatgctacagtaaacattctctaattatggattaattagactaaaaaaattgtaaagcagattagctctcatttatacaattagttttataagtagtctatgtttaatactctaaattagtgtcaaacatccaatgtgagaggatacaaacacccgtggacgtcaacaacaggatgatgatcttatgtggctagctgtcaaatgggggcctaaattctagccgacgtaaataatcactgcttttgcttaagggttgaggtcgatcaccacgaaaaatgtgaacttgcaatttttttagggaacctcaaacgcgctgtgtttttttttttgttagtcactactagagaaccccacatctctcggttcgcaaccccctttactcccgggtaacgaaccgggagagagaatccgggactaaagatcgtcccggtttgagtcaccaaaccgggagtaaaaataaaaacgccacgtgacgctttctgttttcttttctttttttattgttttttgctaattttatattgatttcacaccgagctcaaccacacagacaaaatcatcaacaaattgacatcacagattcatcttcaacttcatagaaacatctaaaaatcatcaacaaattcacatcacaaaatcatccacagattcacaaaaacatgtaaaaatcactcacaaatttacatcacaaaatcatccccaaaatcatcgccaagtcgtcgctttcggattgcccgccgcgtgtgcgccgccgccagctgccttcccatttgcgccgcctcctcctcccggcgcgcccgccgcttcctcctcccggcgcccgctgcttccaccgccgcgccatcgcccgctcccgtgcgcgggccgccggctccctacactgcagcgcaggccaccactgctcccgcccggccggccgccacgcccgctcggccgccgccactaccgcccggctggcgccgccactccagagaggggaatggggaggaatgggaggggaaggggagaggaagggaaagagatggagaaggagatggaggccagcgcttttaatgaggggagcagagaggaagatgacgttgtttaatgaaagcaagggggagggataatcggccggataagatccagatcgatggcgtcgggctcggggtgctctttgggtcccggttggtataaaacaaccgggacaaaatgtctacttttagtctcagttgtttataccaaccgggactaaaaataatttgggtctgtctcaaacctaacaacttcttgaaccgggactaaaaatgatctttagtcctggttggtaaccccagctgggactaaagatcaaaattttttagtcccggttctatttccggttcctattagaatcgagtctattgtggaaatcggccgacccaacaaagatcacttctccagtagtgagggttggcaactaatccccgcacaaacaaaacggagcgactcattagcacgtgattaattaggtattagctattttttaaaataaattaatataatttttttaaaaaaacttttgtatataatttttttaaaaatacaccgtttaatagttttgggaaatgtgcgtgaaactcatcaaacgaacacagccaataggctgcgttcgttccgttgcgctgggaattaatctcttcggcacgtaaaacagagcgatttattagcatatagttaattaagtattagcttttttaaaaaataaaaggattaatgtgaatttttttattaacttacatacataaattttttgtaaaaaatacaccgtttaatagtttataaagaagagcttgagttgagaaagccaacaaaaagaatacaaccatatatagaagtaaccataaactaacagcgttgcagaggatcatccaaatcctgaagactgaagaagctgtcaatttatggtgtattagctagataggtccgctctattgccgtcctcagctagttttagccgatctcatatttgtttaagcagccggactgccgagcatatatgcataatatattttctgacggctggggttcatgcactgccatgcatctggtcgacgagtccatggcatgcatgaatcatggcatctggtcgatgagtccatggcatgcatgaatgtgtgagtaatatattggtgcttccagatgacacggcaggggaaagggagaagagaacatactactgtatatattatgcattcactatttgtacccaaaaagagaaaccctgtcctcactgttagcctgtccaagcttatgctggtttggcgtttctgtgtccacattttcttcttactggcctgctaggctgcgaggatactgcttctttgctcttatttttttcttcttaagaaatggatctgtctgtttcaatagccgacatatgcgtttaagaaatctgtgtcaagcttttgcaccggcttccgtgtataatgtttgaccgtccgttttatttcaaaattttataatttttttaaaaaaattaagtcacacataaagtactattcatgttttatcatctaataataataaaaatactaatgatagaaacaatctaataagatggattgttaaacattagacagggaaactcacaactgcacttaaaattggacgcaggaagtatgctcttttttttaaaaaaaaaaaaactatagtttgtttgctatcaagcgatgtatatattgtacgaattaccactagtaggaaaaccattttcctagacaaattactaccatttttctagcctgcaagatgggaaggggaggctatatggccgaccgcctgggaaattggtgatagcataatgtgaagaaacacaattatgcaatggcattttattgaacttgcattttttgattgcaatttgtaaaatcaattgcttgttaatggaaaaatataatgtagagtattcctcattttcctatcaagataaaaaatcacatatattttggttccaaaattttactatacatcgatcggtgatggaaaatatggacgatatcgtaaattttgatcagtgataggtgacagcataatttacgacggagtgtcacaggtccaatttccctagattctagtggcacactactacagaccctatttttccgtgcggttgaatcgattatcccgtgcggtggctcggcctgcctgcagcgcctcgtctgggaaaatcggtattttcgcgtgcgggcgggccgaccgcacgagataatcgattatcccgtgcggtccgttaatcggttatctcgtgcggtgcagtaaggaggactgcacgggataatctattatcccgtgcggtcaaattataccgactgcatgggataataggttattccccacggctagcatgtgctagggcaaccgcacgagataattcgtgccgtcggtttgtgcgctaagatcaaacgtgcattcatagagatgggaaaggagaataaatattatgctaattagatgtctcctttctcatgaataaagtagtaggtatttggtgttttactttccaatcatgtaagcacttgctatgaataatgtggctcattggtgttaaccccaatgtttgccaagtttgttttgtttatgttcaataaagttcaggttttgaataagtgtgggaagatatcccagcttctgacgtgcatatagtctgaaaattgctgaacatctgatgtgcatcaaactctacagaaaattgtagagtgattgggcactcgagtggttcggccgaaccaacactgaccccaatcaccctcaatttccacaggtaagcaggtgagcacgtctattatctgtatatctctaccatgatatggtactagagctggaaattcagaaaatgattggttcaagcataattgaaaagataaaatctccaactaatgaaattctttctatgattaaccttgtatattttttattctcagctgaacttgtacttgtgaacaatcatccatgtttagggaaccttatgcatctaggtaattgctatatgtgagatgattaaagatgaaagaaattcttgcaatatttgtcataacttatgggaatttgtttttcaaaataaaattttgttttaaaagctcattcctctaattgactttactctatacctaccaaggccatatgcaagtatatcaatgataaaccttattatgcatatgactgcttagcattatattgagctttatcaaatgtatgtgactcgtgttagatatcattcatactctcaagatcaaggggtcatttccattttttccacatatataattaagctaagcttctacattggaaattggcttcccacaaaaattccattcaaataaactcctactttagactatgctttcttctcctagaaaatccttggcaaaaataaaaaaaatgagaaaaggagggaaaggcatggctatgaaaaaaaaagaaagaaataaagcttgctctcaaaacaatgagcatgaaaatggagaaggtatagtagaaaggataattatttctttattccatcattccataaaatatttttgcttttccattttccaccacaaataaagacccttgatctaggagtatgactgatgatcttcttgagtccatatttttggctttgcaatatatatgatgcaggtatgtcacaattttatccctgccgagctccacatatcagccttagaataggaaaaagttcagacacaatttgccttggtgaggacccacaaagacagaatacttgagtgacaagagagaaagtcaatatgagaaaaagagctagtttgcgaaaattcataaaatcccatgagtttgacaagtggaacaagaagggctggaatcgagatcgttccatttatcaattactcaagatggtaagttagccactgatagagttcacaggtgcaggtatggctttgaataatttatatgcttgaattatatcttggagaaattcattctacactaacctttactcagggacgagtaaagagctaagtgtggggggttttgttggcagttattaaatgccgattctataccgccaacatctgcataaagtacagataataaaacatccaacatagtgataggtgttaaatctcacatattccacaagtgttggtgtatattggtatgcaggtgttaaaccctgaagatgggaggggaaacaaacaaaagtgaggagaaacatgtatccacacaaggatgggttgtgaacttcatcaaaataccagagaatcagcccaaaactctgagaaatggatagaggagaaccaggaccatttacccccaagtaccccacccaatggcgcagcgatcttggagatcggcatcatcttctccaactccggccgccgagctccatcttcgatttctccctctccggtgagtcccaatccgattccctgccatggtagcctcgcatggacctctctaacacgaaagacatgaatgcatggtagtcctttgaagaaatcgagccatcgttgttcatccaaggtgaagcgccactgccgagacatttcgcgagccatcgtcgacgaccaagcttggccgacctcatccgtgcgccaggatgccgccgtgcgtcatcaccgtcggcggtgaacccctgcgatgcgacgctgccccgccgtggccgagccatcccggctcgggccagccgccgtcgcgaggaagaatggggaaaagaaaagaagagagagaggaagaacagtatgtgtccaggggcattttggtacttacacagctctttctctctccattttgaccggaaataataaaataatgggaggactgtccagcaacttattaccactttttgcagtgcccacgagcaaatacacgatcttcgggtgtctcatagcaaaggtcgcaatctttcggtgtcctgtagcaaattttgccatgattttcacatgcatggatcttctgaacacctagagataatggacatatcaatttcttcgcttgataagtgtttgtcggcaggaggttcgacttaggaagcataactctcaaaatatccatcaaatcattgaagcttgtgtccgatcatccatgtctggccttcaatctgagaagttcaagcacagagcgcaacaccgtatagtccttgtcgcatcctttcgcttcgtcgtaaagaagatccttcgctgttttttcaacgcttcccaattgtccaaccctcgtcttctaccagttaggacctctggttcaacatgccgcaacatatcttccagatcaaaatcaatatctgcatcgtctatactagagtcaccgcattccgggatggttccctgtgacatgtcttcgattataatattttacgcatcaccaaagcagaaatcatcagcctcttcgttacgaccaccgacttccccgtgaaaagtctatatctcgtagagagaatcccttatatgccactagaatttgaccagttcccttatatgccactcaaaattagcttctcccttatatgccactagttcaagtttttccacccttttatgccactcctaccactatagtgttagttgactgttagtcaaaggttagtttttttcgtaaatgactaatatgccctctcaactaaaaaatgtgtaaacttcaaaaaaatcataactaatttattttaaatcctctttgagtgaacaaaattttgtcaggaccagtgaaaaatgctctttatattaaaaatattgttggaaaactgcatgtttcatacttacattgaaaatttatttgcgatggtaatggctaaaattgcacgcgatgtagaaaaaatcaattttcatatgttgtatcccgtagctatattagtactaaaatacctattattggttgtagactaattctcaagggcaaatgcgtctttttacaatcaagttaacggtcaactgacggtggactgacggcaatggcataaaagggagaagaaacttgaaccggtggcacaaaagggataagccaatttgaagtggcatataaggaagccggttaatttagagtggcatataagagattctctctatctcgtaacccttcttaaatcctcgctctacgatgtgcgacaatacttaattcagatcttgcaatctttgcatgggcaaaaaatgcccctcaaattctccctcacagcatgtgcctttgccagctcaacgaatttgcctgcttccttcaagaacgtaggatgagttctttttgtgttgtacattcatgtccgatccatgacctagaatacagcttgtcatgaatacatccatgcccgattcaaaaatgagtgtatttaaacagagggaactaatcaaatagtaaattaaagttttatggacaatttaaacgagcgtacagaattttaaccattaatataatattgtccatttctaaaaaatgaaaaaaagtccttttatccgaatgaaaataaatttaatggaggcaaacccaacttttcaatttggatactaaatacttttaaaaacatgtaatggaaacattatacattagctaaaatataaaaaaaacaaaaagtgcctacactattccatttataaaagtgcaagtttcttcgaattgcaccgacgaaaacttacaaaaatggaagcaaataaaggagaagaacaagctctacaccttttatatggaacccaatcaaagatttgaggtcgaaaaccttcccccctaatttgtgggtgtttaggagagagaaaacaccgacatatatggcaacggtcgggctgggggtttatatagccccccgaccatcgcaagcggtcaccttacgtgggctgcacgggtggcgccggtcttcggcttgttctaggcggagctacttatggcccgcctggaagctataggggccggcgtccaagaaaatctcgcgtgtagtagtggcatgtggccgatatcgtgagtaccattgatatttatataaagtagcatatttgtagtgacatggatctaattaacccttttatttaaccaatcacttgtctttttacgctgattttatcggggcaaacagtggttgtgtgcttcgtgcgatgtggggaggagtggacttttgtcaagttttgggatatactccgatcctgatgtcctacattttttaaacccacatagtctaggaagaaaatagcgtgttttaggtgctctttgtctaggtttacaagcaaatacagtaagccaaaaaatctaaatctaaacaacagctttttcatttgtttttttttctaaaaccatgagtcactctatcactgttaaaccaaaagttagttaggccgaagaaacatttttaccttacgtgaagtaaaagtgtgactctaacattaaacttaagattttttttcagggattaaacttaagactttaaattcactaggttgtaaatcacataagctaaaaggataacttaaaatttctcaaaaaaagaaaggataacttaaaagcctataaatcaatctaaacaaaaaaaaaacccttaaataggtctcgaggcaacacgaagcctttgtatccagattttccataaaagatgctctacgggcctaaacttgtgtgcagatttcagcccaacgtccgcacggagcttaattagttcccaccacccacttgagccgccgccgctattcatccatggagccggcggcgacggtagcaatggatggatggtcggggccttgccgagtgccggatggtggcggtggccggagtcggaagagcgccggcgtacgtgggtggggagtaatttctgatccgtggatgcacaaccaccgtacgtgccagtaacgtataccgctccactttggtgcctgtttgggaaaagcgctgccccaaaagtccacagtttctaagaatatgtagttatatattctcaaaaatgaactaagaaattagaagctgaaggagctgggttttcagagcttttctagattctcaaaagctggttaccaaacagctgcttattagaatctaaagctccgtcaaacaggcgcttttatctccgctgttgagtacttcattttcaggtcatctaatcgctggagtcgtttgacgattgcaaggtacgtacatgtaggctcgagctaattaagctgcagctagctagccagctcaagccactacataccatttgagtgttctggtagtgattttggaggatttcaattaccaatattttttttatagaaccctgtggttcatagaaaaggaaagaacattttttggtaggattgtattccgacggcttaatttcgtataagaaaataagaaagaaggtttgatcttttgatgattttcattcctgtgggattagagaagaaaaaaagtccattttactgccccaaactaattcaatggatcacttaactccctaaactattttttaggctcattttaccccttgaactattaaaaatggttcactttactccttaataacatttcctttttttgttactttttatacaagttttattttaagctgaaatttgttagagtaatagttgacaccattaccaaagtttaaaaatattttgaaattttttttcatggtgttagcttgaactttaaaattttgatgtttaaatcagtttggagtggattcaacctatgcaaacagtgaggaaaaaaatcataaaagaatgtaagatgtaggttgtggatgcatttttattctaccaatttttcagtgcaaaatatgacttatacaatgagaactaaagaagagaaatagcgttaggggagtgaagcaaacatttttaatagtttagggtgtaaaatgagccaaaatatagggttaagtgcttcagtaaaatagtttgggggagtaaaataaactttttcattagaggaactcaatatttcaattcttgcgttattctattttttgtgtttttcctgtcctgtttttcacagataaactaaatacttacaaatatttggtatgtctgcactgtgctctgtggatcatgttctccgtgatcatcgatctctgtcaggcaagacgccaagaacacatccaccaaatctttgacccccgggagagaccatgccaagaaccacactccccaacacggacagaacacagaagatgcccctcggcaacagcgcgcggcgcagctaaaataaaattccttatcccctttgtgctcacatgtgcattgcatatatgcagccttgctgctcgcctgcaatgcaagtatgcaacctgtgatcctcctcctcttctcagtcagaggtgagccccctcctgtgacccctccaatgccgttcacatgatctcactctctctcgctctcactgtcgcacacattgagcagtgtgactcagtgagccacctctgcctttttacatgaccatgctgctcttgtcctagctgcacatttcacacttcacatggcaacagaagcagcagcaacagcaagatgtcttcttcttcctcttctttctcctctccaatctccacacaagcagcagcaactcatctttgctgctcttctccttctcttcttcttctcttcactccagagtttgcactgctatgctgctgctggttacaatgagcagcaggaagctgatagggtggccttcctccccgggcagccaagcagcccgaaggtctctcagttctcaggctacatcactgtgaacaggcagaatggcagggcactcttctactggttctttgaggcccaggcactgccctctcagaagcctctcctgctctggctcaatggaggttgtgcaataatgtctgaatcatttacttctgcaatagaaatgtgaactttttggtacacatttgttacatgagtgcatatgtgcatgcagggccaggttgctcatcagttggatatggagctgcctctgaactagggcccctcagagttagcagaaatggagctgggcttgagttcaacaaatttgcatggaacaaaggttgtgcaaaaactaagcatttttgtttcttataattgttccaattggtttgagcaaattaataaaatgctatacgcatgtcactgtttttcacattgttcttgccagaggccaatttgctgttcttggagtccccagttggggttggcttctcctacaccaacacatcctctgacctcaccaaactgaatgatggttttgtaggtaattcagtattgttattggtaaagtatatttttcttgaccattgtttgtcacatttgagatgtttttggcgccttccttccttgtagccgaggacgcatataatttcctggtaaattggttggacagatttccacagtacaaagaccatgaattctatatttcaggagagagctatgcaggtaattcttcacatgaacatgaaagtcgtctcttgcccccttggccttctttttgttgttttgattagaacaaccaaccttgaaattgtagcctacatgtctgaaaaggttcaggaaatgatgctaatgcatcaaattcagattatagttgacctttccaattaggaatttattagtaatacttgtatctattccgtaataaccatgaattggctttgagataaactaattcaaatttttactagatttgagccaatagttcagattatgcatataagatagtttgctgagccctaatatgtctactacaagtttctagaagttcaaaattttagttgcaggtaatatagtgatctgtcctgtaaccataaaaaaaaagcatatttaggtgcttaggaagaaggatatcataatccgtgaaaatagaagcaaagtgaatatgtcctggttaacatcatgacttgacatcattttcatactatttagatatgaaggcgtgtcctcattttccaaaatgaaatgtttcattcctgcaagatcctcatcccattgagcactactagtggtattgactggtcatactagaattatgtgatatctcatatgcggtagtaaaaaagatgccctataattccttttccctgtacatcaccaacaagaattttcgaattaatgcaggtcactatgtgccacagcttgcagaccttgtctatgagaggaacaaagacaagaaggccaacagatatatcaaactgaaagggttcattgtgagtacatccattcactgattagtttgccagtattgctggtttggcttcattctttcatatttcaaaactggatggcaatattatttggtaaagtccattttaatggactcaaaaactcttcgttaagaatccgagagctgaaagtacatttcacctataatattttagcaacatattgacagtaatgatgatgctttttctagataatggtctttaatttagataaaaatcagtggaacatcagaaaagagtatttcatctattattgaaggtccaacaggaaaaataaaatcttgcagttctcgaaataagttctaaactttctggaatcataacattggtacttgggcccaaatacaggttggtaatccacttactgatgatcagtacgactcaaaaggtcttgttgaatatgcttggagccacgcagttgtgtcagatggaatttatgagcgcgtcaagaaggtgtgcaacttcaagatctcaaactggacgaatgattgcaatgaagccatgagtagtattttcagacaataccaagagattgacatctacaatatctatgcacccaagtgcaatcttgctcaaacatcaagagtagctgctttcgatcacgcactcgaagcaagcgatcaggttgatgacaaatagttcaaattagttctgcttctgaaattctaaggcttgttgtttgacttggtaggaacaattcagtaggaggattaggatgttctcaggatatgacgcgtgctactcatcatatgctgagaagtacttcaacaagccagacgtgcagaaagcattccatgcaaatgcaaatgggatgctccctggaaaatggaaggtttgcaggtgaattggcttcttttctttctttttttttaacttaagaatcggcttaaatttcttccactaaaaatatttagagtggcaactgtagatttgttaaactcttaaaattttatattttcttttaaatctgaagtccttctctattgcatattcagctatacatatacgaggggcatatatggaccctttttgggcctagaaccacacacacatgtacacagcccacacccacaaatatacactgcccaacagtccccctcaagatgggcgataaatatctatcatgcccatctcgctacatgacgacatacactatttaacacctaaagccttcgttaaacaatcaaccacttgttctctagaattcacaaagtttaacttcaaggttttgtcatctatcctttctttaataaagaagcgatcggtctccacatgttttgttcgatcatgttggactgaattgttagcaatattaatggctgatttgctgtcgcaccataacttcatgggaatgtttatcatcaacttcaattcagttagaagatctcttacccataacaactcgctcaaactaatcgacattgacttgtattctgcctcagcagttgaacgagacaccaccaattgtttcttgcttctccaagatactaaattgccacgaacaaatacacaatagcctgatattgaccttctatcatcaagacagttgccctgatctgcatcacagtatccctccacatcaagatgtcaattttcttgaaccataagcccttacctaggcttcccttcaaatatctcaaaattctatacacagcatccatgtgaccacttctaggatctgttacgaatctgcttgcgagtttgggaatttaggattagaggagcagattcgaacagagagaaaggggtaggaggaaggggaagaacagaagagagaacttggagcaggggaagatgcagtagttagggaggaatagttttctgttcacttgttcgatgccttttcccctctgctcactcgtgcttatatactcgcacgtttacattctggacctaagcccattccggcccagttactctcacattaggcctgcgtactcttgctggtcgcgtcttcattggattacttgccgtgagtaatgtcggacctggtacagtaccggtgacattcccctcttcttcagaaacggcttgtccccaagccggtgcttcagggaaacgcgcacgcagtgcagcaccatcctcccaggttgcttcagcggacgtctgaccagaccaacgaatcttgagttgttccacagctccagcgcctttcttgactgcacgacgagcaagaatttgaactggtagcgcttcatcttcagttaacgctggcaggtcttgaatcgacgagtcaggagctggtgaagaagcctgacagagctgtgagacatgtactactggatgaatagcacaagttgtcggtagttgcaggcgataagccacgcttccaatgcgcgccaagatctgaaagggaccaaaataacggaaagccaatttgtgattagaacgtcctgtcaaggagaactgagcatgcggctgtgccttcaggaacacccagtcaccaacttcaaactcacgatcagaacgtttcttgtcagcctggaacttcatacgttgctgagctcgtaacagatgttgtcgcagcaaactggtaatcacttcccgttccttcagccagtcttgcaaatctggaacagcacactcaaagcgatcgagcacaccaaaatgccgaggagaatgaccatataatacctcaaatggtgatttgtccagagccgaatggaaggcagtattgtaccagaattccgccaaagcgagccaacgataccacctcttagggcaagcgtgcacaaagcatctcaaaaaggtttccaagcactgatttacccattcggtttggccgtccgtttgaggatggactgtttgccaagcatgcttgggcactggaagaggctgtaagaaacctgggtaccgaacccgttctgctttggcctgtttacagatggaacaagccgacacaaactggcgcacagcttttctgagtccaggccaagcaaataacttattcactcgactgaaggttgcctgagtaccagaatgacccccaattgctgcattgtgcagtgcagtcagaaccttagtctgtaactccacattgttacccaaccaaatccttcccttatggtagataatgccattctgtaatctgtactcagggagcgcctctggacttaacgagagcttagtcaacagttgagaggaaacttgatcctgagcatatcccagctgcacatctgccaaccaaactggaatacaggaagacaccgcactgagttgaaacacatcggttgactgattgcgtgacaaagcatcggcggctttattttccagtcccttcttatagacaattcttcttatagacaattctgtattgtaaaccaagcagtttggtcagagcacgctgttgccaaggtgttactaatctttgatcatccaaatgaatcaaactgcgctggtcagtacggattataaactctccaaactgcaagtaagagcgccattgttccacagcgagaagaatcgccaagcactccttctcgtaagtggacagcccttgatttcgaggccccaaagatttactgagaaaggctaacggatgaccagcttgcatcagcacagcgccaacacccttatcacacgcatcagtctcaatttcaaaaactttggagaaatccggtagtgctaggacaggagccgaaactagagcttccttcaaggcatcaaaagacgcttgatgctccgacgtccaaacaaacaccacattcttcttgagcagatcagtaaggggcctgctgataataccaaaagagcgtacaaacttccgatagtaccccgcaagacccaaaaatcctcgcacttccttcacattacagggtactgcccagttgcgcaccgcttgaatattctttgagtcagtggccacaccttctgcactaataacatgcccaagatatgttagacttgcacgggcgaacgagcatttgcttctcttgaccttaagttgatgatcagttagcaattgaaacacccgtcgcagcaaggctacatggtcgtccaaattttgactatagattaagatgtcatctataaacaccaacactcctttgcgaagcaatggagctaagatctgattcatcaatccttggaaggtagccggggctccggtaaggccgtaggacataaccctgaattcgtagtgtccattgtgcgtcttaaacgctgttttgtgctcatcttctgggcgcatccggatctgatgatagccagctcttaaatccaaactcgtgaataaacaggagcccgccaattcatcaagcaactcatcgataattggcaaagggtagcgattcttgactgtaattgcattaaggtggcggtagtcaatacagaatcgccaagtaaggtccttcttaagcaccagcagaacaggtgatgaaaaaggactagagctgggttgtatgattccctgttggagcatatccgcaacttgccgttcaatctcatctttttgagctggattatatcgataaggtcgcaagttaacaggttttgctcctggcagtaaaggaattgaatggtcaaagaccctggccggtggtaaaccttgtggctcatcaaagacatgaacaaattctttcaacaactggtcgacagcctgaggtacttctgtatttgttgtttccttgatcagagaacacaactcaaccacttgcatcacagcttcccgatgaatcagtccttgaacttgattgacagatagagatgtacagctgctaatatcagctctaacacctcgcaaacaaacatccttttgtgcatgtttaaatctcagagtcttagccctccaatcaatttgcataggactgtgttgctcaagccaatccattccaagtattacgtcataacttccaagaggtaacactttcaggttgttctgaaaagaaacaccctgaaccagccaaagacaattctgcatttctttgttacattggagtattcccccatcagcaacccgaactcgaaaagattgcacagttttctgattgcctcttatcttgcctgccatttcttcagatataaagctatgagtgctgccagagtctacaagcatcattatctcatactgttgtattaatccttgcagcctcaaagttccagaagattcagtccctagcatagcttctttagaaatctgacagacttcgctaacagtttcagaagccctttctgtcagctcatcagttccagcggatttggtttccccatccgattcctcaagcaggtcgagtaactcctccacaacatgtaactgcacagttggcccacacttatgttccctactccatttttccccacaagtgtgacacaatcccttagccttgcgataagcacatagtgctgccactcgatcctccagaggctgagttctgtcatcaactcgcccaccagctcgcccaggagtgaaagcaacattccccacagtacgctgtccgacccgatgagaaaaacctccatcaatccgacgcgaatcccgtcgtcccgcttccaacacctcttcctgtaaacaagcaaggtccacagcagtatccaaatcgtttggacgatgtaaaattacggctgcgcgaacttcaggtttcagtccatcaaggaattcagtaatgaagaatactgaattccaggatggatgatgagcatagagttgatgcatcagctcattgaatttttctgcataactaagaacggttccctcctgcctaagcctcttgaactgtctaatgagactctgaaattcctccctcccgaacttagcacaaacagcctccgagaaatcattccaccccatcaattccacatgagcattggtggattgcaaccacactagagcactccccgaaaattgcaaagcagcaaccccaacccacacatccgggctaatcccacttactcggaaataagtttcgcatttcattttccaggctctagggttctctccttcaaattgtgggcaatctactctagcattacccccatggaatcccttggccgggagagacgttggagagaaatcatctccagacgccttcccccgattcatcgttgcaacgttgcggcctcacggccctgaactcgcgtccgcccctttggaggccgtctcctcctccttcggcaccgtcggcgtgggtagaagagggggcagatccgctggcttgacggcgagaattggattgcgggatatccgctccacttgctggcgcaggtcgccgaggtcgtcccgcatctccgtcatggccttgtccaccgccggtttccagctcgcgagctccaccaccataggcttgatttcctccaaggatcccatcgaagcttggatggcggtattctgcttctggattgtcgccatggccgccgcgagttccgccaattgttgctccatctcttgggacttgagttgcgcacgggaatagtatctaggtttgtcgaggtactccaggatggatggctctgatacctattgttacgaatctgcttgcgagtttgggaatttaggattagaggagcagattcgaacagagagaaaggggtaggaggaaggggaagaacagaagagagaacttggagcaggggaagatgcagtagttagggaggaatagttttctgttcacttgttcgatgccttttcccctctgctcactcgtgcttatatactcgcacgtttacattctggacctaagcccattccggcccagttactctcacattaggcctgcgtactcttgctggtcgcgtcttcattggattacttgccgtgagtaatgtcggacctggtacagtaccggtgacaggattatgcatatactgacttatcacacttacagcatgggttatatcaggtcttgtatgacacaagtatatcacctgtcccacaagtctttgataactctctttatttactgggtctcctaattcagcacacaacttatggttttgttcaatttgtgtagaggctggtcgacaaccaagcatacctgtgtcactgagtagatctaacgcatactttcattgtgaaagtactatccctctaggagatcttgcaatctcaatgcctaagtatttcagctgacccaaattcttaagttcaaattccttacttagattttcttttaatcttgctatctctatagaatcatccccaatgataatcatgtcatccacatacacggcaaagatagtagcgtgacatcccttatgatgatagaatgatgtatgatccccattacattgcttataacccatgccacatattcatagtgaaaaaaacgtgaccggtagatgacccggtcaccatgctggttcactggtttcacggttcaaccgtgaaccggtcggtcgaaccgcagtttactaagtacatgtaatatatatgtaatatatgtatttctgtactgtcacatacatttggatggtaggatggctacgggagttggcttgtaaccgatcgactcggggtcgactccccaccagtgcacatttccttcgatttttgctaaaaaaatcaagcctgtggacatgtatggcccaaaacacactaactcggcccagtttgtcttagtccgatccgaccaaagacggttttatgcctggttcatcgcaaaaccggctagtttaggcggttgaaagtggttcaaatgcatgtccggtctttctattcgaccgaaccgtgccaacctccagttccggttgaaccgccgatccggtccggttttttacactaggcacgcattacacgttgaaaacaatcaaaccattctcctggtgattgtttgagaccatataaagatttcttcaacctcaacacttttttccttcagtttgtgaagtgctaaatccaggtgggatatccatatacaccacttcttgaaggtctccatgtaaaaatgcatttttgacatctaattgatgcagtgaccaatcaaaattagttgtacaagtttcatcataatcaattccatatgtttgactataccccttagcaacaagccttgctttctacctttccttctttccattaaggttttgctttattgtatatacccacttacagttgacaactttcttcccttcaggaaatggtacaagattccatgttttgttcttctcaagagcctctagatcatccagcatagtttgatgtcattttggatcttgctttgcttctctccaattctttagaattcccactaaatctaccgatgctacaaaggccttatatgtagatgacaaagagtcataagaaatatagttggatatgttattctcatcattaccctcatcttgagcttcaaaaccatatcttagggaggtttacctacattgctttttacaccctttctgacggcaattggtaagttagattcttcttctctaacttcatcctcttctccccctaactccaaaggcacttgcacatgacttgcatctcccactacttaattatcctctacaacttattggatcactggaaatcttgccctccttttgtaaacttgaagattttcctcttcatgtggctttctcaactcttgctcttatataggatcattcatatcaactgggatttggccaatcacaacttttttctccttcgcttggtcatcttccttggaacccattattttatcctccctttgtttatcatgattacactagttgaattatcaagatcaacaaaaaaaagaacttaaatctattttctcatcataaaatggaacaaattctctaaaagtaacatccgtacttacaaatgttcattgttctgatggactccaacacttataccccttctggccagaggaataacctatgaagatcaagttttgcaacataaggtctgttgtttctgacaaagcatgtgcaaccaaacacctttggtggaagaacaaatacattcttgtgaaatatcatctcatatggtgtcttcatcccaagtattcccgatggtgtacgattgataagatatgttgctgccattacagccacactccacaagaatttaggtacattcatagtatacatcaatgaacgagctgtctccaaatgatgatgatttttcttctcagccaccccattttgtggaggagtatcaggacaagaagtttgatgtaatattccttctgatgaaagaaagttactaaattcttatttatatactcccctccattgtcagttctaataaactaaacccgagcattaaaatgatttttaatgtatgcataaaaattctgaaaacatttaagcataaaaattctggaagcatttaagcacctcgtccttgtgcctcataagatatatccatgtcatgcgagagtagcaatcaataaaggtgacaaaatacttcattccactcatagaaaccacaggtgaggtccaaatatctgagtgaattagcataaagggcaacatacttcggagtcctctactcacatatgacatttttgtatgtttcccatactcacaagcatcacatactaacttatgtttatccactctactgaactctactggaaatattttacttataatttcaaaagatatatgtcccaatcgacagtgcaaaaataacaccttagctcttcttcacttgtggaagccatcaaagctagacacatggcttcattagtccttccccgatccaaatacgaaagtccatcatgcctgacaccaatcccaagtttcttccctgtttgcctctcctgaattaaacaattctcacgatcaagggagacttgacagtccatatgatcaacaagaaaactttttgaaaccaaattcactggaaaggaagaaatatataacactgatgataaagtgattgaaggagtacactgcactgtaccctctcccttaagtgggcatgatgttccatcggcaatttgaattgtttctttacgtgtaaatgggtatggtttatatgatgcaaatgccccacgcatactcgttacatgtgtaatgcactagagtctaatatccaatttggataagaaccattgatggacataaatgcttgatttgaattatctgaggtggaatgaacaaagttggtaacatcaacatttataggttcagaagaacccccttcaagagtgaccacattagctttgtgatcacctctgtactcatagcctctacctctgttatctctactttcataacctcttccacctcttgctcctcctctatcaccatttcttcctcttccataactaggcttgtgagaagcacgacaatcacacataagatgccccatttcaccacaattaaagcactctctagttttattaccttgtacaattgcataggtgggacttgatgaagacgatgtggcataggaaatagtttcttcttaagctcctcttgtgccatagttgcaatagccacatctaaggtaggaagagtggtttggtgaaacattgcatctcttcttcctttgaactccggatttaagcccttcaaaaactcaaggacccttttacgctctacccatttcttcatttttgctatgtaattagaatgctctaacccaagaggatcataataatctaaatcaaatcacaaacacttcaactctgcgacatattctgccataggcgctccccctgtttcaaagcacttatcttctcttgtgccaccatcattagcatcatattaccttcttctgagtatagattagtgagagttttccacatctcactcgcactagagatggtctcaacagttgtagcaatagcagggattagtgaggtcaactaccacgctaccactaaagagttggtagtacttcaagttttccattctacacttgtgctctcaggctccttcacttctcctatgacatatccttctaacccctttgtctttaaaatcaacattgctctccttgtccaactcaaataatttttgacaccctccaacttaatatcattttgcatcaactcaattttttgtactgattcagcatgaggaacaattgcattgatagtagtagaggtctcactgagtttctttgcaagcatatctaccaattttcccatcacctgttcaattccttgattttcccccattacagcaactacaactacatcccttctatttcttcccataacaacaatatcaagcaaaacatcagtagaatagttccaaccttcccaagtgattgatttaaccaccgcagtacagatcaagttacaatgaccaaattcctcaccttcttaagtgaccaacagaaccaagtgcagctctgcccccaaatctcgtgtgccccttcatttcttgttgtgagatctcaacctaaccttgcaatagcagacaaaagctacagcagctacacagcaaactaacccccccccctttttcttgcaacggcaacagcaaaagctcaccaaatcctcggcccacactcctctgcttcctccaccagtgcaccttggtgcatgcgctagcctctacctgtcctgctccctctggtcgccgtgagcccgtgagtccctgtactgccttcctggccgccgtctcctgcagcgcctttgcgtccctctcgcgacgctgctccagcgtgagcccgtcgtcccggcccttcaccgctggcttccgcgcctgcgccctctgccttccaacgcctccacgacgccggtgcgccacactcctgttgggctgtgtgtgtgttgtggcccaagaggcccatgtaccgatatgcttgcatatgtatagagtaagcaattgacagagggtgtgaagcttccagaaaaacaatcacaaatgtcttcatggtattagagcttggtcgccagcgactgcgtcgacactaaaccctagctggcggcggctatggccagagaagcgcggcgcaccggcggtgtacttaggggtgggcagaaaaagaccgagaccgagaaattcggtcatcaattcggtcctaggaggtgaaagaccgaattttgttcggtcaattcggttagtctcctcggttaaccgaatagaccaaaaagaccgaattaacaaaaaaaaagtataaatacaatctacaatccactaagttcaataggattaaactctaattttcacatccctacttcttctaggcatataacctaataagagtttttactcatacgtgcttacggatttttttttgtgatttttgtgttgaaaatttccattatttctctgcatatatgaaaatgttgctgaatttcggtcagaccgagaccgagaccgaaaagaccgagactgaatttgtcggtcctgacatttttgcgttgaaattcggtcttcacttttcaaagaccgaaataaccaaaaggccgaagaccgagaccgaaaatttcggttagaccgaacgcccacccctaggtgtactggcgtgtggtgctggagctcctgacgaggaagagagcgtgttgagggtggagacagtggcaactattgtggtgagggagcaaggcagcgacggttgctgtggtgagggagcgacagtgttgacggtggaggcaccggcagctgctgtggttgtgcttggaggaatccgacatggagagaaggtgtagctagctggaagcgccaacggcgaccgcatgcgcggagggcaagttgacgatggcgtgtggagtgaaggtgcgcttctactgttggcgattgtgtgtgtggagagaagatggtgatattgcttgctagcgtgtagaggtgctgattgagaaggtgcagctgccgcttgctgcttgagaaagtgttgcggatgctgcttgagaaggtgagaattttttctactgctactgttgagaaggtgaggatttggtcagattgaagtctcacagcaataaaagaaggggaacagattaacttgtggaggtgagaagaagggatatagctgctattaacttgctgtaatgcgggaaaatcaagggattgaacaggtgatgggtaaattggtagatatgcttgctaagaaacttagtgagacctctaataccagcaatgcgattgtttcgcatgctgaatcagtaaaaaaattgagttgatgcaaaatgatattaaattagaaggagtcaaaaattatttgagttggtgaaggagagcattattgatcttgaagacaaagggattagaaggatatgttacaggggagataaaggagcctgacagtacattaagtgttgagtggaagacttggagtactaccaactctttaatattagcgtggttgttaacttcacttatccctactgttacaacaactgttgagaccatctctagtgcaagtgagatgtggaaaactctcactaatttttactcgggagaaggaaatgtgatgctaatggtggaggcacaaaagaagataagtgctttgaaacagggggaacgttctgttgcagaatatgttgcagaactgaagcatttgtggttagatttggatcattatgatcctcttgggttagaacaccccgtttgtatagcaaaaatgagaaaatggattgagtgcagaagggtcattgacttcttgaagggcctaaattcggagtttgaagggagaagagatgcaatatttcatcaaaccactcttcctacgttgatgaggctattgcaactatggcacatggggagcttaagaagaaagtattgcctagtgtcacaccatcttcaccaaatcccacatatgtagttgcacaaagtaaaaagatcagggagtgcttcaattgtggtgagatgggacaccttatgcgtgattgtcgtgctccacacaagcctagttatgggagaggaagatatggtgataagggcggggcaagaggtggaagaggtcatgcgggtagaggtaacagaggtagaggctatgagtatagaggtgatcacaaagctaatgtagtcactcttgaagagggttcttctagacctacaaatgttgatgttgccaaccttgttcattccacttcacataactcaaaccaagcatttatgtccatcaatagatctctttcaaattggatactagactcgggtgtatccagacatgtcacgggtatgtgtggagaatttgcatcatataaaccatacccatttacatgaaaagaaagaattcaaacggctgatggaacatcatgcccagttaaaggagagggtacagtgcagtgtactccttcaatcactttatcatcagtgttatatattccttcctttccagtgaatttggtttcaaaaagttttcttgttgatcatatggactgttgggtctcttgatcgtgagaattgtttaattcaggagaggcaaacagggaagaaacttgggattggcatcagtcgtgatggactttggtacttggatcgaaaggggacaagtgaagatgtatgtcttgcattgatggcttccacaagtgaagaagagactaaggtattacttctacattgtcgactgaggcatatatcttttgaaactatgagtaagatgttccggcagaactgagtagattggataaacataagttagtatgtgatgcatgtgagtatgggaaacatacaagaacatcatatgtgagtaggggactccgaagtatattgccttatatgttgattcactcaaatgtatggatctcacccgtagtctctgtgagtggaatgaagtattttgttacatttattgattgctactctcgcatgtcatggttatatcttatgaggcataagaatgaggtgcttaaatgtttccagaacttttatacatatattaaaaatcattttaatgctaagattcagtttatcagaactgataatgtaggggagtatctgaatagtgaatttggtagacttctttcattggaaggaatattacatcagacttcttggcctgatacccctctgcaaaatggtgtcactgaaaggaaaaatcgtcgtattttggagataactcgttcattaatgtatgctatgaatgtacctaaatttctgtggagcgaggcaataatgacgacaacttatcttatcaaccgcacatcatcaaggatacttggaatgaatacaccatgtgagatgatattgggaaagaatgaatttattgttccacagctgcacttgctttgttagagatcatagaccttctgttggaaaacttgatcctcgagctgtcaaatgcttctttatatgctattcatctggccagaaggggtataagtgttggagtccatcagaacgacgaacctttgtaagtatggatgttacttttagagaatctatctcattttatggtgagaagacatatttaagttctttattcattgatcttgataattcaactagtggtcatgatagtcaacaaatggaaggtgaaatcttgggtccaaagggacataaactatcaaagaaagaaaagtttgtggttggttcaattccatgtcctatgagtagtcctattgcacaagagcaagaatggagtaagccatatgaagaggaaaatcttcaagtttacacaagtataacaaggtctccaataatccaacaagttgaagaggataatcaggtagtggaagatgtaagtcatgagtaagggactttggagtcagggggaggagacgaagaagttagagaagaatttaacttaccaattaccgtcagaaagggtgtaagaagcaatacagggaaacctccactaaggtatggttttgaagctcaagatgagggtgatgatgagaataacatatccaactatgtttcttatgactctttatcatctacatataaggcctttgtagcatcactagatccaatgcaaagtccaaacgattggagagaagcaaaacaagatccaaggtggcatcaagctatgctagatgaactagaggctcttaaaaagaacaaaacatggaatcttgtaccatttcctaaaggttgtatgtgtgttgtggcccaagagacccatgtacccatatgcttgtatatgtacagagtaaacaattgagagagggtatgaagcttctagaaaaacaatcacaaatgtcttcagctcgtccggccgcagcgccactgctgatatttcttaacgatattactagaaatataattcccagcaatggcgctataaatattctcggcctagaaccacacacacatgtacacagcccacacacacacatatacacagcccaacaaaatctaacagtagttgcaactctaaatgaaattctatctacacttaacagttcaatacactattgtcgtaaatcatacatttttattctgatatttagccatctttgtgaatattaggctaagtagacattaatatttatttgaattgtttaatttttgatttatcatgcagtgactccattctaaggtcatacaacttttcggtgctttctgtcttgccaatctattcgaagctcatcaaagcaggactcagaatttggctctacaggtgtgtttcctcttcctgtacctttagaccattttcctgttccaaatacatgcagacatgaacattttcatcacctatccaagcaagcatattttcccctgataacacttcttaaaacttatcagaaatataacgctgcttctatctgaattttaatccttcaaaacagctgctaaatagtgctgggaagtttaatacgagtaagattgttttgcatttagtggagatgccgacggtagggtcccagtgatcgggtcaaggtactgcgtggaagcgcttgggctgcatatcaagagggactggcaaccttggtacctgaacagacaggtctgaatttttgaactatcatcagtgatgttacattctagtagcaatgtagcactgatgtagttagtcaagttagttgatggatgtgaatctgtattctagtagcagtgtagcactgatctggaaatcacttgcaatataggttgcaggaagatttgtggagtacgatggcatgaccatggtgacgattagaggtgctggacatttggtaccccttaataaacctgaagaagggctcactctgattgacacatttcttcttgggtaaacagctcttaacacaccgatgaaaggtaaatttaggttaaaaggaagttgggactatttgtcctaaaagttgctcaatgagtgtcaaccattattgtttgagaaagaagtgtcaaccattattccaggagccatggcatagctgaaattattccttttaagggacagtttgaatttcagtctgatccttttgaatgctgctgttgcattctttcacttctttctatccagcctgaagctcttggtaacttttgttggtaaagcatctcaagtctcaagcaattacattgataagattgtgctaaacattcaaagaattaacaagggcaagttctagtctttgtttgaaaatatagggttgaaattatcattctcaacataaaactcaaacataaggaaaatatacagattaatgtatagggtggcatctagttgacacagacaattgcatacatgaagagcctacaatacatgtattgtttcatctatgtatgataatatcgatgacttattccttctttatttttatgtgtaagttttatctgggttgtatcatcggttgttttttgttggtagtcgcctgcctgaaagaaaggaattgattaccaccagtgcctgttctggcttgtcttgtggcactgcatgtccagctcctcttactgtggccattgtcaatccttgatactcaacaaatctcccagcaacctacattggatttgcataggtgaagaaattgtgcaatattacaaattgtaattcataattttacactttattttgattaatacacgtagatgacacggaatatgtaatagggtaacaacctgattgtttaggtaccatggttgccactgtgacttaacaggaaggccaagggcttctacgcagtaccgggatccaataactggaaccctgccatccacgtctccactgtaaaatcaaattgataattccctcgtgttggtcccaaattttgtgatgactttgatgaattcgaaattatacagaatttagtgagcataagtaaaagcaggtcctgaatgtaagtatgagtctacttgagtggcacttaaaaaatcactaaaccaactcatgacagtcaaaggcagggaaatgaaacaaacttttttgaaagcatgatgaagaaaaaatgagatataagggcaattgtcccttatagataatgtagtttgtagcataacataatatcttgatcaaattcttaaggcaaactagtatgcaagaaccaaacctgtagacccatattcgtaggccagccttgataagcttagagtaaataggaagaacagagaagaccgtgatgtcgtaattgtcgaatattgaataactgcaaatgtatggaggatgtcatttcttctatccatttagtatatctgatcaatcagaaattcacaaggaagctcatgcatatatgacctgcagatactccattttctgtccttgatcaatccactcgtattcgcatgaagtgatttctgcacatccatcttgttcatgtaatcttcgatatgtgacgaatagcacggatcataccctgagtacatcctcgtgcctttaagcctcttctgaaatttgcattcaattatcttcagttcattctgttttcatatttgctacagtacaaatactagttgttaagcattacagttaccttagcattcatatcagctgtactgtaggaggtggaaaagagggatgagtcatcagtgttgcacttaggtgcatacacattgaaaatatcgatcatatcgtactgatcatatatgtatcccattacatggttacactcattgctacggggtgataacctgaagtcgcaaacattgttgacatgcttatagagttgatctgagatcactgagtgactccaagcgaactcaactagtcccttgtagtcatagtaatcatcagtctctgcattgccaacctgcaaaatattgttggcatttgtgattggatcattgacagtttgttttgggagagcatactgaatgcataatatgcttaaattgaatggtatgaatgaggaaatgaaagtattataagataaaagaattgcttgtcagcgtttcaaactagaacaactcaataaacagagatccagcaaagcccacaaatacacaatcattcataaacatgttcgaggaaatagcactcacatataaggtctcaagctaatttccaatataacattctttcagcagaaatctgatgccaaaagaaaatttgatcagtttcataaggtacttacaataaatcctttcaaattgatatgctggtttgtttcaacatgcttgttgcgctcatacactacatcagcaagctgaggaacatagtgccctgttgcatcaaagttggtaagtgtctttccccacaaaataaaaagttggtaactgtcttattattcaaggttatgtttgcatgttgtgaaacacattggatgatgtggtttgcagcatatgccctgatacgtgtgtccactagatggccaccaatgtttaaatctgagtacttttgaccatatagtttgttgaataagccactctctcctttgacccttgataggactgttttgggtttagtgacagaagcaaacaaaaaatgagtattccaaccctaacaaaagatagctgtatttttcaacagaataacaaacatcaacttgttcaggacctaataaaggtggtatagtgggatccatgtattggtgtggactgaagacttcagggaataggatctggatgactacatgtattctaggctaaaccttttgactagagaatattgaggagtggaaagatggtggatttattcctgttttgcatgcttacactactcattaattaacaaaaggtgaaaatccggtatctttttctttttcttgtgggcttattcaacttttctatatttttgttggaagaaagggagctgtctgcacaatacctgcatagctctctccagagatgtagaagtcatggtttttgtactgaggaaacctcttgaaccaattcaccaagaaattgtaggtgtcctcagctgcgccgctcgaaaaatacagttaatgagcacaataacacaaatttttcagactttaagggaggtaagttgaagatcctgagactagataaataccgacaaaacggtcatcgatgctctctaggtcagacgaggtatttgtgtaggagaagccgactccaacaggagattccaagaacaacaaattggcctctgaaacatggagaggaacaattgcagattaattctgttagtcccacattgaccggtagcaactttacacatgacgtgacttcggagtgcaacatgatacgagcggtaaaagatgaacaataatatcgtaccgttattccatgcaaacttgttgaattccaaacctgttccatttccattgaccatgagaggacccaattcagaagctgctccatagcccacagatgagcaaccaggacctgaatatggaaattcagttgaatggcgatacaaaacaagaaacagtgaaagaaacacacatacaaaaatgacagggtaaatattctatgactacttagaaaggacgaactaaaccatcacacatcaggtgaataaacatatatagctgcagacaaatcaaagtacaactaatacttgtttgcttgctactgatcaatatgaatgaacaatccatcaagcaaagaaatgcatatgctcaatgcacaaatgacaacaacctccattaagccagagcaggagaggcttcttggaaggcagtgcctgagcctcaaagaaccagtagaagagtgccctgccattctggctgttcacagtgatgtagcctgagaactgagacatctgtgggctccttggctgcccagggaggaaggcaaccctatcagcctcctgctcatcctctgctgtgattgtctgcagcaatgagagagcaagcaagatgatgaagagtggatggtggcacagggatttgagccttggtgatgcacaagaggccataggatttttctcttttttttttttgttctcctcctcttgttctgttctgctctcctcagtgaaagagagtgcagaactctctgtgtccactaccagctcagtgtttggaggggggaagagatattgcagcatttgaacatatatagcaagttgtcatttgctggtatgtgtggcaattgagatacttttcttatgtgcaagtaagaaaatcagtattgttcccttcaaaaaagaaaatcagtattgtgcttgtaaaaagtccttgaccgatcagctgatagtgcagttaaaaaaatgtttaccccactgtaaatttgcactttccagtgtccacagagaagataagtttataaaaattctcaaaagaaaaaggtttagcacttgcgttggagaatatggtatatatcttttcaatattttgatattaactcagttgcatgattaaaaaaaagacaaatacatagctaaagcagttcgaacactatttaagcatgtatttatcattcacggattcactgaaatgcaattaagttctaacatagcccatttatatttattgattttctgagaacaaagaatcttcaagtttgaattttaacagacttttgccaatatgccaccaactaacctcacatgataataatcctttttgacattttccttcgtgagactataattaagttcagtcatgagcaacatgtgttccattttgtcggtctctcaaatctttagtatgaatcacaagccaatattaagtattgtctaaaaaagatttgagtgtttcttttcatattagtcgaatttaaggtcatcatgttgaaattcctttgtcatcttcatcgactttttcatcccctctaactgaatcaatccccatttggtcgccactacttccgcccctgaatgccacgatccctcgtcaccattgccaatgaggcacgccaatagggttgtaggtgggctagcatgcaaaatcatttctacaagcgatataagtgagttcacggattggctcacttattgggatacacccgcaccaattctctagcttgttctccacacatgtcatctcttcttggcactccatccccactccctacgcttcaattcgttgccaaactaaatttcatttagaattgtttccctctcctatctgaataatacctccatcccataataattgcatttctaccattctatttttttcccgaaaaattatatttgtgataagatgggacccaacaaatggaatgtgtaccctcaaccttccttttaattaagtttacaaatgaaatgtgtgcctcaaccttccttatataagtataggtatggaatatgcgcatgcagtgcagttattaaataggattactgtggtaaattatgtttgttatcaatctatctctattttttagaaatgcaattattatgggacggaggtaaactaaggcagaactcttgccttttgttaaaaaaaatctattcagaaatcataatatttattataggctggtttgccaaaagggaaatgtagcacctatttgctttgagaccagtaggagcaatctgcaaattggctagatcatgggccaggacaggagaaggctaaaatccagccggctatctcggcaaattgtaggcaaaatcttaccagtttatgctactactttacatgccaccaagaaggatcctggattctggtcgcttttcacatgattgctattgtcgcgaaatgacatcgattgcacaaattggagcaaaaataatgcccttcacaatgctcagcagtgattgtcttgttcgcaacacttgatgccgtttctgttgagttggctgggcaccgccacagccacacagccaacgacaaaataaaatttgtacaaaccaaacttctttcaaaaaaaaaaagcatgcaaatggctatgcaatttgtacaaaccaagcttgttttttttaaaaaaaactgtaccttgttatgaagagagattatcgaaaattgcagacgcaaatggctgcacatcattgttatgaagagaaagattgtaatgttcaaacgtcattttcgttggccccgggaa

SEQ ID NO: 5896 - DNA, 40523 bp, Oryza sativa
  unsure (1)..(40523): unsure at all n locations
tagggcgaattcgagctcggtacccttactcctgcttcagtattcctaagctgttaagcacaggccgggctgtgaggaaaaatgattttggtaacctcatttaatgagggatggttgggagtgtgagggtggctgaggataaagtaggaagatattgaaatgagagataattattagaacaaacaatataactttaggaatccttatttgtagacataggattagagtctgattgccggtatgttgtcataagactttcaccgctagcttatttacaagtaatccgtgagatttttttttatatatctatgttcttattagtgatttaaacaccaacgttagaaaataaattaaagtactacgaaaactcctcaaaatcaactattttcaaattcaaattttatatgtgattcatacactaataagcaaatgataagaatagtataataatagaaatggattgcctggtttaagagggaagaaaaagggaagaacagtgatcgatggggagtgtcctccggcaggaactattttaaataaattcttcaattatctctaaattttaatcataccttttatatatgttgtgaactcacctcttcctccctctttcttcttttaccatgaatatatcaaaagaccgtttaaccattatggctatcttctttattacttatattttcttttaccactgtggccacatctagattatgttaccaccggtagttttgcttttcagcttattagatgcagccaaaatttagatttagatttagattttaaaacttaatttcataattgattttttatattttttattgtagtttatttttaacattagcttgctaagagcacacataaaaattttatatgcaattttttatcactaattcttataatcagttctacactaaacgatgggttttctcactgctccacttggctggcaccaccttctacatgctcctccgccaccaacccacctaacatattccctgcctcctaatttatgacttctctagccaccattaaccttttatctctattgtcacaccttaaagtgtactttaaaaaaacagtataaacacaggcgactaagcaatcaaaaaataataaatatacataattagttgtttaaacaccaatgctgaaaatcaactagatggaaaaaatcctctcaaaatcaactctaaaattaaaattaaattatacaattttaatttgagagttaaagttaaattatataaacgagtagagagcgtcactacctagaacctagtatagcattacatgatctactctatcatcaagtacggatcctcctcaaatgttggacgattggtaataacaaatattatatacctcttatatactccctccttccaaaaatctgaaacctatttcattctttggtttttccaaaaatctaaatcctatttgtagtcactatatgctaaattaaattgttgatcggaaactaagaagtcattctaatacttattggttgcatgttcattggttttgccacatagtgagtgagctaattgcttcttggtattgatgaaaaagaaataggtctcagatttttggaaggagggagtacctcttagttcttgcttcaagctaccatgtaggatgatataatgagctagcagagataagacagagagagcagtaaccaccctcatgtaagtagcgacctctacatatataaactcataaagagatgagagaaagatacgaatagattgagtgaaaaaataaaaaatattatagtatattggggtaggtgtattaaaggtaatttgttgtatatactatctcttcattaatgagtaaataatatgaataaaattaaaggtgaccatcggttctactatatagaacttgctctaaggcagcagatgctggagagtacacaagcttatgtgtgaacgacgtagctacagatgaaaggaaaaatataacaaatgagatgagatatgcatgcgttttttttgaaaaagaaaaataagtgaaagacaaataaatgagtgtcatcatagccccacgtactccagttttagactggcattttcaggagctaaaatcaatagtgtgatcgaagacttcattatcaagttgaacagattaactaggagtacgtactgtcaattaattgaacaagatgtgcatgcgtacgattgtcctcgtcctgcaaagctttttctccaggattattgcagcttttgggtcgctgcaatctcatacaccaatcacccttctttttcccattctcctcgtgtaccatcaatgatcgataaaccaagtggctgtaccatcaatgatcaataaaccatgtggagacagtaaaaattggttcactttagatgttgtttttcatcgacagataaaaaggaaaaacatcgtgctaattaattaagcatctatttcaaggattattatttaggcatctactcaaactttagcttagtttgtccgattcttgtcacatatagtactctgaaaacagtgcttctatagtaaaatggtactatctatattatttgtttttattatgctagacttagttgcggtgtctgtagtacgacataatgcagacaattaggttctcatgttcaacatataatgttttagttttttctatcttagctaaatttttgcaagattaattatgatgtagtttaaaataaaaagttgtaggagactagcttgtcccgttggtttcatagaacaggatatataaaagaaataaaaaagatatatattacatagtcctatacagataagctggtagtaactagcaccatgaacacaaactaagtaggaccgatatattgacactaagatatactaaggaggtaagaatatattctctgtagactctagtattaattaggcttgaccaatgttcaacactaattcaaaatctttggaacctacaatctgaattaaacatagtacataatgaaacatctaaatttatgataacacatttatcagtcaatgataagagttagtaccgaccgtcagtgctaaagaagacacttcacattagatggtcggtaaagctggtgctaactgcctatctaaggcacctaggcactctatatgaccatcttggctagagtagatgtttcagagatcaagtggaattgaagctagagtagagaacatggaattgacatagtagagttaaaaaaaataaatgtaaatgtcttacttgaaaattgctagaattagtcatgatgtgtgatatgaataaaaaaggcaacgatgcattgcagtctttactatccatagtttcttggagctctattctccatctcacgagccagaaactttccattatcgctatatcactgtagaacatgtgcgacctgatctataaagatcatgtggactttactttaactcccacctttcatctagtgtctccatgaagaatgcaacacacactttttctttttgctttgtagcgagtggggtgtccaccattatcatcgtgtaccatattttctaattcttagatctcatgtcgcacttactataatatcaacttccacgacacctctcgcgacaaaactaattatatgacttcatactttttccccctaacagccaggtggtaaatgattatgtggaggcagtgaggcagcttgcttgccatgtccttgacctgctaggagagggcctaggcctcagggaccccacatccctgacaaggctcatcacagccactgacaacgactccctcatcaggatcaatcactaccctccatcctgcgccgccgccgccggcgaccacaagtccggcggcggcccggcgccgacggcggccatcgggttcggcgagcacaccgaccctcagatcctcagcgtcctgcgtgccaacgacgccgacggcctgcagctgcttctgccggacgccgccgccgccggcgacagcgtctgggtccccgtgccgcccgacccgtccgcgttcttcgtcaacgtcggtgatctccttcaggtcagttacaaattcaagtaattgatcgattgatgttactatttcgttaaggccctatttagatcccacgtaaaaattttacactatgttacatcgaacgtttgaatacctgcatgaagtattaaatataggctaaaaaataattaattgtgcagattgtgactaatttacgagatgaatcttttgagcctaattgctccataatttgataatatggtgctacagtaaacatttgctaataacaggttaattatgcttaataaattcgtctcgcggtttactgatggattctgtaattagtttttttattagtgcccgaacacccaatacgacaccatatataatatccgatgtgacacgccaaaattttataccctgatctaaacacgccccctaagttgtgttctttgttattgaaactttcgagggctcattcggaacgcaagattgaaaaaatatagaaataggaaaaatataggaataggataggaatacaagtataaaacagaggatttgaaaacataggaattttatgtgaataggtgtttggatagagtaaaggaaaaacataggtatctttaagaaaataggtgcactattacaaaattatcacatgctactattgaattaaacaacattaatcaacctaataacatgttttagttgcttgatggcatgatttgcctcgttcccacgcgaagggagagaaaaaagaggtcagtgtggattttttttttcctttgatctttcagtgatatgactagcgcaggaaatttcactacgtatttccaacgaacgttttcatgtgatccgaatgacgccacagtaaagtaatccatagtatctaaagtccttcatttttcctatgtttctcctccattccgaataagccctcaatttgtttgtacatatttttgcaggctttgacaaacgggaggctggtgagtatccggcacagggtggtggtcggcaccggcaagccgaggctgtcgaccatctacttcgcggcgccgccgctgcacgccaggatctcggctctcccggagacggtggccgccggcgcgccgcgccggtacagggccttcacctgggcggagtacaagaggaccatgtacacgctccgcctcagccacaaccgcctcgacctcttccacgccggcgacggcgacggcgatgccggcgttggggacgatgacgaccatgaatagctggacatgagagatcttggaactgtgcaatgcacacgaaattttggatcgctggaagtttgttgcaatttcgttggattgtaatatatttatggtgcagtaattactaattaagtttgtgactttgtagtaacagtgatcagtgtccttgtgcattagtgcatattgtataggctacagcataattatatgttctgtttcaaatttttgtcctaaagtcaaatattcataactttgattcattgatttctaaaaatttatttagtttaacatgataagattcatgtttttagattatctatgagaaatgctttcataatatatttttcacatgttattaaactatataaatttcacatagtttacatgttgtccaactaattctagaaatttattttgtttctacctttacttttgtgtgtatgtttgtgtgaagaaaatagaacttcccttctctcttaggtctgaatctcttccctgtttcaatttttgtttcttgctaatgttgcagatattgtcctttgcttaagccttgaagcaaaaaccttagtcttacctgcacgctgcactgaggaacgtagcagtcatagatgttgagatccaaaagattttcgttgtctttttcccttaattctcgtggaggtactacgttttggtgtgaaggcttactctcgttcgttgtttgctttttctttttcttttttggtttttttttcccttgcaagattccttttgttgaaaggggactcctgatctttcttgtagatcttttttcccccaagggattgttgcgtacatcttccggtcgactgaacgtaacactgaacctttctcccttcgcggccacggtatgtggttcatgtcccaaaattctgaaccttcctcaaggctttcagagatcataaccatgtaactaaatctttcagagatgtgtagctcaaaagattatatatttgcagttcttcaaccttatataggagtataaactttcttagctttattacgattatagatgttactaattcaacacaaaccaaacaccaaaagttgagtttgagatgatctgctcaagcaatctgacaagttttgaaggtcaagatagaaccagcaacaatgcaacaaggtagccaaggtgagtcttgcgcacatgcaagactacaacacaagatggggggcacaataaaaacgtgtgacagttccagcgtctcaactctcaacatccaacagaacataaatcgataatcataacattcatagcattgttatatttcatcaagataacaggaaaatggtgtcttggttcagtttgccaagtgatacaagatacagcttaaataatgacaatggatacaatggttagggcttcgcagcactcccgaattaggagctgctggtggaccgaacacaacaacaaacttcaatttcctgtgtacacgagagccacagacctgaatcggtgttgctctcgtcgaccaccggtatcacccagggtagctccaatcccatcgatggcagctcagcaaaaacgaatgagcgcgcatcgaggaaaatgaatggatggatatctagtgtaaacctatactaatgtacatggctatagtgtgttcgtctcaagttaattgtcgacaagtactcgtagtatacttgtgcgtgcagagtagcatgtataaaagggactctgctgttttactcgacgacatgggacttggctgcacggcgtgagcacctagttctcttcttagaaaggcagcatgcacagccttcaagcagctcgaggtcctcatcgcaggtcagaatagaagccagctcggggttttccaatagcatcttagaggtcagaaaaccagcaatagtccatgtctgatatgaccgagattgcttcccgatgaatcttccagagcgggtgtcatagtactctggccatttgtcagctgccagcttctcctcggccacagcaatggctcttcgggccaactctggtcttcccattttgatacaggccaatgtaaactgtagacaaataaaatacactggtaagggatgattcataagcataaaaggagcagaaagtttggaaacagtctgtcaatatctccatacctgccacagcagcgttggccaggatccaccattatgatatgaccatgggctgcatattaacaaaatgtttagatgtcaacaactgtggaaatgaaatagaaacacgtcgtatgaaaagctacacgaacaaactaagttgcccataaaaaatctgagtgcagcagggcatatggtgatatttaaaagataaatcagaagaggttttgagcccttgtttcggttattatgtgtttgctctgctaaacatttcttacaagataatatcagctggttacaatgtttatttagtggatactacatgtgttcactggatcagccaatgatttatgtgaaattatcattaactaagaggtcaggttgaacgtagatcatgaaaatactagcaataaagaccagttcaagaatccttacgtgttcttaggatcactgccggtaataatgcgccattcatcatcttccattgcggggtaacatatcttgaggggcatgtttgctatgagatcatcccatttctcatcaataaggctaagtattccctcagcttgttttggagtagttagagatgaagttattgcccaaaggttgccgagagagaagaacctgaaatccatgtgagctggctgcaggttcccgatgagatagccacctttttcaggaatccagtcaacaagccaagaagggatttgctcaggataaatgttgaatttgtttgttgcatcatgagagtattcttctgttttgtatctgtatatctcatttatcttcttcatgtcaacccagtagtattccctaatatgaaaggacagcgcactcagcctgttattaatggcacgaaggaggttttttgacccatcgttcataacaagcatttctcgtgagcatcgtagggcagagtagaacaaagcctgaaaagcaggtacaattggtcagttcggataatcttttgtatctagcttcaaagtagcagtatagaagtactgtctctaacagcacgttgatcccttcatgtcaggtttctttatcttaatagtgatataaaatagtaaatttatttactaagaacagaatttcctacagtaggctaaaccaattataaacaacattatcagttgctcagaaatatcattctgtaataatttctactaaaatccaacttacttgaatttcaagggggtgcccatgtattcccatcctcctgtctatcatgcatgatccgtctgtgaccagtaaagttggaaacatatcgaacccatcggacaaacacaagcttaagataagtttaatgccggtttgcacatctactctttcctgcagtgcattgtcccctgtaatcttgcagtatgccctcagcaaaataatccaccaaagtcctgtaaaattatttggggtaaactactttgataaatctgtcatagttgataaacgaatcaagtgagagagagagagagatttacctgaatccaccggagctacacgtccaatagctgactctccaaagtcagggtccaaaacttcctcaaatgcttcgttattgtcatcaagaggcacagccctaatcttaaagctagctggcatcaagccttgcccagggctgtaacaatcaacagtcttctcccagctctggccatcagacatagaaaaaaaatcagcaaataaaatcctaaaatgaattaactgccatgttgagacaataagaaaactaggctcaaaacaacatgaataagacagatttctgtaaccttactgttaagtgctagtgccatttgtataataggaaaattttgagaattttttatatgtatgtcagttaacatgtaagttttttccgttgaattattttcataatattccgaaaattagctgggcccaattcatcactagcagtatttattgcactagcaattcatcattttgtgacaaattagctgctttgattcatataataatatataggctgtctactggttcatcagactacgtgagaaagagacatagtattattctgcaaaagggaaaccttatctccatctaccccacagtagctaaagccatatagaatacgaattcatcataggtcataggactagacaatcacatctagcaagcaaattcaatctgaaacatgatattcaaagacccaaagtggcagtaaacttctcatatatatctaaccatgcataattctgtattttcctccccccaactagcaggaaaacctaacgtgcacgcaattagcagttctcagtacccacggtatgatgattactttggaatccgaaatcgtttggccccaaatttgaatcaggatcaggatctgaatcggctcacctgcagctgcagggtgtggaggaggaagttgcggacgatctcggtctcgccgcgcatgaggaaggcgagcgccgagggcacgaagtccctgatgaacacctggtcgtagttgagcgtctccgtgcactcggggtcctccgccgccaccgtccccaccggctcgccgcagtagctcaccaccgccctcctcagcagcctccacgcctcccgctccgcctccgtctcctccctcgccttgagcgccgacgccacctcctcatcggccgcagccgccgcggacgccgccgccgacgagggcggtggggtctcgaccgggaacgtgtccgggaagaggacgcggtcgaagaaggggaggttgccggagacggcggcgcggggatcggagggtataggtggggtcgccggcgaggcggcggtctgcccggactgctgctgctgctgcgacgccgcggatgcgaggaagggcaggcggcggccgtggaggtggtggtgcgggtgggggcatctggggaacagcggggtcgcggtggcgaccgtcgccgccaccgccgccgccgtggccgacgacagcagcctccggcggcacggcctcactgcgactgcggcggcggcggcgagccccatcggggtttgaccattcatagagggcaccacccacagctccggcgaagggcaccgatgcgataatcacaaacttaccagggggctctccgcaaaaaatccaataaagaggaaaggtaggtaactttaatgtaaatacggggtcggtgaggggtgtttctgcgaaagtgcgagcggggttcggtgcggtttaggtggtggaggaaagcgtaatggaggatggataggggggcagaggaggcggcctttttatagagtgcggtgtgtaggcgccacgctgggcccacctggttttaaaagtgcattgttttaaaaaaaattcaacgtttttttttcctctgtcctaattaggggaatcttggattggattttcgggacggtgaaattaccgtcgtgggactcgtgttttctattttccccttttctgcatctctggacagagagtttaattttgggctcgcagagtgtacgcattaattttggacgtgacaaatctgtagtcctttgacttgtaaatacattagggctgtgtttagcttttaaaattagggagacgtttagagaaagttggtagtttggaaaaaaaaattgagagtttatttgagtagaaaagttttagatgtgatggaaaattgagagtttaaaggaatagttctgtcaggcataacttgaacagtgcaatttactttaagtccctttcatgtgatcatttacttcctaatgtttatatattataggttaaaaatatgatcttttgattcgtaggaaaatacttaaaatttagagaatttgaatcctagagggaaaattcccaataaggccttcataagaaaggattaaattatatcaatttttttttgaaattcctataaaatgaaaaatcctacatagattttgaagaaaagttagtaagagctaaaacctttttaaaaaaatttctatcaattttatctctattatctgatttctatggttttcctgtagtctactaaaatgattatttgtgtgcaaaattaagtgtttttctatttctttgttttttttaatccaacctactaagaaaaccctaagtttgaaagttttggtttatatagatccggtgattctttttttccttcttacaaagttgacgaatagcatcattttgttcttggaataaaatggcttgctcaaatgaataacgtgtcatggcctaaatgagaaaagtcaaaactgggcaagggaaaatgggcagcgtgtgtaaaggattagtgggtatttctgtcattacgcaccaaagacagatcaaagaccagctcaaggagaaggaagacagctcgtgcgggccgctgtgtgagtcgtcagagaaaaaaaatacaaaagcgtgtcggggaaaacaattttctatacttaattaaaaaaaagtcgcccgcatccgtcaccaatcgctccgtacgtaccggcccattataccccttaaccggttacgcacactgacacgtcggtcccaccgagtggtgacggtccgcatggcccacaagtcagtagctactccgtagaatttttctccgtacgttacgaattagaacgcgcacccggtgccgtcacatgggatgcgcaccgcccaccggccgcgcgccgcgacgccgtgagcacgttttataataataaacctcggccgatattttttttaactggagacggatccaccgtccgatgggggatcgaacgggtgggatggatgccgcgcgtcccgatcgcgccgtgtggggacaggaaagggagccgttggttggtactactagtaccatgtgaaagtaaatacgaagtactagaggctgtctcgtggggcccagtggtcggtgactttagaaggtgaaattgaggataagatcggtagggggaaaatcctcacgtagtgcgagtggacacgtcacgttctgctgcaaagttttactactactacgggccagtcttttcttgttttcctgttggcgaatagtcgttactagtagtacttttatcgaaaataatgctccggaaaggaatttgtatccacaaacctatttacagtgttacctcatttatttgtatcaagccacggatcgacccgtttacatctttatttgtatttgagatttaagacagttaagtctgtgttcgggagtgatcctatccttcactctccagcacgcaaaacaaaatagcatttatctcataattaattaagtattagttaaaataaatttaaaaaatagattaatataattttttaaaataactttcatatagaaaatttttaaaaaaacgtaccgtttagccgttcgaaaaatatacgcgcggaaaacgagagaggtgagttgggaagataaagataaagaactcagcctaatacaagcttagagcgtgatgagggaatatgtaagtctgtacaacgtacgtggagaaaaaatatgtaattttctttttcttcgagagagtatgtcaaaatttgatggtcaaattatttgtgttaaagaaaatgagcaaacttctactaaaatattaaaactttaaactcaaaagtgaaaacaaaattaaccaaagcccatatttgaaaacttttcaatctaaattttaaagctttcaagttaagatttgaagactttatttttaaccttgatttgaaacttacaacttagatttaaggacttttgaatcaaaatttgagaactttttaattcggatttgaaaactatcaaatcaagatttaaaaatttcaacttaaatttaaaaaaaattcaaattaaatttcaaaactttcaacacaaattttaaaatctttcagctatttcttaaaaaacttttacctaaaatacaattagtgctaattaacgtcattagcgcttagcagaggaggggagcgcgcgcagctgcgctagctatgaaaccagcacgcacccattagtagtcttcggtataccctaccatattcctcaaatacgtactccctctgtaaaaaaataacttttataaagaaatttagatataaacatatccaaatttgtgtacaagagcagaaaagctgatttcttttgagaccatgaagcaggggatatggcatggatatggtggggattgatctagcaatagtaatagtatccaagataatcgatgtttacgtatcttagtggtggttatcgtagtattggagtaaatgtacatcattgatggtggaatagcagtattccatgcttcctcctaatggatgtaattatgtgaaattgattttattttccatctcaaaatataaagcatatgttgagattatgggcatataaggatttaatttattccataaataaatcatgacattacagatgaaaactagcatgaacgcatcattagatctacacatgtaaactacgcagaataacatgaacagatcaaatatgcgcaacatattgaacacgtaccgaggtgacgaaaagaccgactgcttggtcgaaacttttcgcaggtgtctacgaaggcacgaaacacgcgagcgaagaggaaggcgagccgtcgcgaacgaacagggagcagtcgcacgaagcgcttcccaaaaaccttattgccgccttctcccggtgcaggacgtcaaaggcagaggttccggagacctgctctcccgatcgctggtgcacgccggcgagcgggatggagtagtctacgagcgacggcgcagtacagagtaggaggcaaaccctagattgattttcgcatatattgcgtgaagacggcgggtcggtttatatagagaagggtcgcttgatcagggcgcccgcacgatctctactgcgcgtaaccgaaccggataagtcgcgcgtaacttatccggactccacgccgtttgcacgcaccggatttttcggaacgtttccaaaacaaaacgaatccgaatttgcagcaaaacaaaactgcaaaaggaggctgcatctgcgcaaggatgaggagccaatttttcggaccattcgacgcgtacgtcgtgcacgcgcgccgcctgccctgccctgccctgccaggccaggcgaggccaggcgagcgagcgcgcgcgtgtgtttcccctcttctctccaccacacatgcttcaagtggctaggagggcatcctcccttttaaggaggtccccctctcctagaataagcaaggtggtactaaactccacatgcatgccatcccatgaggtgggcttttgtgattttccaaagaattaatcttcgagtgggctaaggcccattcattaattccaacaatcccccaccaaatctcaaaatcccactgagatttgccttttccaatgtactgtttatataccagcggttcgatggagaccaattaaggttgaacatccacctagaactccaagctacacttactcacaacttgaacaatggactacgccttgaattgcaagtcttgtgcaagcaagtttcactcaaagtcttatctggtactagaccgtctgtagactacccctcgggtggagcgtataagtcatactcctaggtctttagtaagcttcctagaagattcacccaaaatcttcatagactgcgaccaacagtcaagctcacaaaggtgagttccttcaagaatgctctgcaggacaacatctttgctaattaaagccaacagaactcattaaggcatagccaacctgccttgcagctcacgagagtatatgcatcttcacttggatagggtatatatattggtactctcctctagtttattaatggtttgttcttcccaggatctaattcacgggatctccgatcacatagactgggttaccaccatagtataactcacatgggtctcaaacccatctccttcgatgcattgtctatcacatttcgtgatagtcccttcgtgaagggatctgccaggtttctcgctgtttggatgtaatccaacgttataactccggagtttcttaatttcctgacagacttcaatcgtcttttcacatgtctagacgatttcatattatccttagaactattcactttgacaattaccgtttgattgtcacagttcataaggatagccggcaccggtttttcaacaacaggcagatccattaatagatcacgcagccattctgcctcaacagtagcagtatccagtaccgttagttctgcttccatggttgacctcgtcaaaattgtctgtttgcaagacctccatgaaacagcaccaccacccagtgtgaaaacatatccactagtggctttgatctcattcacatcagagatccagttagaatcactataaccctccagtaccgcaggatacccagtatagtgaagtcccaattccacagtacctttcagatagcgcattactcgctcaagcgcacgccagtgatcatctcccggattagaagtaaatcggctcaacttgctcacagcaaaggagatatcaggcctagttgcactagccaggtacatcaacgagccaatgatttgggagtattccagttgattcctagcaattctcttgttcttgcgaagcaacaagctaggatcataaggtgttggagaaggcttactatcaatgtagccaaagcgattcaagatcttctccacataatgggactgcaagagagtaatcccattctcacctctaattagcttaatgtttaagataacatcagctactcccaaatctttcatatcaaaattttgagacaagaatgatttaacctcatttatcacctcaaggtttgtcccaaatatcagtatgtcgtcaacatacaagcacaaaataactccctcacccccaccatggcgatagtacacacatttatctgcctcattgactgcaaagcctgcagatgtcaatgttttgtcaaatttctcatgccattgcttaggagcttgtttcagaccatacaaagacttcaacaatttgcacactttgccttcttgaccttcaactacaaacccatcaggttgatccatatagatctcctcatccagctctccattaagaaaagctgtcttaacgtccatttgatgaacgagaagaccatgtgaggctgctagggaaagtagcacacgaattgtggtcaatctagcaacaggtgagtaagtgtcaaaaaaatcttcgccttctttctgagtatagcccttagcaacaagccgagccttgtacttttcaatagtaccgtcaggcctaagcttcttcttaaacacccacttgcaccccacaggtttacacccatagggtcgctctgtcacctcccaagtcccgttagcgataatggaatccatttcactacggacagcctccttccagtagtctgcatcaggagatgcatatgcttctgaaattgacttaggagtgtcatccacgaggtacacagtgaaatcatcaccaaaagacttagccgtcctttgtctcttactccttcgaggagcttcactgacatcctcctcagagacaagttcatgtgtatgttcagtttgttctggtggtgtgattgaactgggaattatttcagagggttggttcgaaccactatgtgtatccttcattggaaaaaagctctcaaagaaggtagcatcacgagactccataattgtaccaacatgcatgtccggtacctcggatttaactattaaaaatctataggcaatgctatgatgagcatatcccagaaaaacacagtccacagtcttaggtccaagtttgcgcttcttcgttattggtacattgactttcgccaagcacccccatgtgcgcaaataagaaagtgatggttttctaccaatccatatctcatatggtgttttgtccttatttctgttaggaactctgtttaacacatgatttgaggtcaacaatgcctccccccaccatgccttaggcagtcccgcggtgtccaacatggcattcaccaagtcagtcagtgtgcggttcttcctttcagcaatcccattagactcgggagaatagggaggcgtcctctcatgtatgatgccatgttcctcacagaataagtcaaactcgttcgagaaaaactctccaccacgatcagacctaagcctttttatctttctgtcaagttgattttcaacttctgccttataaattttaaaatagtctagagcctcgtctttcgttttcaacaagtacacatagcaaaatctagtagcatcatcaatcaatgtcatgaaatatcgttttccacccttcgtcaacaccccattcatttcacaaagatctgaatgtaagagttctagtggtgccaagtttctctcctcggcagccttgtgaggcttgcgaggttgcttcgattgcacacaactatggcacttagaacctttgacaatggaaaacttaggaattaaacacatgctggaaagccgagacatcaagccaaaattaatatgacataaacgtgaatgccaaacattagcctcatcatccacactgccacaaatatggttcacagacttattgcagaaatcagaaagggaaaagcggaacaggcctccgcactcataacctttaccaataaaatatccatgtttagacacgactactttattagactcaaaaaccaacttaaatccgtctctagtcagacgggagccactaacaagattcctgtcgatagaagggacatgctgcacgttcttcagctgcacgatctttcccgaagtaaacttcagatctaccgtgccaacaccatgaacagaagcatgtgacccattccccattaggacggtggaaccccgtgcgacctgataagaagaaaacaatgagatgtcagcacaaacatgtacattggccccagtatcaatccaccaattagtagattgattaactgaaaaaacagtaggtaaattaccatacccgcttccatctccagtgttgccaatggtcacattagcagacttagaagtctgccctgcaggtgccttcatccccttgcgttgtggacacttcctagccagatgaccaacttggccacacacaaagcaagtcctctcatcctgattaggattgttgttgttcttcttctgcttcttgaagttggtggtctgctgagctttgtatttccccttgctcttgttctgggccttgtgcacaacattggcactggactgcccaccatcgcccttagacgcggcatctttttcccgagctttctcctcaacatcaagagacgcaatcaacccctcaacggagtattcctgtctcttgtgtttgagtgcagtaccgaaactcctccaagatggaggaagttttgcaataatgcacccggccacaaatttgtcgggtaagacacacttaaggagttcgagttccttagccatggtttgtatctcatgagcctgttcgactacagaacggttgtcagccattttgtagtcatgaaactgctccatgatatacagatcattgctagcatcagtagcaccgaatttagtattcagtgcatcccacaactccttagcgtcggtcatatgcatatacacctcgaccagacgatcgccaagaacgctaagaatgcatcccacaaagagagtagtggcttcctcgaattgcttctgctattcagcagtaagaactccttcaggtttgccagtactcacccagaagcatttcatagctgtcagccacagagtgaccctgatctgccatctcttaaaatgcacaccggtgaatttatccggcctcagtgcatcggcaaaaccagccatagtaaaatcacagtgcctataataaggtttttggattgttgagattatgggcatataaggatttaatttattccataaataaatcatgacattacagatgaaaactagcatgaacgcatcattagatctacacatgtaaactacgcagaataacatgaacagatcaaatatgcgcaacatattgaacacgtaccgaggtgacgaaaagaccgactgcttggtcgaaacttttcgcaggtgtctacgaaggcacgaaacacgcgagcgaagaggaaggcgagccgtcgcgaacgaacagggagcagtcgcgcgaagcgcttcccaaaaaccttattgccgccttctcccggtgcaggacgtcaaaggcagaggttccggagacctgctctcccgatcgctggtgcacgccggcgagcgggatggagtagtctacgagcgacggcgcagtacagagtaggaggcaaaccctagattgattttcgcatatattgcgtgaagacggcgggtcggtttatatagagaagggtcgcttgatcagggcgcccgcacgatctctactgcgcgtaaccgaaccggataagtcgcgcgtaacttatccggactccacgccgtttgcacgcaccggatttttcggaacgtttccaaaacaaaacgaatccgaatttgcagcaaaacaaaactgcaaaaggaggctgcatctgcgcaagnatgaggagccaatttttcggaccattcgacgcgtacgtcgtgcacgcgcgccgcctgccctgccaggcgaggccaggcgagcgagcgcgcgcgtgtgtttcccctcttctctccaccacacatgcttcaagtggctaggagggcatcctcccttttaagaaggtccccctctcctagaataagcaaggtggtactaaactccacatgcatgccatcccatgaggtgggcttttgtgattttccaaagaattaatcttcgagtgggctaaggcccattcattaattccaacagcatattagttatttatatggccttctgtattctttaactattattattttcataatatatcattgattgttgtatggaattaacattataaaaaagtacttgatatgaatataataatatgtaatagaatgtgtggcacaaaatatacattcttttctaaaaatatagatacattatatctccggacagaggaagtgtttttaaatagaagtcgttctagttctttttaccaggaacatacaatctttgcaaattactcgtagtaaaagctagttccaatgttctttaactcattttctcgtaaattattgaggtagtattttggcaataacacgtgcaatagcgtacaatcaaacctgttaagtggactgcttgcatgcggtgctagccgactagccgagcacacgttttgtctagttacgtacattcgagttatatgtaacctaattattctatagttatattttttaaattttcttaagaaaaattgttgaatgttcgctttttcttcgacgtgcgttccctcactcaatcaaaattgtaataaaatacaagaagtaggaggggtttaatcatgaatccattgtggaaatccaggtagcggtccgaaaagggcaaaagagcaaagtgagtagtgaaagcaagcgcatgttgattgggtgcgtgcataccacctttttactaagggatgtacaacatagatgcgtgatgtggatgttgttcttttttcctggctatagcctctcagtgttggggtcttgtattttttttcctctatcaatacaaaacgtcgcactatcttgtgcgtgttgttttaaaaaaggcaaattttgctaaaggacatcgcaattgttgtatgtatttagctcagggacaccgcgaaagtgaacttttgggggaagacatcccataatcgtgaatatttgctgatggacaccgcgccgtctcctctccacttgacgtgctgacgtggcagacgggaggctattttttgacgcggtcggacgtaaatacccctgtgccttatctcctctcatgcactcggtagaaagagcagcggcagagccgatggcgcccggcgacgttgttgccgatgccggcggcgatcggtggcggttctgacgatgcggctaaaagagaaagtgtagagggcatccttgtgaatctataggtggtggttttgtgcaatatggtggccggaatagttgtcggcggcgacgcgagcggcagtgactctcggcatgacagtgcatgacgagctccggctcgtttccatgtgagtgagtacatgcgtgcgtggctataaggctcctggagactcactgaaggtcgtctgaggttcggcgatggatggacggcaatggcgaccttcgaaatgctccagcggcggcagagaacggcaggtcgacggcgtcggctccttctggccttcgggctgtcaaagggaggagggaaacgattcaaagaccatctgaggatgctacatgtgcgaggaattgtgccgaagctcactcgggagcgaggaatcgaaggaatgagccggcggccggacttgaggaagaaaggttcgatctcctcaacggcagtgcctcggatcgattcctccagtagacctccttctgggatgccggcgatgcttttggcgcagtggctcggtcaacgatggcttgagtcgacgggaacggcgaagcgacgcacggcggcgccctggacaccgagaacgccgacgagcgcatcttcatgtgcttgatctgcagttaattaggatgcaaggacatggctagatcaggtagaggaagtagttcacgttcccatggataaaatgcgacgaagctcaccagaggtctctaagattggatcaaacaccttcgggcagagaaatgaggagggtgttcttggagataaggcgcaggggtatttacgtccgaccgtgtcaaaaaacagcctctcgtctgccacgtcagcacgtcaagtggagaggagacggcgcggtgttcatcaacaaatatccacgtttatgggatgtcttcccccaaaagttcactttcgcggtgtccctgagctaaatacacacaattgcgatgtcctgtagcaaaatttgcctttaaaaaataatcatcttaggttcttaacccaacgcatgagcgcttgaaaactatgtaatgaagaggattaaatacgaagatataattaaagattttatttcaataaagactaaaagatgatgatttccagtagatcataaggttaatgaatgtgtgttttggggattaggatcctctgcattagagtacaaaatgcagagatgttacagtaaattgcattagaagacatctgcaccatccattcatagtcctatgcttgttatcaacctccacagcatgaatgcgatagttctagcttaagagcccctttgaatcacatggttgaaaaaatggaggaataggaaaacacatgattttgataggaattgaagtgtaaaacaaaggattgcaaaacacaggaaaaacacatgaatgatcgtttgattggatcacttttaacaaccaaatttggtaatatcggcatcgggaaagaagattagattggtaaagtcggaggcggagattgagttcgaaaacagagcaggaatcggctggagtccagataggctacgattaggatcggctgggtctgagtcggactgggtaagccgatgcagccagttccgacaatgcaacttgatgtatgatatcgggttgaattgaggcgcttcaaggtgattgccgcacatggatagagtcctgagaaggcaattgtatctattaattaggatgttttatgtaatttccttagagatatgcttgggtaaaagtctgccgcaaagacttgtggtatcttagagtttgttagagatagtagtcgtgtccgttatggacatatcttgtaattctcgggtataaatagacccgagccttatgtaacttttaacacatacgttcaatacaatctcggcgcatcgccacctttttgctttagttttatttcgacgagttcttactttcgggttgagctgcatcggtttcgatcttcaacaagaggtaaaacttgctatgatggattatgttctcgggattagtgcttccatctttatgatactctaatcttgtctatataattcgtcaagttatcatatatcttacataatcttcgacaatatcgtcatttaacttacaatcggctaacacctgtcaacagaaggcagccgattaggttaaatagcgatgttgacctagattatataagatatctaccactctatgaaacttccagcggcttgattgtctagatattgttcttcttttcatacttaaatgctgcatcagttgagtttgatctattaagtcgtgcttagaatatcaatctctagcctgccttctggtcgccgattagggtagcgtcggagtttcagccgatcttacctgatttaattgtatttgctctatatgcttcagcgatatgttaaatctgtcctttgtgtcaagatcttatttgcatttaagtatattaggtttttgtttgatatattatacttgtttcaatattctgatatagagtagtatcggagtattagccgatatacgctagatctatctgatcggctatgctataaacatatataaggctgttattaatatatatttcaatctaagtgatttatactgtctcgacatggcgaccgatctatcccaatcacttgatttaagtatatattgatataggaactatatgttgttaatatgtacagccgatcgaatagatttagttctttattgtctatttacaactgccgattgattaacatatgacatcggctcaaagataaatgatatgtcatcggcacctagccgatcggctatcatttatagatttatccgcggtttctttgtctctatttcttgttgattgtagaatcaaatcaactggcacgctaacacacccgaaggcgagttttggacctgcactagagttaagcagatctcccaggtctgtcaacaatcacagaaaaaacgcaggaatcgaatgagagagatagactcaaaggaaatctttcaagaggttagagctcttgctaagtctcctccaaaatccacctgcaatgtgtcatttcataggaactttataggatttggaaaacttcaatctttgaatcaaatggccaaatagaaaattttcctatatgatttgaatcctacgaaattcctacctaaatcatttgattcaaagagccttaaaaagtagaatattgttgctacagtaccccggatgatttgaaccattcgtttttaatctgagtgctcaagtgctactgcaaaacattgtagcaccttgctttggcagtacaaaccgcagaggatccagatccgtgttttggttatacgacttttgaatttcaggagcctcttttgaatttttgcactagggcctcaaattcgtagagacgtccccgcatttaagaaccatgttattcaatagatgcgtatatttataagttagctaattaggcaagtatagttaggtagtactacgccggagtacatgttagagtacgtgcgattacccctgaaaagtgttttccagtagttagttaggtagtacccatcgctacgtttggcactcatattgaacggtaacgtggtaaggatgaaaactggtcctcgaagcatctattctagcatccgattgcacacggcctaagccatgacatgcctcggcactaaggcatccggactgagcttttacttttcaaccatccttttatctgcagagatcgatcttgaccccggtttacttgctgtaatagttgaccccatctcttaatgttaatgcaactcctagcttgtttgtccccttcaccacattcaggatttagacaggaaactgatcatccatgtgtgctcacatggcattgcacgcacattgtatcttttaatttgtttcaacgcactaacttcttaagatgtggtacatgatgtatgggaaaaaagaagaactagcagttgcttaattgtgcgtcattttcccgaaacaataaattgcccgtcaatgtcaagattgcagtgctggagtttgtttcacacacccatcacaccaaggagcatttccagccaagtggtaagtcataagtagaagtacttgcgattcatagcagcatgacgtacgggatcccaaaatccagtcaccttttcatttgaattttagttagcatgaaaattctagaataataatctaaatttattttgaaggttagaataatctaaatttattttgaaaggctagttagaatctaaatttgaaaattcatgagtttttagagctccatgaaatggacttcactgaccagctggtccacaccaaaccagaccacaagctaagatgacaaaaaaggagtgaaatttcaagtggataagagttcttggatgacgtggccgacatttgggacaccttttccttaggtggcactgatggctcctatcctcctgtgacccactagtctgtttgatcctacttggccttttttgtttatgtccagtagttttctcccagccatccacctaccaccacgtgtacgcccctcccacgaagcaaaattcgtaccaaataaaaactcctggaaaaaaacatttggcaaattttatctctacatttgacgaaattgtatttgttgctatctacacaaaatttcagtctgaaaacgaaaattactttgagagaaaaaaaaatggtaaaccatgtggccgggagacaagaaaagcgactcgatcggcacaaaagggctcacaaaagggacaccgagcgaaaacgagaccacgttccagactcaacccctactggttactccgtcgtcgccgcgtgcggaaaatgatttcgcgtgccaaattatgtggcatgaaaaataccctaaaaaaacaattacatatatttattcatatatcccgacaacgacccgtcaaccgttggggaagaggagaagctgaggatgggttcctctccgtggctcacacggataacgtccgacgcggctcgacgcgggcgggcgggaggcgataacgccggcggacttggatgacaaccgcgggccagtcgccgtcggggaatagcacaaatgaaatgttgccgagagagttttttttttttcatgcgatctcccgagaaaaaaaaagaaaaaaaaaacgtctttgctttcgtcgtccgttcgtgtccgttccggcgtgcgaaaaaaaatctggggatggcaccgcggaaacgtcgccccgggctgggcgtttttgtcgtggaaaacgtacgctctcgctcgcggcgacgcgacggctcggctgcaaatatccacagtagcatgcagttcattctgcaaatgggagtagcgtgtgtgtgtgtgtgtgttttttgtgacgctgcgtcgttctggctgggatgaacaaatatccgagattcttttgcaatggtggcagtgactgactgactgactgactctgttagttgaagacgttgctgctagggagagagcattggaaaccagggaaaaggggcgtctgtttgttgtgttttcgcggaattggtggtttgcacattgttttaaaggtgtcatggagttggaacatacttgtatgagttattgatgtgtagggggtgtttggcataactcgagatctaagagtttttaaactatgaatacaaatcaatagatctggatctacaattatattgataacttttgaatgaatcatttagatgaaatataaaattttaaaccactataatttaatatacaaacttcaaatccaatgcgaatttaagatggagagttatgccaaataagaccctagtatgtgtctttacgatgatattttccaaatttctctttttttttaaaaaaaatctgctgttcacgaaagaaaaggtaacaccatattgctttcaaccagtgatatctaggggggtaaaggataaagatgtgagataagatggactgcaaaactacgaaggtaaaaaaaagaagatgacgaacgtgctttaggaagttctttttttttttcttgcagctgctttactagcatattctttgcaagtttatattaaggccaagcgtatcaagtattataatggagtgaagcagcaaggcaggacttcaaaattttgctttataatgttgacatgattgtgactaactacaactagaactttatcagcaattgtatgtccaggctgaaggaagaggtaggcgaatttgtcttgccggtggtggagatgtcaaataatgaaaatcacaatgcattttctcctgcaagatgctccttcacaacatcaacatccattgcttttgcctcatggttaaaagttcgacaagacaaactccatgcagtactatgataatgtttcaagatgttagctgtacactacaatctatcccaagtagaacgttttccagttcagctgctatacagtgtcaccagtgacaaggctaaaaaatacaaagaacatcaagaacttgtaggttgagtagtgtgcctatcttgaccctcaatcttttgtcacagtgaatcaaacaataccaaggatatcaggggacacaaagatgtatagggtcaataagcaactaggcaaagtaaacaaaagcagaatgcatcatctgattcataaattgcacaccactgtatgtgacattagggcgcctctatttagacaccgaatgctgactgaattgttgacctgacaccagatgataggagcgtagttctagtccaatctgcaacgtttttcttggcatctgaaaaataaccacaataaactcagagccatagttaaaagttcaagcagagtgcaatgtcttatatgccaggcacagatgtcaacatgcttgggtagcctagaagctgacttagacaatgggaaagctagaagtgatatctgaagctgacagaatgaatgtatttcctggcatacaatgtacttccccatggaattatccagttaaagacatccagagctatgaaaacacaagtacgtaaacagagaagaaccatctaaaactgatcagaataggtacacaaaacaatgatggcttcaggataaaggcaactggtctagattctagaacacattccaggctgaacatggtctgtttactaaatgaactgtactttcaaacaagatattgatgttgaaggttctattttctcagctaagacaatgttaaaaggacatgaacgcacagcattctgttgctaagtttaccattttgtaagcaaagatatagaaattcgtgcaattcacttccaatgcatacctgttctgtttctaactggctattttaagacaccaaaaaaaaaaaatcctctaacagaattgcatcttacatgccatgtagacttttctaacgagaaacacggaattctcttcaagagaagtctctcacctttgttgcacttggtgaagccaacaatgtttgctatgctgagactcaagcaaactccaacaacaagaaggtaatcagcatgaagtctgatgagtgagaatatcccaagaacaatccatgcagcagcctgaaacatggaaaaagcatgtttatttcaaatagccttcaaagaattacaattaccttcacagttagtaacctgttctcctagagaattttcttctgttccaaattattttctaatttgaacattattacagtaacaagaaaatgaaaacatgagcaactctacaataaaaggagcatcttttttttttacaaaacatggatataattgcttgacaatacgtcgtcaaacatgaacctgtgttaaaaaaaacacggatataatttttgtaaacatgttcctttttcaataaaaaaaacatgagcctatattgggcttgtttggcacaactctagctccagctccaccttagctccacctctggtggagctggaacttggccaaactgtttcagccccacctaaaatgggagtggggctgagtggagctctcttacaaaatgaactagagaggtggagctgggtttaggcagctccacaactccactctagacccaactcctggagctaagtttaggagttagagctctaccaaacagacccattgtttgacaatacctcatcaacatttatgtagtgttcacatgatgtattctgtatttgctttctcacagtttgccattatgggagctttaattgacgtgaactttcagttttgtgagtgtaaaactgtagatacctttatatgtaacactattgtagactacaattttttacaaaagcaaatcagtgaatcacagtccagattagtgtgttgggtcaactagcaggatatttatcaattgaagagatttctagccatccactatccctatcatgtaactccagcagaacaaatccttaatttcctagtgtttcatccagcttcaatgctgggtagctgaggaacacgtcagatccctcccagatgtaatcctctgcagaagcttcctgccctgcaacaaggatgccacatgcgctgcagggccacatggagctgaccaaagactttacgcttgccttgctccggtcgatgcttctaccggcctacgcagtctgtcctctgctctcgtcaatgcgtttactttctattttgcttttctcaagtgtcacttggtttatcagtgaatccatgaatgatttagtcttcctatcctgcaggaagccagctgcaatacctggtgcagcagccatgggaagaagggaattggggaatgtgagtttgctcgagatggatatggctaagggcagggagccagggattgatgactacatgctgtgattgcatgcgtttacttaaggatctaatctggctgcaaggggatatgtgtccttactcatgtctatttgaatgtttcacatgggaaaaaagcaaaatcatgatggcaacggacaaagtgatgaagaacttaagggtggaccaccatattcagtgacatgaaaccaaattttcctagattttaatcataaatgcaacagaactagcaaagtatatactatagagtatttccaagaaaaaaatcaataatactatagagtactgtttttataaccaatattttttgcatttacatctaaacggtcagacataagagtatcaataggttgactttacagatcatactacgacttgcattttgggttgaagggagaatatgacaagttctaattctaagtttacaaaggagaaaaaatagctatcctcagatcaacaaaattgtgcataaattacatcaaaatatcaaatcaataattaactatatgtgtagatgcacaccatgacaaaaaaggccgtacaaacaacacacatgtgcaaaaatgatgcacccaggggcggcgcaaggctaggtggaagctttacaaactgacaccatgcctaccagaggcacttcagatactttcagcatataggctcaacaattctacggtgaagtcaatctcgactctgtataaagatttgatacagacttctatggtttatcatactttaataggtatgctactgattgtcatctaattgcagttgtgcatttgacaagactgcaggcattcccttctgttgtatttatgttttattttcattttccatttcccaatgtgttcatatataaactgaatgaaattgtatatattcatatacggatactagaaactaaaaacgctgaatcatagtggagaatatcacttacagtcaagtacagagtccaccagaacagccatgagtccttcttgttcatcctagcaagagactgcagcaaaacggatacactaatttagggataagcaattgcaccaaaatgtcacaagtatactgagagacgaacgcaaacctctccatcaaggcactcaaacttccacacgctattgccctcatcatcgatctcattccaccagcgcagcccaaccaatatcctcccactgacgttcttgaccacccagaagtcaagtgctgccaggagcacggtgatgacaaagataataacaaagttggtcacgaacagcgcagacagtatgtagaacgccaatgcccctgccttcacatacaaacagtccaatcaacttagtaattgctagctacagtgtttatgtaaacaattacaaagaacattgaagaaaaacaggcgagtgagtaccttgaagaggacatggaagaaacatgtctttggatttgcataattctcgccgaccacctgcagcaacagaaacatatatcatcactatcatgccactcctaaatctcaatttaagcagcagaggaattgagaagaaatagttattagtgcagtcaagaaaccctaaccaaattgcatccacttgtcctagaaaccaaactgtaacggccgacccagatctcacaagaacaatttattgactcttttcttacacaactaaaactagccaagctcttgcacaacatatactaatctgggctggtccaatcagaaaaaccgaaagatctggagcaagtagcacaactccaatccaatccccaagcaaaccaactccttgaggttaaaaatagagaaatcaagaaccttccggccaggcggggcaagggaagggaagggagcggagggagctatcacctggtgttgatccatcgggctttgcttcttcgcccactccgcttgagttcttccgctgctatgctactgcttcgcgggatcccttcctcggttactcccttggagatcgaagaggacggggggtcaaatgcaaatatgtcgtctagaagaggggcggatcgcaaattctgcgtagagaatgggtagatatcgcgaggctggctggcccaacaaagttggcccaaactggtctcgtctaggcccatataagtataggaaaaagtacaccgaaggtcccttaacttgtcatcgagttacaaaataatccttgaaccgcaaaacgggatacaacgcatcccccaacttacaaaaccagtacaaattaggaccctcggtggttttcactccggttttatccgacgtggcaactgactcagcatgggacccacgtgggccccacactcagggtgaccacgtcatcatttcatcctcttcttctctccttccttctctctctcagttttctccttggtggggtgaggtgggacagggcagcaacggcgcctcggtggggcgaggtgggacaaggtggccagcgacggcaggcgacggaggaggagtagtgcgcaggaggcgggggagcacctgggcgcccggcgacaggcagcggggtggaggcaggcgcttaggcggcgagcgatggagaaagagtagtgcgcatgcggcgagggagcacctgggcggccgtcaacgggcggcggggtggaggcacgcgctgtggcgccggacgacggaggaagagcggtgtgcaggcggtggggaagcacctgtgtcacgtcctgataaattcatcccgaaataaaaatcattctctaaaaggaataatagaattaattaaaattcgaaaagaaattggcaaacactaaaatacgtacaagaaaaattcaaatgtggcccggagaatttttgttaaattctccttggtctaaaaagagccctcaaattttagtggaattttcagagcacaaataataattattaagaaataaacaaagttgaaatgagtttataaaaagaaaaaccctaaaaaaatctttttccccccttcccttcttgggccggctcggcccacctccctccctctctctcctctcccccgccggccaatcggcctcctccccgcccgcgtgccgctgacgggcgggcccgcccgccaccctcgctgacgggtggggcccacctgtcatccctgtcctcccgccgctcccgccgcctcgcccgtgccctagcgccgccgccgccgcgaatcccgctgcctcccgccgtccccgcgcgcaataaagagggggaaatcactccccgtgattccctccctctttcccccccacttttccctctctctctccctcgattcgtttggaaatcctcccgcaaccttcgccggcgtcattgatggagccgagatcgccgcgccggtttccttcccctccggccgccctctctcactcccaacactatataaacgctccccgtgcctccctcctccgtttccgccgctcgccgctctctctccccgtcggaatcgagctcgcgccgtcgtcctctctctccgccatcgccgccgagcttcggtccgccgccgtcgtcgccccggacctcctcccgcttcggcatcgcctccttcggcttcgccgcgtcctcgccgacctcgtccaccccttcgtttcgcccgccgaccgccggaacgccgccgtcctcgtcgacccgagccgcgccgccgcctctctccgcttcggtcgccgttcccgtcgtcgccgtcgacccggggtgagccgaggaccgccatttcgcttcccccttccctcccctctctcgggcgccgctccgtcgcgccggtggtcgccggcggcgaccatcggggcgcgggcgcaccgcctcccgtcggccgtgccggcgaggccgccttcgggcgcgccccgcggctgccatgtggggcccggccgtcagccgcccacgccctcgggtgcggctgacgcgtgggacccacggcgtcggccggcgcaagccgcgtgcacccggtccaccgtggaccgtgaggctgacgcgtgggccccactcccgtggacccggtccgcgcgcccctcccctcggctgacgcaataaatccgatttttaatttaaaatttaaatgaagaaattcgcaaatatccatttaaagagcatataaacttcaaatggccatatcttggccatttgaactcggaattggaccgttcaagtctctaatttttccttaagaagtcaagaacccatttttgtgctttgtttctgcctgttatttggagtttattagagtaaaagccttttcttttccgttggtcgtgtagacgctgcagcttcggaagatccgctcttcgtggaagtcgaagccggcgtttgggaaagcgagcaaggcaagtcacatcatccttgagcatattgaatcccagtttataaaattattttgatttaaattattgcattaccgctttatttaaattcccgcgttatcactgttttatttagccatgcctatttacctttgttatgacattatcattgctattgtattattattaccttgttcaccctagaataaacaaaaccccaactagtggacactctattcctggttccactagtttgaatttaggtagatgcttcgctgattaaataggacaacattaggtggttttataactttagactttgggaattctcatatcatttggacactttggaatggttggcttatgttggaattggacacacacctctcttcctctttcaaaacccctaaaacctgttttcggtggggtttgggtgcatgccagttgtgggaagtagcaccccggccactataaggattaagctcgggcctctgttgcaaagcactaccgtacttccacatgtctaatgggtaaggcttagtttgtggctcagtctagtcttaaacaaaagtacacggattggagatggatgaagtcgggtgtcgatggacattctccagggcaaatgaaggctacacgagctgcggcccggtagtcgagatgtcatatggcagagggttggtgccctgctgctaggggctcagttctgcctgcctgtcccgggtatcccggccgtaggtgggattgggtcggtactcttgtctaaggctaggatgggttggaaactatgtcacgtcttccgtccgtataccgtggtggtatgtggcgcgtggttacacgtgaggaagatgtgtcttgtgggtaaagatgtacacctctgatcagagtaaatctattcgaatagccgagccctcggatatgggcaagccgagcaatgtacccaagtcagtgttataattcttaaaatttgctcaacaactaaaatgtggaatggttggcctgggttggcttgggacgagctgggacccagggtcgggttgccagttcggtctggatcatcgtaggccttgggttaaggcaggttcgtgagggttcacggccttgattaataatactgtatagctctaggatcgtctttataaaatggctttgggcaactaagtgacttttaaatgctgtttactgcaaaacttaacccctatattattatccccttgtacccccttgcattaatcatgcatccgccggtgtggcttgctgagtactgtggttgtactcattcttgctcaatctttctcccctcttcagtaagagaagctttggagaagatgtcttaggtggagtcctggcttataccccagttgagcgcctgtgaagatggagccgtaggcccgctagtccgctgctgtttatttttgattgtcaggccttaagtgcctttgtaataatgtaaatattgtcgatataataaagatgtgtcttttatatcatgtttgtgtggtgtaccccggcttttcctgggacggggattaatacactagcgttcgggaaaaggcaattttcccggtcgcgacatagggccgcagcttgattcacagaagaggaatttctccagccacattagcagaaaggctacatgctctcgaggggttacagaaccttagcccatatatgctgctacataactagaccaaccgcctattgtcacgccctgaagttcttctccctagccaaaattcaattaataaattgttgcaagaaattatttgttaaaggcaagagagaaaccctaaatcaaaaaaatgcaaataataattggaatcgacatgtggaatttttcttgggttctacatgtcaaaatatactaataggatttttagtggaattttcagagccttggaaataaattttaaccaattaaaaatgagcatgtgcaatatttaaatccctggaaaatcccctttttccttttctcttctttttcttcctttttcctccctttgtcctcttattgggccatcggcccacttcctcccgcgcccttcctccttgctgggccggcccattccctccctcctctctccgggtcaccgacaggtggggcccacctgtcggccccttcaccacctctagccgacggtggcaaccaccgccgaaaccgccgcgccgccgccgctttccccgctcgtcccgcgcccccactccacgccaacacgccccccacgttgccgaccccacgccccgacttctcccgcccacgcgcgcgcgcccgcaagggcgggattcaatttgaatccccccactctctctccatcccccacgtcggcgagaaatccggccgcctcccggcctcgtccgccccttcctcacccataaaaagcctcccccgagactcctctctcttttcccccactcgccgccctctcccgtgctctccactgtgcccgcgccgctcaccccgccgtccgccgctcaccggggagctccggccgcacgccgtcgctgctagggccgccgccacgctgtgcattcgccgctgctagcatcgccgtcgtgtgagctatcccggccgctgctcggttgcccccctccgcgcgcatcgctctccccacgccaagccacacgccggtgcttaccaccgcctccaaccgccggtagccgtcgctagtgccgtcgccgcgccgctccgttgccgcagttgcccttgcgagatcgagggccggctcgtccaccccgcgctccccgccgttcgtcgctcaccgtcgccgttcgtcgtcgcctcctcccacgccggccgaaccccggtgaggcaccccctctcctgtttttcccctttctctccctcctagcgcaaagccgcaccgccggccgcccgtgtcgccggccgcccgggtcttctccccggtcgccgccgtcggtgaccgcttgccaccgccgcatcgcctaaccggccggccggtttgaagccgagccgagccgaccgggtgtttccccctccccttgagccactgcccggtggggcccacccactagcaggtgccacctcctcccccttgagccgctgccgagtggggcccgcatgtcggcgccgcccccctgctgatgtcatccggggttatttattgcgcaataaatctattaaggccttttcttttattagtaaaaacacagataatcttctaaaattcatatctaattcatccgagctccatttaagtccattcaagtctcagtaaattcataaaaatgtatagaatccattaaaaatggttttgtttcctgtttcagtagacttatagcatgttttgcttgtgtgctttgtttgtcgtgtagatttcggccgtttcgtcgatccgcggttcctcgaagacgttgctgagacctcattagtacgagggcaaggcaagtcatgcattacaattgatcatattgtacccaatttacaaatgtcccgcatttctattaaatgttgcattattttataatatcatgtgggatgggtcctactactcagccatatattgtttaccttatgccattgataacttgggtatcaaaatgattagatgttggattaggaattgcttagccatgcttagttcaactagtacacaaagggagatcacattaatgcatagactttgattattggcatagctttggattagtgccaccgcaatggtgttagttaattaaaatacactacatggtgggctgtgggtgcatggttttgctagtcgtgcccatggtgattaaggaccggttcgcgggatgccctaaaagaacttatcgtacttaccacaagccaacgtgggcaacggctgggcttgtagtgtagctttcctctagccgacgtactcatgcgagggtgggcgtgatggagttgggttggccggggtgtctgtttgatcggcttccagattcaccgcggcacgagagggggaatgcccgttgcctgctggggacggggcgaaccctgaggtgtggtgcgatcggttaaaggggttatgcaaagggtcctgtcacggcctctttccggtatgtcgtggtggcatgtcggcgcacggaaacgtgtcgtggggctgtgtcttgtgggtatagttgtacacctctgataagagtaaaactattcgaatagctgttcccgcggttatgggcggtcgaccaaattcaccgtgattagtcacaccctagttagctaatgaactggtgtagtttaggtggttggttgggcctgttgcaacatggtgtagcgttggacagtgattggttaatattgattaattactgcaactgttttactgctttcaactactgcttttaaatgctagctttatgcaaaaggacctttagccttccttggacttatcctgcatcataccttctcttccagtatgacttgttgagtacagtgggtagtactcagtcttgctctcttttcccccacaccagagttgaagttcttctcagttggagatgtctcgaagaagttggtttcgtcgccgccgtcaaggatgcatgtggaatggaatcgcccgcaggcttagctcgctttaatgcacattcagcttagaaattctggttcgtgaatttctgggcgtgacacctatgctcttggtcctgaagtcatattgattcttcgtgttcggactcatgggattagccgatgaggtgacatccaaaccggtgatcatggtgatgtctattagagtcggggtcatcggcacttggttaaacaggaaggcattgatggtgttggaccagaaataggaggcggaggccattaaaggttcgtctttggctgagttagctatggtaaggtcgagtgcttggccgattccgatctcgtcccagtgaactctcttgctagccgaaatgcgcttgaaccatgtaatccagcttttctcgggtggagtttttccagtgacctagatctgggttggccaatctgaaaggaatcctattggtttcgccgatgatgaactcggtaggatcagggttaccaactgggccgaggaagtagtaattttcatgcgataggcttggaattgcaactaagttggagagatgctacaaatccagaagaactaggaaggggaaaaacaagatgaggagtaggaaatccaatctgatgtgagaaaaggagatctagctgatgagaacttacctcagcgtactcggctgatggtgcggcagatggactggcagatgacgacatcgccgtaggcggagatctggccggagaagggatcgcttggggatcgcttcgtgcaccgaggggatcgccgaagagagacaagacggagcttgcttcagcggtaaaaacggaggaaaacggtgtgagatttttcggggacaacggttggtatttaaagtgctagaataacggtcaggaaacggcaagagttgatttctctcggagtcgacgtatggcaaatccgaaacattatccaatatgccggacttggggggcatgtgttaacgaccaaatttggtaatccaaggatcggagatgaagaagaaaccgagatggaattcgagatggaaatcgtctagggaacagatttaactgatttaggatagtatcggggtttcaaccgatcttacctgatttaactattttttcctcatatgcctgattgacatgttaaatctgccctttatattaagatcttgtcgcatttaggtatattaggctctttgtttggtatattctacttgttttaatattttaacatagagtggtatcggagtattagccgatacatgctagatctatctgatcggctatgctatgaacatatacagtctcgttattaatatatatttcgatctaagtgatttatactgtctcggcatgacgaccgatctatccctatcacttgatttaagtatatgtcaatatagggattatatatcattaatatctacagccgatcgagtagatttagtttcttcttacttattaatgactgccgattgatgcatatatgacatcggctcaaagataaatgatacgtcatcggcacctagccaatcggctatcgtttatggatttaaccgcaatttctctgtctttgtttcttattgattgcaggatcaaatcaactggcacgctagcatatctgaaggcgagttttggacatgcactggagttaagcaaatctcccaggcctcgtgttttcacatcaacaccgcggcgaagggcgacgcgtcggtggaggtgctggagacagccggggagggccaagtcttccacctgtggcaaggccaaggagttgctcaacaggatggtcgccttcgttaacgtcaccggcgcgtgatctccgagttcgtggccacgcgccattgtttgcttttgggtgtgcgaaaaattttcctactttgatttgatgaactctgctatgttgtgattgaataaatgagacaatgagtgatttttatggttgttgactctgtatgtgttaatggaatgcacga

SEQ ID NO: 5897 - DNA, 702 bp, Oryza sativa
aggcgtgaccaccacggcgcgtcgcgcttgtccgcgtgcctgctctgcacggcctcggcgtaccatgactgcagctcgtagtccgcctgcacggccttgtcgctcgggtagtaggccgccacgtacgcctcgctccaccgcgagatcgccgaccagaggcagcccatcggcggcgtacgggtattcctcgatgagcagccggagcccgtgcggctggctcgggtcctccacggccatgcctctgcacgacacaaccaaatgcccatttcactcctcgccggcgcccaacgaccaccgctgttgttttccctaaatccggccaccgccgctgccccaaaccccagatccggagtttcacgccgccgcccaaggctgctcttccgaccgccactcgcttgcacgtgggggccacttctctgagccctgcgccggttgctgcccttcaccgccggagtcgcgactggtgaccaccgttgcctcgccgcgccgagcgttgctcggcgcgagtgagaagagagcaagagagagacagaagaaagaaggagagcatgatgatgtgttcactggtagggtccacgtggatcctacgctgactcagctaccacatcagataaaatcggggtcaaacccaccaaaagacctgtggtgaacggttttataagttaaggaatgtcatatatctgtttttgtggttggggaaca

SEQ ID NO: 5898 - DNA, 2511 bp, Oryza sativa
  unsure (1)..(2511): unsure at all n locations
gtagattacagagtgtatagtaccaaagtagggactagaaaacagaataacacagcaacacataggatgaactaaaagaagggtgagtggctgataccttccctggcaacagctcaaatgctcaatcagtacagtcttcttttaaacaccagcattaatgtatggtcatgtttgggtccccatacagatcactaatgtagggtcatgttggatcccctctacagatcactaatgtaggaccatttcatatgtttggctcctctacagatcaatgacgaacacttttgtctgatagtcacaacaccacatagttctttggtgctctaagtacgtgtaacaagggttttgacataaaacattatgatgaacaaaattcactggtcgatctgaatgatgcccaataacagaactcattgatatctgagctgaaaatattttactgccatgttttgttaagtatcaccacggattcagttaataattacaatgtatcacctatcaaaatcaatgtctgtgccaaaatatcattaagacctcaagagaattatatgatcattcatgtcgacagtgaaggtgcccagcaattctgttaatcattggcttaagtatgttaaattgttaatatgatatggactaaaggtgtgtaatgagacatcgacatctccacaaatttacaaaatcactgaattgattatgctgatataatatgcatgaagctaagggaaattttggaataaaacataggggtcattataaggaacaataaaaatatcttaatatgtttagctgttactaaaatatattgttagttggttgacgtgtacgtgttcaaaaagaaagtttaaagctacaaatcactagcttaatgctggtctaacatagacagcgaggaaagtttggtgaacaaaatcacatcataccaaacacggtgaacaaaggaagagttagacgccatgtcatcctaactactgcttcttttctgtatactttaccatagaaatgataaaatgagcaagaaaaaaaattaccatgttctaagaagctgctaaaaaacaaggtagctttgttgtcatatgtccaggaagagtttgaaactaggctgtcgaggtgaccaatatttttttgtatttcagatggaagctcatcaatgttcataggtggtacttgctttgatcaacttatcaacctttgtactcattgttccagatcaaactcaaacgaacaccagtaccacacagttaacccgaaatattggtgaatattaaacaaataaaactgatgagcaaagatgatcatctcacccatttctacatctatcaagtgtcaagtattggtgaatattacaccatcttcaattcagtagaagtaacaacaaacaaactgtggtagcaaatagccaaataccaactcgggttgaggcctccaaaacagcaggagaaaatttttttatcgatcaacaaaagatacatccacccacacaactctactactaaatcatctgatcagtaacaaaagataagcaacacaactagctatcgccgccgcaaaatgcatattattcctcaagttcgcctaccgcgcacgcatcaaatggagcattcgcaaacgcctcccaccctccattagctcatcaatatacactcgcaatctcaaatttcatcgaattagtagcagtagtagcagtcgtagaagagatatcaggatcattaccttccttccggtgggaaaaaaaaaatataaatctaacttgcaaatgttccaagggagcctttcattccgagaagtggaggaggagccatcattagccatggcgtgaggagagcggatcacagagggtttttaccatccgtggaagatctcggagcacttgcccttgaaccagcggaggccccttcgcagcgacgccttcatcttgccctccaccgagtacgccttgtagctcgccacccgccgccgccggttcatctccgggtcgctgaagcaccacatgccaccgttttcggcttcttcaccggcaccccccgctccgccacctcccaggtagccgtcccgcctcccgggcggcggcgggagcgctaggcgcggcggagggggcagcggcgggggcggcgccgtggtgtagatctcgatccgccggtcgccgttggccgcaaagccgccggtgcccttggaggagaagtagcccgttgccggtgggggaggaggaggaggaggagggnaggtagtatccgttggagtgcgggaagaagtcgtagtacgccgncggcggcggtgggcggaggtcnaggtcgctccggtaggggcggtggtagtcggccatggcggaaggagtgggagagatgggaaatgctcttgtgttttttttgctttgatttgagagggtggagggcgacaaaaggggaaaggaaggagagaaaggagagtgttgtgatgcaaccatgaagaaaagtatcactcatcgatgcattattgacagttggaaattttctttgtaaaaagcaattttgatac

SEQ ID NO: 5899 - DNA, 709 bp, Oryza sativa
tagaagccttcagcatgggttttccccagcagtggcacaatatacatgcattgaacaacatacgtgaatgggcctggctgaggatcattatttaatacccttttaacctgcagctgaaggatcttgaactttggggttgctttgtcagttcctgatttttcaaaaaagattgtaaaacatcagagtatggacaattaataagtgcataagatcaaggatgaaattgatatcgaaaacaaataaaataaaataataaagcaagcttgtagcaaattcatagcagagagttggttatgcaaaaagtttgaagacccaaggaattcaagagcctgcattttgcattaaccgaatttgaaaatcatatttgatgatatttacctcaaccaaggttccatacaaactactatggatttaacctgtaattattactatgtaggtaactttatttattttcctatcacgtgtttatttctgggaagattgtgtgacagcattttcatatcataatcaagcagaattagttgcaccgaagcttacagaaagaaatattttagcacaccaatcatgtagatattaaattataacagtgccacatagatgatactacctctttcttaataactgacaattttgactttcccaattaaactttgacaattaattgcccttaaattgttagaccaaagtgaacgaaagttttgatttaggg

SEQ ID NO: 5900 - DNA, 3542 bp, Oryza sativa
aaatcggaatcctatttttcaataaagtttatgaattttcaatacaattcgtgttttgctgcaatttgtgttttatctaacttatacgatctaaaaaattagaacataatatttttttttcaacagaagttttatcaacaatagctagcatagtctattttatgttttactagaaaaaaatgcctgtgcattgcaacgggtgaagtcaattttaatcttattattattgttatatggtttagttaagatgaaattcaccgtgggagttcgcttggatatatgtatttttagaaaatcatgagctgcagttaggagtccgatcgtctcaagttagcatgcgagtttttttaaacatgtttcttatatgattccttctgtattaccaaaagtgaacgatcttaaaaaccgactcaaatacggatatgtatttccaaaagcaaacgaacttaaaaactgactcatacacggatgacataccaaaataccagcaaaaacatcttcaatttttataatagtagagatagagaagagatatagattaaaaccaaaacataaaattaaaaccgactcaaatacagatgacgaaccgcgaaaacatcttcaatttttataaccgactcaaacaccgattacggaccacggaaacatcttcaatttttataatagtagagattaggagtatgaattgactatgggtgggaccgtgggagtgagggctcaaatccgatgattttatctattattttatatgtcttttagtttatattttcacttttaattagggtctatttggtaagactttaacttttaaatttaattataagaattgggtctggagtgtagttgtggagctgtctaaatcagctccacctctctagtttgttttgtagaaaactttagccagctccactgcaattttttatttttaatgaagttgaaactatttggttggactctctgacttcaagagaggtggggatgaagctaaagttgtaccaaacagatcctaaatttgtagtttgtcttgctagttgtttattcatgatttttgtttttagttgttcacgtatacgctaccgtacacatatacgtgagccagaacgttagcttttcattaaagaaagttaagataaaaccaggagataagtgggcttgctgttgctgtgcgcggttatgttggggaggccgtttgggccaatggcccaagcggaagcgtacgtcggtacgtgcacggtgctggatagatggaggaaagggagcgctggggaggcggatgcgtacatgcgacgtttgttgtttctctctttttttttcttacacatgccacctaatcattctgctacttggtccaatcaaacggcgacattaccgccaacttgagatatgtagattcgaccaaacataatagtgaaacatttaaacctataaaaacttccttttagcggaatataacgtaatttgatcaaacataatggtgtttaagactaaaaaaactaaaaatttatgagacaaatataatttaatacacctttgaaggcttgaccaaatttatctagattccaaatactctgttgtagcaagaggcaaacaccatcctcatattcgatcgaaacactcttacccacttggaaaagaggtttttactcgtggcaaaacttttcgacctaatgtgacaagtaaatactaaaagactgacaaacatggtaagaacgctagtctggaaaggagtattctagcctaccacaagaggaaaataccattagaccatggcggatgaagcctgaaaattatatcattgagtgaggaatattactcaagaagatactgcagggaccattttaaccactcctataagctggcgccatactattagggtttctaactttacaggggtattgttgtaacttcctatgtatagttaggggtaggattgtaacctcacatgtacctccggaggctatataagccggtcatgatcttgtaatcagacacgaggtcagatatatcataataccatacaacagatgagactttacttttcgagtcatctcacttttgggaacatattactttcctacctatccctgatttgtccgtgacctaaggtcactacatactcttgcgcacaacttagaattttgttatatattttccagtcaatttactcatttgctaaaaatttcctctatttaccaaaattttttttgctacatttgtctaagattaaggctgtgttcttccccctattttcccaacccacctcactcgtttttcgcgcgcacgattttcaaactgctaaacggtgtgatttatgcaaaaaaattctatatgaaagttgttttaaaaaatcatattaatctatttttcaaaaaataataattaatacttaattaaccatgcaataacacagcctaagtgttcaaaattattgtcacatcttaggtcattagtaagcctaagatacatttctgattttgtgtcacatgatttatatagatagaccctttattaaaagcacgtttttgctagttaactatcgacagttttcagcgctgaaaactttcctttttttgtccgttcgatccagctccaagattcgtgctggcggtgctggaagatagaaaaaaatttgcaagcccaattcgtgtctgcaccaatttgtaagcctagttcgtgcctgacggtgcaggaagatggaaaaattttgcaagcgcgccatggggatcgaacccaaaacctacagcatacacacttgctccattacactttagtgggagttacacctgagttaaatactaaatatactgtagttccataacagttacatagtagttacaatgtaattacactatagttacataatagttacatttaaaagtttttcatctaaaaaactgtcgagtgttatatagctactccctatacaactacctaagctaatcaaacttgcctaatatttagacgtatgactagctataaaataaccccattaacctcaggagttaggagtacaaaatagtataccttttcttatcccttttgaatttcaaaaggaggcacctccaccactgaccgtccgatctccccagcaagggcgaccaccggataggatccccctcggccgtccgatcggtcgcggccgctgggatgaagccacgcgtccctcccgcgtctctccctcccaaaagcccacctccaaaaccccggagcccgcccgcgtcgtaaaccctagccgcctccgccgcctcctcccccctcaaatccccccacctcctcgcttccccccttcctccgcccgccggagcagagttccttctccttccatccattccgttcgggaatcaggcgagcgcgtcagcatccccctcctcctcctctcgcggccgccttcgtcgcaggcatcgccgtgctctgaccggagggcacttgttctttccttcgtcagagcggaggggagcggaggagcggagccggagatccagatctgcacgggaaggtatctcccgctggtacggtctacttctctctttgggctgcaggaa

SEQ ID NO: 5901 - DNA, 1780 bp, Oryza sativa
ttgaactcaaacataagcttcctttggtacacatgagtttttttccttgatttgtatgaaaaatgagctccttgatgtaaaggctctctttgtttaggcttataagccaactttttttttaaaaagtttaagccaaaacaaacaagcagctttttcattcggcttttttgaagccataagccactctaacactattaagccaaaagctaggttggagaagctttttttggcttatatgagatagatgtatgactccaccactaaacttaggacattaaatccactggcttataaatcatataagtcaataaactgacttaaaagtctaggccaataagcctaagcctaaacaaagagggccaaaatccctggaaataaccatgaaattcctacccgtccaaggatgcccactacagatattgtactgctggatcgctcaataagaatttaagaagtgagcatagctcacctgatggaaggtgtgtgttcagcttcatcctccaagttcagcttcagtaagcagtacgcttcattcttttttaagatgaaaaaccctactacctaataaactaaactaggaatcgtgaattcgcgatgcagatgacctctcttcctatcgtacctcacctgcagtgcatatctctgctcggtcgccactgccacgccatgccactcctgatgtatatgttacatttaactttacaagttgctcccttttcttttcccatatataccaggactatacaattagaaggtccgaaaggcaaagtgtacattgatcgacagtctcgtgtacgataccctacaccaactattgtcctcgtttcaccaccaaccggtgatggcagcactgaagatttacaaattctgtatgtactctcgtagtctcgtccaacaaatagctccgacgaggatgaacaactcgaatcgagctccttttcagccaaaaatatacaaggaaccgtaaatatgtaccagctgcttcaccctcccagtcagagtcttctagcgtctccttcaccagagccctcaaaagcatttgaagctccagcttcacatgagcataagtaacttcagagccagataggctcacagcatgtgcatcatccatagtttgaacttgcgcacgtatagatatatgacgcacggtccaatcagatcagtttcggagagtcgcttgcagagtttcatgtaggactccaggctgccagattcctgtatgtttctccgcagggcggtcagcacagctgctctgtctaggtactctggatacaagcccatgtcaagcatcttcatgagtgtttccgaggcctccagataaaagccgcctttgacatagcctcgtagaagccatgacagagacttcttccttcttccagcactggttgactcgactccagcgagcaatcgacggacggcagcaacttctccctgagaagcgcagatggccaaaacaacatcatagagctgtgtgtcaggttccctaccaagaagcttcatttcccaaagttggtgctcagcttctaagccacaaccagcgcaagtgtacaatgaaaggagcctctcgtgcacaagtcctaggacatcactgctgccttcctcaattgcccattttgataaaagaacaccatcacttaataattcagattggtaattttcaatactatgcatagtctcagagtcaagtttggaaatcgagcccaccttcaccgatgaattcaatttccgcaatggctttgagaatttcctttgttctttaaccaagggcagtcaacccaat

SEQ ID NO: 5902 - DNA, 14912 bp, Oryza sativa
ggggggggggagtttaccctaatccgttttctcttcacttgcgcgcgctgtgagctacggcactcgaatcttctgctttcggtaaaatggaaacgctggttttgcagttcgcctgggattcactgccgtatattgtggggattatctcgctggttgaaggagggaagggtggggtttaaccttgtttttgcttatttatgctagtataagcattcctgtgggtaggttactatcatgttatatatttcgcggtaggcgtgttgcaagtgattttgccctagttggaagggaggggaaggggtgctcattttgacggttttagatgttaagatttaggtcaacatgtgctgcggaagtgtgtatggattcactttgacctaattttttctcttcattgttgcaagaaaggtaatacagatctttctgcaatattccatccactaagtttgtgtagatgagcgcccgctatttgattgggcctattttaccccctttgattttctgatgaccttgcactgaatatactgttccatctcttattgttggtcttcagggcacgagatgtcattgtatactgcccaggtctacctgcgcttgtgctagctgtttaggttattttgtgttttttgttatgtgagttgcttctgggtggtgctgttcagtgtaaacataatacctgtggatgtccaaggtctggttattgtggctattcacatgcttatgttgtgcctatgttgtgtggaccggtttttttttataccacagcatatatgtttgcttttcttatggttgattgataacaaactgatttggcctgttcaagatcctgatactaatagcatattcacctattcaacctgtttactttggtttagtaatttcttcattgtatgtcagggtgttgcccttttatttggttattcatattttatctaatgtgttccgctgacttagtgtacttgtgcagctgcctgttgaatatctaattgcccacagcatagttagtctaattgagctttgcattgttaattgtacttagcttggttcccttgtttagatgaaactcatggccaaatgaggtgcttatccaactgtttaactgagtaacttgattttcttatgggaaacaatcaatttttaagtaagggtaaattaaatttgaataatctttagcagagcttaactgtgttgctaatgtggataacataaatgttgcatggtgatagttctacatcttgtaaccataatttgcaagtatctgtggatggaaaggaattctgaaggaccctaagctaggtcaaactggcccaacggcctttagttgctaggattgttaattgatgtgccttttcattaagtttgtgtaattgtttttcgcttaacatgattaacagctaaaatctgtttctttgatgtctgctaggacagttggtacagccatgaatatcactcaaatcctgctatcagctcaatctgcagatggtaaccttcgggtagtagcagaagggaacctcaagcagttccaggagcagaatcttcccaacttccttctctccttgtcagtggaactttcggataatgaaaaaccaccagagtctagacgacttgctggtattatccttaagaactccttggatgcaaaggattctgcaaaaaaggaactactgattcagcaatgggtcagcctggatccatcaatcaaacagaagataaaggagtccttgctgataacgctaggatcttcggtgcatgatgctaggcatacctcatcacaagtcattgccaaggttgcatccattgagatcccccggcgtgaatggcaagaactcattgccaaattattgggcaacatgacacaacagggtgcacctgctccactaaagcaagcaactctagaggccttagggtatgtctgtgaggagatttctcctgaacacttggagcaggatcaggtgaatgctgttctaactgctgttgtccagggaatgaaccagacagagctaagccctgaagtccgtcttgcagcagttaaagccctatataatgctcttgattttgctgagagcaactttgcaaatgaaatggaaaggaattatatcatgaaggtaatttgtgatactgctgtatcgaaggaagtggagatcaggcaggcagcctttgaatgccttgttgcaattgcttccacatattatgtacacttggatccttatatgcaaaccattttcaacctgacagctaatgctgtcaaaggagatgaggaagcagttgcacttcaagctattgagttctgagcactatttgtgatgaagagattgagctccaagaagaatatgagggatctgatgatgctaattctactgtaaattatcgcttcattgagaaggccctcccttcacttgttccgatgctgctagaaactctgttaaagcaagaggaagatcaagatcaggatgataatgtatggaacatttccatgagtggtgggacatgccttgggctcattgctagaactgttggtgatgcgattgtgcctcttgtgatgccttttgttgagggtaacatcacaaaaccagattggcattgtcgtgaggcagctacttttgcatttggttctatccttgaaggtccatctgtggagaaacttgctcccctggtacaggctgggtttgacttcctgctgaacacaacaaaagacccgaatagtcaggtaagggacaccactgcatggactcttgggagggtatttgagctcctgcattctccagccagtgcaaatccaattataacaagcgcaaaccttactcgtatcatgactgtcttgctggaaagtagtaaggatgttccaaatgtggctgagaaagtctgtggagccatatattttcttgcccaaggttatgaagacgcagagtcgatttcatctgtgcttacaccttttcttcctaatctcattgctgctctcctttctgcggcggatcgtgctgataccacccacttcaggcttcgtgcatcagcttatgaagcattgaatgagattgtgagagtcagcaacatatctgaaacgtcaggcattataggtcagttactgcaggagatcatgaggagattgaatctgacgtttgatctccatatactttcatctggtgacaaggaaaagcaaagtgatcttcaggcattactgtgtggtgtactgcaggtcatcattcagaaattgagcagctcggatgctaagtcaataattgcccagactgctgatcagttgatgtttctgtttctgcatgtttttgcttgccacagctctactgtacacgaagaagcgatgcttgccatcggtgctcttgcttatgccactggtacagattttgtgaaatacatgcctgagtttttcaagtatctggaagctggcttgcagaattatgaagagtaccaagtctgttccatctctgttggagtggtgggtgatatttgccgtgccttggaagataaaattttgcccttctgtgatgggattatgactgttcttctcaaggacctgtcaaactcgatgcttaatcgttctgtgaagcctccgattttctcatgctttggagacattgctcttgctattggtgataattttgagaaataccttccttatgctatgccaatgcttcaaggagctgccgaacttcttgctgttttggaccatacagatgaggatatggttgattatggtaaccagctcagacggggaatctttgaagcttactctggcatactccagggtataaagggtgcaaaagctcagttgatgataccctatgcaagccatctattgcagttcactgaagctgtctacaaggaccgcagcaggttaatgtcatgcacattgcaatttatgttgtattatattggtaagtttttacctgcttagcgcttacatacattacatttgtgtttatactttcagggatgagagcgtgacaaaggctgcagttgctgtcctgggggatcttgcggacacactcggctcaagctcaaaggatctgttcaaaagcaacctcttccatgttgagttcctgagggagtgccacgatttggatgatgaagttagggacaccgcgtcatgggcccagggaatgataaaccaagcactggtttcttaagaggggattattttgttttgtcagttattggggaggtttcttttgtggctgtgccaagaccatttgccacagattgaacgaaaggataccaacatatatgtagcgtcagtcgtaggctgcttctgtgcttttgtcgtcagtctgtcaagtcagtttatgcgtcgcatttggcgtgggtggattctggcattgaatgtcttgaacagctaaacctgttaatgttaatgtattctacctgtggtgtttatccattcgattctgctgatgttactgcctgcctaagagcaagtttaatagtatagccaactattagctctaatttatctatagtcaatttattagctcattcatacaatagttacatattacactattaatatctggtcccacatgtcatacacacactccttcttggagtccgtgctacagctggctacaaatctgtagcctgctgctcttttttttcctcatttatctttttaaaatatgtttgtaactggcttatagcttgctaaattatgctattgtacctgctctaatactcttatcatgttcaggtgatattaaagttgccagcctgtcatgtgtatttgcaaatgcaatgttcttgtcaattgtcatccttgttggcaagtcatttcaaacttgtcaagatgttggtttcagttatatactagacgttgtgatgctaccacacaactttgcttttgttgatactcgttgaacttgtatatgctttggtttcagatattatgtgcaggatgaatgttatgcagaagctgtacagctcaggtagattggtttgtgaaactacacaaggttttacatttcaatctcgttaaacacctcacaagaatctgcacgcacactacatatgaaatcccctcattgttcatgtcatatttacagatggatgcaaagtaggttcatttcaagagcaaagttacaaatactggcacgctggtcaggctgcctcggtggagatgatctcgagctcggcccaccagagcggcgacaccttgggggtggcggcgtcgggcggcatggcggtgatctccctgagccgggccgcgacgtcggccatggaggggcgccgcctcgggtcgcggtcggcgcaggaccggacgacggcgtccaggcggtcgacggtctcggcgtggaaggcgccccgcagcgccgggtccatgacgtcccgcagccgccgctccccgcggaggagcgccgccgcccacccctgcaccagcccgccctccgacgccgcgagccgccccgccatcatctccagcagcagcatcccgtacccgtgcaccacgctctccctgtccgccatcgccggcgccgccgccgccgccgccatctcctcctcgcagaagcccacgtcggagatcttggcggcgaagtcgtcggtgaggtagacggtggaggcgtccagcgtccggacgatctccggcggggcgagctggtgcatgtgctccaggcagtaggcgacgccgaccgccacgcgcagccgcgtcggccagtccaggtgcccctcgtccctcgctgcatttcccaccgtcaatgtcagctgccatttttcgtgcttgctacaggtcggggtgtcgaagtaggtagaaatccaaagttccaaagaaaattaccgtggagatgctcgaatagtgtgccgtttggggcgtactcgaacaccatcatcctcgtgaacggctgctcctcctcgcagtagccaagaaggttcacaaagttcttgtggttcaccctcgacaggctcgttatctggaacaaccccccaacacaaatgacacaatgttaggcaccgttatctcgtaaactttttcacaggaatcagtgaatcagttcaatttcatagggacctagggaaaaaaataatcaagtattgcattattggtagtcaaaattaaaataatatcaagggaacgtatcttacacacactaaagattctagatatgatttgtgcatgtactctaattgacaattatttactctggtttttaatacataacgtcattgaccattgtccttatttagcttttctttgcaaatatttaaattacatttaatgataaaccaattcacaataaaataaacaataataatagtaatatttacaaagggaggcagtagtaataccttctttctgaagtgtgcctcgcacttcttggaccagtccttgggcgacgtcttggtggtggagacgacggcgatctcgacgccgctggagagcgtccccttgtacatggtgtactccggcagcgagccgatgacgttgctgaagtcctcgcacgccgcctccagctccgccctcctcaacgccggcacccccgtcacgaacgccctctgcagctgcccgctcagccccgtcgcccacggccgcacgctcctcaccaccttgctcgaccggtagcacgccgcgaacgccgccgccgacgccgcaagaagcaccgacgcccccgccgccgccacaagaacgtagttcgtcttgccgccgccgccgccgcgcctcgttgcgctcccgtccgtcacctccggccggctggtttcgccggcgtcgccggagctagacgccggcggcaacgcgatgctgcgggggcgcgcgtgttcctcgccgcgccgcggcggggccgcgtgctcggcgaccgcggccgacgacgctggcgaaggcgcaggggaaggcgaaggcgagggcgagctcgacgggccctggaccggcggcatgtcgagccatggcggccagtccttgagcggcggcggcggcggcagcagcatcgggagtccgaacgggttcgacggcgtcgacgacgtcgacggccatccggccttgctgccggcctgcctgctccgctgctgctgctgctgctgctgcgaagatgatgatgacttcttggcatggatcaacctgcgaatgattgagcagagatgaggctaaagttgacgagcaattggacaagaacatgcgtgcagcccggatggggtcgaatggttggttgttcagctgtccatctctgacagccacgacaacattcctagcacaaatttttttcctaccattctatatctactttgatttctatggaaaaatgtctttgtgatgaacattcacggataattcaggcaaatttggcctatgcttgttcaaatgcaggggaaacttgtgatggaagagaagaagaaattatgcccaagctgcaacctaattataacactgtgaattattatttccttaaaggaaactctattattgcggttttttgaaaataaactttattactactgcctataattaagagtctctgaattttgtcaaaatttagactgaaattcagggcatgtacgaacatgaaagtgagccaagaaaacatcaatcgttctcaccgagctgcagggcgcacgccttcattccaattcgccgttccatcaacaccacatcataacaatgatttcaaaacatacacaaatcagctaaacagaaaccagaacattcttggacaagctgatcatctgaacaaacaaaaacaaacatacaacacacacctcgccgagcaccatggccgccgccgccgccgccgctgatcccaagctgaagctgcaagcagagcagcagcagcacagccaccgccaccctgctcatcctctccatgaagagcaggacggtcttaagaagggaaagagagagaagcctgcagcaatggcgatgatgatggagctcttgcagaggaggcagggaaagcaatgcaagagagataagcttaagccaagctaagctaggcagcagcaagaagcagaggcgagaagatgatttgggcgtgaccactgcggcgagctagcgagagccacgccgcccacggcacgcggcgacaataaattcttgtgcttggctcgacttggattttttcgacctaactagtgctactattgcttaggagtatgcatgtactatgcccacttcatccagtggttggggttcttgcgataggtgagaggtcacaggaggatacatgatagtagtagaattgttacggatttcgcaaaagaagggttttaattagtgtcctaatcctagaggggggcttttaatttgtactagcaattaattgtctagaaagagaaaaaaaaagagaggtttgtaattaaaggaggcgcttttatcacgagatggtgagataggatcaggttgctatggtatagctagggccaaggtattagttattccttctgaattacttcctccgtttcacaatgtaagtcatactagcatttctcacattcacattgatgctaatgaatttagatagatatatatgtctagattcattaatattggtatgaacgtgggaaatactagaatgacttacattgtgaaacggagggggtaggagatttgattgtgtgaagtttgtacattgcctaacgctacaagattggtatgtgttcttcgatcacagggggagttcagctttggcaaaatctggtatgactgtaatattttggccatcattaatatatataaaccatgtaaataagcgaatttcgtacgattaattattgtttaaaaaactagattctggacaggttgcgtgattttactcttggaaatatgtgctaatatggctcaagactgaggctatttaaaaaaaataaaaatagtgaattacttccaatatttgttggaaaagcgctccttttttggtaagtgtttgctacctacaaaaatttcggatgcctgaaataagaaaaataaaattggatggcaaaaaatagttgtgaagacagatctacaataaaatcattatttatccaatctaaatgtttaagagatgttgaactttacagtttgggaaaatttgattagaggtttcaccaaatgaaaattttaaactacatttatgcaagtcaaatggtcaacactaatgacaaaggatgcggtctggttaattgcgatgaaatatattgagtgggccattgttcacctcacccaataaatgttcactttctactctctccatcccataatatactaccaccgttccaaaatacttgtcgttataggttgtttagcatatagtaatatttgaagaaaaatactataataccccttaactaataatggataattggatgtgggatggtggttaggggtagaatagggagaaatttgaattggaagtggttgatgtgacatgtagtacttcaaaatggcaactgttttgggacaatttttaaatgctagaaagacaagtattatgggacggaggaagtaagagattttattcctactattagtcccacaatgggactttgctatactacttgtcacattccattaattctaattcaaatttctacctattttaaccttcaactacccactcgtcacaaccaaaatcacattcaatagaggcattgcagtcttttcttttcattcttaatctttcccaaaaggaaataatcccttatattatggaatggattagggagtacatagtttgtgttgcgcaatgggattaattgacaaaaccagcttgcatctctaactactaactagtcaaatttcaaactcatttttgtttttctgtttgaggcccgaattcaattttgaattttgaaaacgtcgttcacactgcttcatgtgcctcaatagtccagttatttttttttacataaaattctggctatctactcctagctagttctgccgttgaggtagttgaagaggatgagctgccaaagacaaaggggatgctagctactaccatgcatcaagttggtcaggtcaggcaggattaagctttagaaagcgtggtagatggtacatcaacaaggaaactgatgtgaggtctcatgcagatttgacaccaaagcaaagcattctcagagattttcctaacacaccgcgtgttgattgcgtcgtttgtgatatcttagtaaccaagcagattaaattaaattatgacctgtcccataaacagaggaagacaaatagacaatcccgatgggattagacaatccagaggaagacaaagagttcgtcagaagttgtacgtcgaagtgtaccgcaagctggaaacttctacgtgaactgattgaatgtgaagaactgtgtagtgaaccgtaagatcattggctcccattcggtgcgcagcctcagccagctatgccgatcgctaatttcgttcttcatttttatcaattacataggagacatgcttgttttactctacttcaaccgaatttaaactagataatacgggagtttggcatggagaaaatgcccatttaatgaaaatagataaactgtaactaaaagaatttctcagccaggttattgacactccccctcttataatgtgtgtagctccaccctcacagacacacgcatataaagtcgtagattatttcaattacgtagaagacatgcaagcgcacacagactcgatcttgctctcgatcgattacctcttgtaatataagttagttccattgacacacccatatatatataaaatcgaagattatttcaattacgtggaagacatacacgcacacaagctctcgctctcggtcgatggaggccgggggagggtggcgcgttgctgtagctagttgcatgcgcgccgctcgattgctgccgcgcgcgcgcctcattgcgatttgcgatagatggggatcgctcgcccgccgcgcgcgtcgtcgtcgttcgctcgctcgtacgtgtatatgcaaatgcagtgcagctaagccaacgacggcaacgtacgtcgtcgtcttcttcctcgatcgatcgatagctagctccaccggccatgcatatatgtcctgcgctgcatgcatgcatggtacggtgtcagataattaataacaataatatagtgcaagttgtaggcatatatacgtggtatatatggtatcagttaggttttaagcttaagcaaacgcacaggtggagaaagcctttatagtcccggctggtaaccccctatagtcctgtttttttctaaccgggactatgaatccgggactaaagatcgctatctttagtcccggttaaaataaccgggactaaaaatacatctttaatgttaccaatcgggacaaaagatggcagcgcacaatcctggttggtcaccatttttttattgtttctttccaaatccagttgctcctcccaaatgtccctacatatcccaaatcctatccccaaatcaaagtatcatcacaaatcagattcacatcacaaattctaaaaaaatagatcacaaattttaaaagaaatacaccacaaattacatacatcacagatccaaacatcaatacatcacaaatcacatacatcacagatccaatgattcacaaattcgaaaaaaaagggttgccgctgccgcctcctgcctcccctccggcagaggggaggccactgcctaccgccccccgccgcggcccgctgcccacagcgccagccgccgtcgcccgggctcggccgtctgggctcgctcgggtatgggaggtggaggtaggtagggggaggagaggagaagggggaggaaggggagaggaaggctgagatctgagagaggccggatctgagaggaggttgttaatgagagggaggagagagagagaggaagggggagggattagataagatcgagactactggcgtgcgccgctcaggtggttttatctttagtcccaattggtataaacaatcgggactaaaacctatttttagtcccggttgtttataccaaccgggactaaagataattggggtctgaatttgacccaacaaccttttgatcgcgactaaaaatgatctttagttactaaccaggactaaagattaaattttttttaaccgggattaaaaatgatctttagtctctgttcctatttaaaccgggactattgtagtttttaggcgaccgactaaagatggtttctctagtagggacagcttcatctgtgatacatctggtaattaatgtacgtacgtgcgtgtactgatcgatctactcctgatctctggacaaatactccctctccgtcctttttgtttgacgttgatttgcactaaccaacgttaaacattgggagatgttgatatatatactggatatactattcatttatttttaaactttaactgctcgccggccgtcattttaagaaaatgcatagatcgatacttcaaaaatatttggtattcaccaagtgtgttttgtatccttaacatagatatacaatacttttgtacactataacggataccctcatctcaatcgggcggtaagccccatctcaatcgggtatggcgtccgtcacaggctagaagtcactgatgtgaagagctatctcaatcgggcaaacggctgtcacggatgattctatctcaatcgggccctaagtaaagcccgtcaccgatagctttgacccagacgaccagttaatgcccgtcacagatgagtatattccaaaaataaataaattttattttctggctagccctcactcgtgtgcacccacgtgggaagtttaaacttcccagacgaccagttaatgcccgtcacagatgagtatattccaaaaataaataaattttattttctggctagccctcactcgtgtgcacccatcccaaaattgctccagaccaagcacacttaacgtcaaagttctctagagattggcttccggaaaagtaattgtaacatgttggtatgagtattgtattaatcctattatgccctaggccaggatgtcaaattggggttattaaatgatttcaaatggaaaagtcaccaaaaccaaagttgtagaactcatcgaggtgcaaaatttttattttggtcatttctccatctgactctatttaaacaatttgaaatttgaaattcaaagtttgaaaagttcaaatagaattttagatcagtgaacgacttcaactgaaaaagtcatcaacaacaaagttgtataacttatcaatatttacaacttttagtttggtcatttttcaatataacatttttttgaacagtttgaatttgaatttgaaaatatgacaacttcaaacaacattttcaaatactaaatgatatcaactgaaaaagtcatcaacaacaaagttgaataactcatcaagatctaaaacttttattttggtcatttcttcatacgataaagtgatagtaacattgttcataaaattgacatatctcttatctggttttataaactatagcacatatatgtaaaatttatgaataatattactaacatttcgtcagatgaagaaataacaaaaattaaaagttttagatcttgatgagttattcaactttgttgttgatgacgttttcaattgaaatcatttagtatttgaaaatgttgtttgaagttgtcatatttttaaattcaaattcaaactgttcaaaaaaatgttatattgaaaaatgaccaaactaaaagttgtaaatattgataagttatacaattttgttgttgacattttttccatttgaaatcatttactacccataaattattttgctatagtcaacttagaaatataaacatttcatatgaaaaatgaaaaaatagtcatcggtgacggactttagttaatgaccgatagagattaagtatatagcccgtcactgatgaatcatctgtgacgggcctagttgttatctcaaacgggcctcaagttggtgcacgtcacagatgatggtcatctgtgacgggccacaactttaggcccgtttgagatatggaatgttatcttaatcgggcctaaagttgtggcccgtcaatgataggtgtcatccgtgacgggcttaagttttatacccatctaacatgtctgagcgaccatatctcaatcgggcactttttgggtccgattgagattacttccttgtgacggcccgctatttctaagcatattagagcccgtcacagatagaaggatctgtactagtggtaaaccatgagctatctttttataattttgttgatcgtcaaagttcaaattatacagatcaacaataatggcagctatttgaaaccgaagggaataatatataagtagtatttgttaaattgacaacgtagttatatatgtcacgttctatatggtagtagctagagctagtacagagttggtacaattcgttgcgttgcatgtttagtttagttaatagacagagatacccgcgcgcgagaaagaaagagaaaaaggaagaagtcaaagttgggtttaaggtgcttggaatgtgacatgtcaaggtcagatcgatgtgctttctgtttggcaaagggtattttttaggccaaagtaggtggaataataatgtgtctgagaagaataattaagacatcatttttccccctttccttaaaagaagaaaatcatagtactacaagatagatctaagtcctcctacaaaaattgatggtaatgttggactcgcaagtctataattgtctctccggtctctgcccataagtatatagatatgtcgtttgaaattttaataaatattttaaattttgactattgatgcattttaaaatagttagaagtagtttggaaacacaaatataatgcatatatttatccttaaaacttaagtatactttataatatcgtaaacttataatttgagtaaattatataaaactattttgatccaattaaattaaaactatatatttgatagggtgtatcataaaaatacaagtttagcatcaagtta

SEQ ID NO: 5903 - DNA, 19331 bp, Oryza sativa
ggcatgcaagctttgatcttctcatatgcaggaaactgaatagcaacatgactgataccagccaaggcagggacaagtccactttataaaaaagaaaaagaaaaatatcagccagcgcacaaaacatattatcatcaaacggtgtaaaatcttgcatctgtggacttccatggaaagctacctgtacagtccacgaatgccttcttcatgtgctattctcttcaaagcagcaagtgtacctttgtacgggatcaccccagctcgtatcccttgggtctacaaaagggaaaaggatacagatgatgatatgactcaaaataaaatctttgaatcaatttgtctgagtatagcatgtagatgttgactgcttagtatggacaggtaaaagatctaaaagaaattcagcatatttataagtgattataattaatgatagctccattccaaatgggcattcagcctgtgtaaagaccatcagtcaacattaggaaagaaatgggaattgcttacaggttttaaacacttgcctaatataggccagacaaaatatttggtatgcagcattttgaaattgcaattatgctatcaggcgtcttggatcgactactggtccagacaagttgtggtccaaggatacctgaaatcttgtcttcacaacccaaagtggatttgttgcaatagtagttgcacctccagcacatgatgcagcaataacatttgcccctaaggacaggtgatgacttctatctgcaaaatgaatgtacgataccacataagaactgacaaatgatatgctgtcaagtaagtcatatgcagggtaaaacactaaccattggaagaaagcaagcttttaagctgctcatacacagtaaaatagacctggaaatccacaaggatactattagctccacaatagatcatagacacttgattcatctatagtgtagtgtactactctactcggtgccatacatgggtttgcatgcagatcaacttatagcattatcattagcatcgttgctttttacatagaatttaaaaacatctcatcaatggagtaagtggagctataatgtaagggtaaagactaaccgcccagttaggcaagagtgccagaatagttggagataaaccacgatacattccccgaaaaccttccctctgagcaatctgttgtaagcttccaattattacactacctagtaatgatagaacaaagaactgatgtaataaaccttagcttctgaagaatcttggtatagtagaaaacaatttagtccagacataagcatttcagaaaatatgctactcatcaaacttctattgacaaagatgcaaattcaacagtaaaaagtacgaagtaagtgcattatcaatgcaccaatgctgttggccacgtacataggatgacctgctggcattcttcagagcataacgggccacacatatgccagcatccatgaatgcagctaaaacattttttgaattcaaagcatgtacgtcagctgatgttccaggcaatttaggttcagcaaatgtgtaccaataacatcagaaatccaggcttggaagtattacccacactatactacacccatggacatcacaaagtctgttggcttttttcacatgttcatgtatgctaatgcttttatcatacatcaacgaattcatgcaacagcaaatagcacgctgcatgctttccttccattctcaatgtgcacgatctcataagttcccaacaattccgctcaacacatgtgaagctcccagccccactttgattggaggtactgatagattcaaggtgcgcaaaacaacaacgagagaccaatcaaaagcctcagataacagaaccgtccaaacaagcaatccgaaaccgttacgacatctaaaagcagagagcagatctttcgttgccgacaagtattttctcaactccctgaatcctggaagtgtccgagtaaagctacacaaagagaaaggcacaaaatctgcaccggtttaccatcattcccctgcatgcatgatgcatccactgtatattctgaccactatatgcactgactttaagtgctcaaactcctatgtgctcaccatgcttcatcaagcataggatagaaattgcagtctataatagatttatgtgcagctctagctctgcagcagcaaactgtagcaagcaaagattcgcaagaattcctctgaagagacacgcacctccaattgtgccggtggcgagcttgggccagccgtgcacctgaaacctcgtcttgatcacatcgagcgggcacacgaaggtcgccgcaaccacacctgcggacaagccccaaaaattcaacgcttgctccacatgggcatccccgaaacacacaaattgacccaaaaaaatggataagatagctcgagcggtcatgtgttaccagcggaggcgccggcggcggcgtggcagagcaggccgcgggcggaggtggcgtggtggctctgctgcgaagacgcggacggcggcgccggcgccggcgaggtcgccacgtcccccggcatcactcccccacacacacaccgatctgctcctcccctccctcagggcacggaaccgcgcgccgccgcgtctagggctacagccaccgctaccctcccctacccctaggagaaggtgaagcccgggggcgctacgcgagggcgcccgatcgcatccgcctccggggggtcgcccgcgacgtccgtggcgcgctcgtcgcggcagcaggaggcggcgaggcgggggcggaggcggaggctagggttaggggtggggatctgaggcggcgggaggcgcgcgcattggggtcgcggcggtggcggtggcggcttcctcgcctcggctgctccgtttttccgtcgtcacgacatcctcgcctcgcctcacctcacctgcccttctctcttctctctcatatgcttctcctcctcctcctcggggaggcgtggggcccacgtggggcgtccccctctcactgacggtgggaccgggaatgattccgagggtccacgtgtcagtggggttgggtgaagactttctcgcccgtcgtgcacgtgcggcgcggcggctcacgtgcggggccccgatgtcagccacaagcgtggacccgagcggattcgtggtcaccagccaaggccgtggggcccacgagtcattgacacgtagtcctcgtttacgtgtacgtgtagaactttaccagcttattagttaggccacatgtttttgactcaacgaaccccgtcacccgaccacgtcactgtcaggtgggaccaccgcgcggtgggtccccggtgtcatcgatggcgggacgtgggggcccacggcggtgtctggtcgccgcttaccacccggggggtgacgtggtggaacggcagccgtgcatcggggacgaggcggaatcgaccggacggcccagatgggctcgcggggaccattttttatttttcttttcctcgtttcgttttctttcgctatccacagcgagcgagagaggaaaagataagcttgcaagaattatgttgctttgtttcgccatggtgcggcttgtactgatctctcccccttctctcgatttgtggggacagattggaaaatcggacataatatataggtagattgtccaagtacttgaaaatagctcaaaattttgtcttgtttgtactacccaagtgcctaagtagttggtacacgtacgtgactcttatcaatgactttggttcgtaaacataggtatttggcaaaatttggtacatgagtacatgacatcatgacttcgatatcttcaccgtacgacattacacaagtgactttagaaaaaaacactataaaggtgatttatgattaaataggggagaggaacaatgtgaaagttgtgaactattgtttctctcccatcaaattagaaatcaatattttaataggtacggcatccatgagttaatttttacgtttgtagagtattttcttccaaaagctacttttgtacgatgttctacagctaaaaccgctaagtcacaacattctttattaaatttttccttattatttttatcattgctctgtgtttttatcctgaatgtttcttgccattttttttctttttgttgttatatggcataagtactcccttcggtcaactttattttattttatgtatcatttgttaaatatagataaaatggaagtcgatccaagtggatttattggaccgtagtaagccaaaaattgaatttacaacttaattttcaagttaattttttatattatagtttattttatagtatttgcttttgtatcgctaatgagtaaggacacttatataaatattttacccatatttttttctaatcctttataacccactaactcctaaagcttaacatgcaaaggtgccacatcatcatccactaacaattaatacatttaatatcatgtaaacatactatattatctaatttaaaatttattacattttagagcttttaaaatgaaagcatgttaaatcatcatcccacataattcacataatatttcaatatatattttcattattttttataatatcttatatacctatacaagttcatcctcacttggttaatattatttctctcttctctaaataagccatatcacataaattgattttagtgcttatgtaagtttatattgtttagctatattacatattatttttacttattattatcatattgaagtcccgcagtaacgcgcggggtttcacctagtaaacatactaattagtataaataaaagcgaaaagatgagattgtaagaagttgataagttattagcttgtatttgtattcgtaaattagagtggatctaatttatggttttgacgttacgttttaacaacttatacgttattaaaataaaatgaaaattacttaaaaaatcaaatgcggtactacatctaaccggcacgaaataagtgaacccaacatgaacacgtaccctaaacctcaaataacaggccaagaaacaaggtaaaccatcattagctacatttaagataacccctctaattacaagttattaccatccacacgaaaccgtatgaaatacatagaaataactatttggataaaccgtaggaaaaacacataaactggaaattcctacaatgttaaaactcttgataatttttctccaaaatctacattgagcaaatttataaggaattctatagaatttgggaagatccatttctttatttcaaatggtcaaataggaaatattcttacagaattagaaccctaaaaaaaattctgcacaaatccttttgttgacaccttcgaaacagacacgcaatagcctcttatctgtaaagaaagagttgactgtccagattagaattggctgtccaattcgatcccccaacaaacagaaaccaccctatccatccagccagagggaagatctggtcggccaagaaccgaatccagtgctatcaagtatcaacacaagattgctacagccaaccacgaattgattcccgaatgcaaagtaattatcaggaaagagtgacagcaacccaggagatcgaaagggagaatgatcgcctttaattcctaataattcttcagtttttctgtctcgccttttttagatctctgttgatggtgctggtaatgccacgtacgagcaaaagatgaaagcatagttaggaagtaataattctgtataattatatgtacctatcacgaataatgagagaacttgcccttttaaagcttagatcacttgaaaaaaagtaatgttgagaactctggattactttgtgccttactggacttgctggacttgtgggaatctactgtactgccacaactatatggaatacgagaaattttttttaaaaaaaaagttcctacattcccgtaaatgaaggaaatgaattcccttgagcaaaggtaggattcacgttcatctaaatacaaacattctagtgttagttcatgaaatttcaatcgtctccaactggcacattggcacatttctatcatgcttcctgataataaagtccattgccaccaaaaagatgcatgcctgaactgtcataggctcatagctcctaattagcgataacacaacatggaagaaatctgagcatataatatttacagatggcagcaacagctgctgagatcatgtaagatgtgagaaagatatgaacagattgattcttaacttcttcctggctaacactttagcaagatactacgtccacagtcaactttgatcagcccttaattttagaagcgtaatgtactccgtgaattcttcacccgagaaacctgcaacgatggttaaaatgtcacatgatgttcaggattagcatataaacatggcagtttgatactttgatgtttttagattgcacttacaatatgggacttccattccactttgcatccctcggtgacaccaaactgaggctgtcccttgacgtgatggaatatatgaacaaggaccacagcatcaagggcagcatactctttctgcaaaaggaggaagaatctctctgttttagggatggcgctttttgtcctcgatgaacagtaggctatcaaactaactcgtggctttagattgcaagatgaagcatgtttgacttagttttaactaatggtgtttaccaagataagcttagcacaagatctgatagaaaatttgcttgtacatgagaataaggagaggcatcttaaggtgatgttaaaaatgtggtaatcgacaggctcatttctaaagtaaatttctttttctacttttttcatacaaacacctgtcatggttagaaaagtattgtgaaaataaattcagaatgagactgaaaaaaaaaactcacaatacaaaattatgagaaattaattaatcactcataccaacaaatagggcctttcaaggaataaggactcgtgaggacagcttttaaggaatatgaaagatgacagacctgattctgggtgagagggcgctgttcccagttgctattccgtcgcgtcttgttcaaaccagctcctaatattttctgatacattccgtgataaataaagatggaggaccagatgattcacactaaactataagcttaaaaaaaatcaaaactggttcaacgtccagttaagtggagcctataccgctatagcaattaccttggacagcccagatagaccaccagtagtccctttgaagagcttctggatatcaagcagcatttcataggactggaaacatttcaattctccatatgattgtgatagttgatgcagatcacattgcagattatatcctttggtttacaatggggcaaaaataagtacttgtttaacaggatgcataagaaagaaatgttgttttcaggaaaacaagagtgtatgggaagatatgggttttttaatcaaaatagtacgctacctagctttagtatgtttgaagaacacataattcgcctgaagcagctatccaacacttttgggtcatcttcatacagcttgatcagatcaaaaataaaagctttcttatctgacgcaatttggataatagagacctaaccatagagcaaaattcaattaatgcaagaactgacatagatagataaaatgcagaatttctgaaagaggaacaagtaaaaaatatcatgggaacttaaggataagatagtcgttccaaaacaataaacactgtaaagaaaatatcactgagatgatcacaaggccatagcttactacacagggagtgatatggataactgaatactagaactactaaattgcttaaatgatacctaatacaatttatttatcctattttatccagtgatgccttttgaggaagaacagggggagattttcattcagcctgctgtatcgccacaataatgcaacatatgattaccatacattaggaaaaatgattataattgtaccagaaaactaagttaaacatggaaactgacagaaatttaaattaagacatcgcttaccttattaggtttgctacctttctcaaaattaggcttccattcacaatccacaccaataattttacaagcttcaatataacttattgaattaagaagtccatcaatctcatcaacccagataatgtcttccaaaatcagttctttaagatctaagtagtcagacccacaacaaatctcctctggaactgctcatacacaattaatataggggatcaacagtagaaatggagttgatgggataaagtcaattacaacgtatcaagagtacagataaaattcaatgaatgtatcataaagctgtgtttcatatatcataattttgcattaacccatcctgcattctccctccctccctccctctcacgcgtccatgatttttgcattggtaaaaatgttagtctttaaaataccttgttcctaattacagctcttcctatgtaagttaaatttggaacgtcggatgcatgtagtaaacctttccattataatgtttttctagtaattctatatcagcaacccagatttcaaagttccagctgaaagtaatcaacttaatcattctagtgggttgtaataaccaaaaggaatgtcagcagggtggctatttaaaagttaatgcaaacgtaaaggagatagtttctacagcaggttgaaaataaatagctagaaaattaaaagaatacacacctgcaggactacagatattaatgtatgataaataacgttggtgtttatgattacccaaagaattgacatagccttcaagagagtatctttggcaaagttcttcaactttctccatgtacccagcttccatagctaggtatacctgcacaaggtaacaaagtcatgagtaaagcaattatattttactagatggcaacccgcgcgttgcggcgggataatggtgtgtgcaatacgattataaaaagtctatatattaatatgagagagattgttagttgatatgaaccgtaaaagcaccatctgatgataagatgacaaatggcatgacctgccttctttaagcaataataactacactatgtgggataatcaatattaagttatctaggaactaatgagaagtaaatgtaactattttaatatatcttggatgattgtgatgaagcatgggaataatccaatggctcttattttgtcagttatgtggctcaatgcatgttaagcttttggtgccaactatataggatatatagattttatacacaaggatgccagcaaaaaataaataaatatgaacactatgaaatagatgacagcatggcttcacaataacgaccatcaatccacatgtaacaaaagcaatacatcctagccatttcatccgatgaacaaagatagaggcatataggaaactgtgtctcgagtgaatccatcttccattgcagcagatactttcatgatgacatgtacaaacaacaaacatgtctaaaagatgactctgacaatgtggatgcatattaccaggtattccatcaattttgtttccttcttggcccgaacctctgcaatatcccagcaccctttctcagccagcttcttcagtacactgcaaatacaatataattcagagatctataagattagtaaacattatagtagaaatattttgcaatttgcattgagcaaaacaaaagttacctctctttatacaaatagttaacatctgggaacttttctgtaaggtcatgttgttttaccaactcatttgccctctttagcatttttatatccagatacgtttggatgatcaaacatatcatttcattccccatgaaaactgcccacttctctgctgcctccaagtgattattttcaatcagttttgtaagaaaggactcatcataacattgaatagaaaatcgtgttatcaggttcacagcggtcacataagattctgattccattaagcattgtacatactgtttgagatgttcttttgctttcactagatcttcatcacccaactctgaaccatataatgcatcagccatatctctcaactcgatatcatatgcctcgagaagctttatcagtatgcgttcctcatggggcacaatagaagcaacaatatcaagaataagtcgcgcagcaagatgctttgcatctaagaaatctttctgtacagattccacagatttcaaatgccttagagaagagatcaacatatggctgaagccttcagcatgggttttccccagcagtggcacaatatacatgcattgaacaacatacgtgaatgggcctggctgaggatcattatttaatacccttttaacctgcagctgaaggatcttgaactttggggttgctttgtcagttcctgatttttcaaaaaagattgtaaaacatcagagtatggacaattaataagtgcataagatcaaggatgaaattgatatcgaaaacaaataaaataaaataataaagcaagcttgtagcaaattcatagcagagagttggttatgcaaaaagtttgaagacccaaggaattcaagagcctgcattttgcattaaccgaatttgaaaatcatatttgatgatatttacctcaaccaaggttccatacaaactactatggatttaacctgtaattattactatgtaggtaactttatttattttcctatcacgtgtttatttctgggaagattgtgtgacagcattttcatatcataatcaagcagaattagttgcaccgaagcttacagaaagaaatattttagcacaccaatcatgtagatattaaattataacagtgccacatagatgatactacctctttcttaataactgacaattttgactttcccaattaaactttgacaattaattgcccttaaattgttagaccaaagtgaacgaaagttttgatttagggcaaaccccactttagtaacatggtatcatttctaggtttgtaaatattcaacaaaaaatatgagtatcagttattatgaaacggaaggagtagttttcgaatagcatgaaaaagaactaggtataccatataggtagcagtccttcaaaagatacataaaagtagctgcagaaacatgtgacaagtcagaaaatgagtgtaagcacagggagcgctcttcattgcattgattgaattcagagtcttcctgagtctgtgtctttgaacaacccatacttcataaaatcatcccaacctgcgtatgagaacatatattccacattaaatcataaattgaacctctccaccaaaacaaataatctgagacagctccatatcgtcataaacgatgggaaactaactatttagttctgctcagtggaggttgctgagtttgcgaatacaaaactacgattctgctagagaatttatatacatctatcaagctgacatttcttctcactccaggaattcctaacaagctgaagtagtatttgttttcgcaagatataaaacattaacaccatcagattatccattctagcacctcagactatatatatggcatatgctaatggagacaacaatgctacagcaatacttccacaaaatctctgtaacactagtctgaacgaactaacaacaattgatattgtttcccccaccctctccgcctccagaacatcaaagatcaagaacaagatacaacactttggacaggcaaaagggagattgaaatgctcacacatttcctccattcatcccaaaaccgatcgccagaggggattttttttctctgttttttttggtttttcttttcgaaaaaaaaaatcccccaccctaaatcaagctctcactactgagattggggaggcgaggctcccgtcgccgcaactcgccaaccacagacagaagaagcaacgacgaaaatggagatgagacgaaacgaagcaagaagacgagcgcgatacctgccttccacacggggattccggccaactcctcctcctcctcctcgactcttggtctcttgcttctagggttcgcggtcttctaggaagttggggctcgatacttggaagcgcaagaatggaaaattttcgcggacgaaagacaggggtttcgtttcacggaccacgacggctgccgcaggtgaccagaaaacaccactcgtcggcggcggcggcggcggccgctgtactccttcagttttcggccttctcggccttttttttggggggcctgcttgacctttttgggcctttttcgggtacatgcaacaggaccagcttcttttcttccacccttcttcttcttaaaaaagaatatatttaaccgtgaaattttccccagtactccctccttcccataaaaaaaccaatactggatgtgacacattctaatatgtccatattcgtttttctttcgggacggagagagtaccttctatagatcgctttccttctgtacctctgaatttaaatttgatctttatggttagttgaccatgagttgactattaaaatttccatcaaaaagtctattttacccattggtatgaaaaagcatatagatttgtggagcgtattgttggatttaaaaaaactattgtatgagtttataggtttgttatgcggaatttatttatgacaggttttatgtttagatgacataaattattattatttatttaaaataattgtttgtgtagatttgtcttataagacaaatacgttgaaactactatcaacaaaaatatgctacatgtacattttttaataattaaaaaataaatattgatttttttgtcatgcatgaaataaattttgtcgtaaataatatctcgcatgacaaactcataaatataaaagtttcatacagtaaatttctatactccaataatataaataattacatgtttcttcgtactaaatggcaaaatagacttttttataagaatttaatgatcaactaacaatcaaccaacagaaaaggtatggaagggatcgaagcaaaaagtctagggtatgcaagagaatgaataaaactcagcagcataaaaggacttgggcaacttttaaggggtatgtaggtgtcaagggagtgattccttggacaacgaggagtggagacccctcccccccaagtgggaagattcaaccaaggggtttgtggtgcaatacttagaaaaagattcaagcaagatcggatctgtggggcccaagctccccgccatgcaaaagacacatgaattatacaggttcaggctatccggaggtgtaataccctactcatgtgttggtttcgttgtcttccctagatcagctgcttacaaaggaggctttttcaggctgcaaaatgaattataccgatctaaagagtccagccctccatctgtagcttgtccccttcattttatagtccaagtaggggctcacattattacaaatatactccttgtcttgtcttatcagctatcttgtcgttgtcggctggtttcctaacacatcttcaagaaaaccctattgagatttgaaatctgcattaccccgtgtacccgggcttctgtccgagacagctgggtcgcgccagctatcccaacacatggcgagtggtgggcttggtggaacccgggctgtctgaaacaatgccacagcctcgcttctgcccgtttggcttaatcaggtggtgcagggcatgttcgacacgcatccaaggtgccaccggcaccaatgactcaacactggtgtcttgtctacatcctttcaactccatgctggctggggctccccataaatctgtttcatttatggcggagaggaccgcttcacaatagcccgtggagcgtgtccatctccccagctggtcgtgaggtcgcacctgcgcgctttttgtgatgatagttcatctattcttaggcatgcttctcgaaaatgtctttgatgagtcgataatgtagttattttacatgtttcgacgctcttttttgcagaagaatgcggaaactatagggactagggcgtgcctggatcccaaggcgaggaatggaccgaggcagaccttgagctacatacttatcccgtaaacaattgaaggtgggcccgggacccaccaaagtgggacccctagccgcatcaaactgggtgtggctttttatttttaaggatggtttaagcatgtcatttattttatttataattgttctgtcagggaaatgggtaccctggttgccattttaccgacagtagggaatttacttttctttctttctttttccctcttcctgttattttttgaaggggggaaaacagagagcaaatctcattgtgtaagtgttcttgcaggaatggtggtgcttgttagcttgtagccatgcgcatccctcctatcatcatccaggaagattgttttaagatccacgaacaaaagagattttgtaatcaattaatatcatgctaagctctactcactttgtgccacgaaagacaaatctaggactggatgtgagatattctattacaacaaatttggaagtacaacgaatttatctttaaattcgttgtactagaatatgtcacatccagttctagatttgtttttctttgagacggaggaagtaattccgtaagaataggggatatcatataacctctagggaccaataagggtcacaaaatccacttcaaaatagcactcacatgtcccgtgatgaagggctttagatttggggagttttagattataataagcaaccggtgggaattcaaccaatgagaatctagagaagtttgaaaaaccgattttagtttacttattggattttgcactacagcctcttagaatatgtaagaaaaactggattgtttggggggacttgtctattctgtgagaagtcgtagttatcaaagctcccccaaatgattctgaaacataagccataattcatgtgtagttgtgtacaaagccaatggctgcagttgtaccaccagcacacgagggcatgttgaatgtgcttgggggaatattatcccaatcatctgaagcatacattttaatattaaccgttcgttcatcttatcccatttcatcccaaccatccattcgtcttctttttttattcccgcccttaataatccatataagttccaaaacatcctctgagataaaataaagagtgaattccactttggaccagtttttattaccttgtttgcatattggaccaggtataagcaaatttttttcacttagggctagattttgtgaccaaattttgcattttggactattggatccacaagtcagtggccaacatcatcttcttcctcagcagtcttctaggctgagctatatccagcgatgtctctagtgagcctattaattcttcacacagacaaagttcctctttcccaatctccattcacctcgaaccacactctgctacttgacgagtctgagcgcagatgctccaaacctgccagcaatttgaaaggtgtgcttggtgagttcgatgtcaggagcatgcatggagaaagagacggggttcgaggttgaggtgatagagaatgaacagagatggagctcgagttctacgtggtggagttggactgttggagctcgagctcaagcaacagaggaggtagagctcgagcattgaggcaaaaaaaagagttggagctcgagttgggaacaatggaggatgcaaagcttgatatcggggaggatgaagatcgaaacctgcaagaccagttagtgagtgtgcagatcatggagattttcacctttctcattattctttcttgccaagtatcagcgagaagagctccgtatgggcatggcaaatgttgagctcgatctgccttgctcagattcagtggttcacagtggttcttggaggagagagcagcaagagagagaagctagagaagaagagcgggttgaaagtgaaatatgttgcaaagatatctggcacaaattgaaaatggttagttaattctagtccaagttgcaactttggtaaaaagatatggtccaatatacaattcactctaaaatgaaaatggtcacggaatttcatgaccgcctgatcgttgtttccttacaagttgtattgttttcagccattaccattttagctatatataaaatttgatttttctaatttatttcaacgtcatattgatattgaaactaaactataaatatagtcaattatagatcgactgagcgtcaagtgctaccgtcgagtgctaccgattctgaccgtttccataattacgagagcagatggtgtatattgagaagctgcatgctcatcgacacagccttgtgttatcgtaatttattgtatggcgattgataacgctctggagctatggattttgttttaatttgtaactggaaaaaaattttctatcttttccagcccagacaaccagcgaaatcaagtctcccgtaaacatacttgtatcctaatttttttaatcagaaccccgtactgtactcgattgtcattggagagtttgattctgctatagcatactgcacactgtaaactgaagtgtttttaaagtttaaaatgaatttcaaagtttgattttaaaagaaatcaaaacaatattttaattgtcctcttttttttgcggggattttaattgtcctctttagcgatcatgaaaagagaaccaaaacaaaagatgaaaaacactataatatgaatattcgccatgcaggatgcctaacacaaggagccaggaccccttagttggcgccaacatgctaacacaggggttacgatcttgattggcaagtgaaacccgagccccaccaaggcatcaattttcgctaattttgaagcatttcatataaattgggacaaatttcgaacaagatgcgcatctagaaccatctcgagatgatcaaaattcatgaaattggatcgaaattcattgagattgtgaaccctactttaacatcagctggtacgtaggaggaactcaaactttccatcaccttttgtactattctcttttttttcttatcataattctgaaatgtacttgcagttttgattgaaatggaaaggaactctatccagtagtagcatagtgtagcatttcatgtccaatggagactgacaaatcatcaaatctgccggaaagaaagaaagaaagaaagaaagaaaaaaagaaagaaagagaaggcgagctacaaaaggtgatcttaagcattgaagcatcaccaagaatttcaacagaataacagcagcatatgggtaggctagggaaagaagaaaagaatagaccaaggaaaggaaagaagacagcagaagaagcatctcaaagcttttgatcttatatcaatgtttgagtggtatcctagtcacaaactcacaatgcctttagtgatggtgtggtatatcttgccagcgccgctaaatatataagcattgatagtcggctataacttttcaataaatgatatagagtaaaaagctagtacacaagacagaaatgtaatttccttgtctatcgtacttttcacatcaaaatatttgggctctgttcgtaataaaaacaaacaaaacgtttctcatgtaaaattatgttgatttgcactcacatgccatgacagtggagggtgacatagtgatgctcgaatatagtggagggtgtactataaatgaaattagcacacttatgttctcaaatagatgtcgttttatcatattagttttgtcgtcaaatatatgccatttaaggtcttctatgcatttttcggcattattcctaatgaatctagttagcgcataattaagctcatggctttgtacgtaacaaactgaggcaaaagaaacattgtgccaacctaggtggttggagcttgatgatgcttaattaggggcaaagtgtccatgacaggctaaatattgaagaagaggtttttttactgtccttgaggttgtgcagtaccaaatcctgaccgttgatctggcatcatccaacgggtagaaatcatccgtacctcatggtactgcacctcctcattgaagtggtactatgggtggaagggtctttctgtcctttactgtttcacgagagaaagaaaaaacgtcgggagagcatagcagcggcatggcggttggctcgagggggacggcggcgggcgcctggacgcgtgacggcggcggcgggctggacggcggctggacgcgcggcggctagacgcggcgggcttgagggggacgatggcgagcggacggacgcgcggcggcggtggcgggacgcgcggcggctggaaggggctggacgcggcgggctcgagggggacagtggcgggcggacggacgcgcggcggcaggcggctggatgcgcgacgccggcggccggctggatgcacaacggcggcggcagcctcgattggcgacaacgacggccagctggatgagggacggcgacgacggtggcgggttggatgggcgacggcggcggcagcctcgattggcgacgacgacggccggctggatgggggacggcgatgacgacggcgggctggatgggtgacggcggcggcaggcggccagctaaatgcacgacggcggcggctgcctcgattggcgacgatgacgacgggctggatgggcgacggcggcggccggtggccggctggatgcacgacggcgacgatggcgacgacgacggccggctggatgggggacggcgatgacgacggcgggctagatgggtgacggcggcggcaggcggccagctaaatgcacgacggcggggtgcctcgattggcgacgatgacgacgggctggatgggcgacggcggcggccggtggccggctggatgcacgacggcgacgatggcgacgacgacggcaggctggatgggcgacggcggcggccggctggatgcacggcggcggcggtgacctctattggcgacgacgacggcgggctggatgggcacggacgaagagatgttttttttgtccgatcatacccttgctaaatcaacggttagattagattggtacctcatggtacctcgtacctcatggtagcttctcaaggatagaaaaaatgctcattgaagaaagaattaacactataatgctaaatagaagagagaaagttatggaaccatagacatccttattggttttcatagatgctttacttctaaaagcctcggggaggccatgaactgccttagactgctctaatacctctctctaatttcacatttaacactttcattaataatatgtagtacgggctaaggtcgctctacccctcacatacaattctgatccgctcccatctctacttcactccatttcagatctgatg

SEQ ID NO: 5904 - DNA, 14165 bp, Oryza sativa
  unsure (1)..(14165): unsure at all n locations
ctcataataaaatgaattataattacgtaaatttttttgaataagacgaatggtcaaacatgtgagaaaaagtcaacggcgtcatttattaaaaaacgaaggtagtataacggaggtagtataagtttgtacacttgagctaaactatggtagtatattgatactagtaacatccccatacgtttctaaagggcgagaactatataattagaaatgtgttaggagagcgattgaggataaaatattagattcggtggttacttgataatgactgttttgaaggtagtaaccgaaaagagaaatagagcagcggtagttgcagcccgcatcgtttggcatattaagtaaataagccaaacgacatatttgcaaatgaaaaataatctgtgaaaaaaacttttatatacatgaataataaactttgatgaaaaaaaacccctcaaaatcaactctaaatttaaagttgaaactttaaaatttggctgatatgcataagcataagtgaaaagatcagaaaagctagttggcacgagcgcgccagcaacgctgctggcgcgcgtgccacctggcgacgctcccaccccatgtgaggcgttttttctgttttttttttcgatttttttctttttctttttctcttttttcagattttttttttaatttcagcacatgtgtgttaacgaccaaatttggtaattcaagtatcaaagatggaggtaaaaccaaagcagaatccaagatagagatcgttccggaaatagagcaagaatcggttaaagtccgaatcggctgcaaccagaatcagcagagtttgagtcggacaaggttagccgattgagccgattccgacaatgtgacttggtacatgttgtcgggttgagttaatgtgcttcatatggattgccacgcacatattaagtcctgaaaaggcaattgtatctattagttaggatattttatataatttccttatagataagtttgggcaaaagtctgccgcaaagacttatggtatcttagagtttgttagagataagagtcgtgtccgataaggacatattttgtatctcaggtataaatatgacccgaacccatgtaatcaaacaatacacgttcaatacaatctcggcgcatcgccaccattttactttcgtttactttcgacgagttcttgctttcgggttaagctgcatcggtttcgatcttcaactagaggtaaaacttgttatggcggcttgcgttctcgggattagtgcttccatctttatgatactttaatcttgtttatgtaattcgtcgagttatcatatatcttatataatctttgacaatattgttatttaaccttcaattggccaacatctattattggaaggtagccgattaggttaaatatcaatgttgacttagattatataggatatccaccaccctatgaaacattcaaaggcttgattatctagatattgcccttcttttcatacttatagctgcatcagttaggtttgatcttataagtcgtgattagaatctcaatctctagcctgctttttggttgccgattagggtagtatcggggtttcagccgatcttacctgatttaactcttttatatcttatatgcttttattgacatgttaaatctgccctttatgttaagatcttgtcgcatttaggtatattaagcttcctgtttgatatattttgcttactttaatatcttaatatagagtggtatcggagtattagatgatacatgctagatctatctgatcggcaatgctatgaatgcttataatctctttgttaatatatatttcgatccaagtgatttatactgtctcggcatggtgactgatctatcccaattacttgatttaagtatatatcgacagaagcattatataccattaatatctacagccgatcgaatagatttagttctttcttacctgtttatgactgccgatcgattcaaatatgacatcggctcaaagataaatgatatgtcattggcgactggccgatctgctatcgtttatagatttaaccgctattttcttgtctttgttccttgttgattgcagaatcaaatcaactggcacgctcacgaacctaaaggcaagatttttggacctgcactgaagttaagcagatcatccaggcctcgtgtttttcgcatcaacaatgtgttttcaaatattttgtgttaaatgtttttaaaccatgacatgaaaattttcaaattttaacttaaaatcaaatcttgagtagaaagttttcaaatccgagtagaaagttttcaaatcttgagttgaaagttttcaaagttgagttgaaagtttttcaaatttgagatgaaaagttgaaagttttgaaaatttgagttaaaaaaattaaattttgagttgaaagttttcaaatctgagtttaaaattttgaaactatgacttcatatgtagatttctttttaatttgttagttaaaaaatctcacaaaaaaataaaatcttatctactaccgtcattatcctaaactgttattatctaatagattagtataactactgaggccgaaaaaacgagcgccggcggcgcgtacacgccagctagcgatgccctgaaaagattgggactgtgcgatttgtcctagggtagggccccctgctggaatcctggaaaaacatcgatcttcttctggactactggggggtttacgtgagggaatctctccaaaaacctggaaaaacgcctagctctaagcaaggcctgaaattagtgatttaggtgtgtctgtgctctaaagttggtgcaaaggggtgctctaaggcctctcacagtgcggtgagctggaccagtgctacaccatgccagctgggattttcgcgtgcatggcagatggatgcgcggcctagctgagctcttcgcccccaagcagagccgcgcagaacctggtccaaacgaggcccataactcctagcgaaatttcgattcgccctccaaaatcctctcccgccgcacctatttcctttttcccaccaccgaaacaccctaagcaagaactcccaagcaagaactcgatccatcccaagaacacaagaggaatcaccaagaagcaaaaaaaacaaagaaatctcgatccatcccaagaacacgaggaatccaggccccagatctcatattaaccaatgaacaacacatctcacatgcacaaaaacaacaatcaataaccggagttggagccaatccatcatcagatcaagccgccgcgccaaccgctcccgccggggacgtctcccgctgccaggccagccaccgccaccgcccgggccggcaaccgcggctgccggcgccgaagggaggagatccgacgctggccaccggggacgccgcccgcttccatccttctcccgcgcccacttcctcctcaccgtgccagtcgctcccgctggggacgtcttctgccgccgggccagccaccgccaccgccaccgcgcgagtcggcaaccacggctgtcggcgccagagggaggagatccggcgccggccaccggggacgccgcccgcttccgcccttctcccgggcccgcttcctcctcgccgcgccagccaccaccgccgaggacgcctcccgccggcgcgccagccaccgccgccggggacaccttctcgccgcggcttcccgtcggcgtcgcatcgagggagaaggtggagtggcggagtagtactcgactcgaggatggagaggagaagtagtactcgatgccatcgaggagaggaggtgagggctggaacgaaaagccgaggaaataaattttcgtggggtccaccggcttgggcgctagggtcatgccccactgtgggcttggtaccctgacttgggtgcctccatccaattaatcttgacaactatgggtgcttgcactattgggtgggtgtctttgggccaagttttgaggctaggggtatgggccccatagcatgcactgtgaataccctaatggtgtgtttggataatgggaaatggggagtgggattgggattgggaaataaataaagagttaggattaaatggaaaagggagaatgaatagttaggatttaagggctcgttcggttcataagattttcaaaacgtaggaataggaaaaacgtagaaatactacaggaatacatgtgcaaacctatggattgaaaaatacaggaatttttcctatgttgttgagcaagctaaccaaatgaatacaaacattaggttggagtggattatttttttcctatgcttttccttcgaaaatagaggaatggaaaactttcctacagttttcctatggtgcattcctatgaaatgaatggtagtttaaaatccattcctatttctatgcttttcttttgtaattcctttaaaacgaataaggcctaaaaatgagtgggaaattatttccctttcccatttaccaaacattgactaaaagttgattctctccaaaatctgccgagaatgaatgcatatcatccatccgcgtatatcccggccgctccaaagcagggaaacagtcccgtacatccgggcggagatcacgtacgtacgtacgtagctgcacgcgcgacacgaccaatccagaccacgattcatccgcccgctgcgtaggacaagttaaatgggggtagtggtggtggtggtgggcaccacccgctcttacttctcgttaagtctgggcgttggattgggaccccctgtgccctgtgccgctgtgtgcgagcgctagacgggtgaacccattgaatgaaccggagtgaggcgcgtcttagagcatccgtaatagtaaagtaaggtgctatttataaaacatgtacgtctcagcaatagactagattaatagtaaaccacttcaatggtatgtctacatgggtatctatatttctctaatccatcgtctcgtttttctctatagattatctccatgttagtagatagctctgctttctctcttcatttaatctctccaagtagaaaaatatgctgacatggatctcttgtagagagtttatagataaccattgtgggtgcccttaccgttaccggcagtaggatgaaaacggtcggaataatcagtaatgccaagttcaaaaacgatgctcggttaatcggtaatggattatatttatcaatttaactacttaccccttcatattaatatgatgcttaaaaaaattgaaaaatcaggatatgtatatatttctgaaaacaagagaggttagaaatagtaccacttctacgaaaacagcgatcggtcaggaatttctgcgacaattttcatccctaacgtcagtgtacaataatactaaggactcggtaacttcatcagggttaaacgaaaattaaaattgtagtaagtttgttttagaaaagtagtaggttttgttcagttttctcacaattcaccgcggttatcataagattatattaccacggttaccgagcttactgcaagataggatataatgctagcacgggaaaagtataaggtgaaaaccatatatgtagtggaaatctataaactataattggattaaaaaaatggatgtatgcgtgatcaatagttaaaattttactcccggtaaatgttttactcatgattgaatctgcgagtaaaatttttactcacggtgacaggaacaaatgttagacgttcattttttttaattttacaatagtttctagattttcaatatattttctcccctaacaccatccgtggtaattggcattgaaaaacctttaggcatgtgcccgttttctctccggcgcggcgcggggcaggcgagagaggctgagagcatagcggtgcagcatacttagagcaaggctaataatacagccgacctgttggctataaggtttttttagccttctctcagcctacccatataatagttagctctttacagttaatacagggcccactctcacggagttttttagttcttgtgtccaagccggctataaacttacagcccgtttctcctctcttctctcctccacctcagtatttagcctgctattaggtaggtgtcgcattcatcattccgagagaggactccgtttttagtggatttggccgttctggcagctggctgcacgcgccacacggctgcagcgtacataaaaaggtttctgcccaattaaaatccatcgatgtgtgaggcgctggaatcgatcgtatcatgtccctacccccagtgcgccactgtgccaggcaaggcatgcatacttgcatagtagctgtactagtataacagtataggaccatgagatgaggccatggccactggaatcaacaaggaaccggcactacgaaagttgaagggttttcaaaggaaacaaacaatgcgatcctggggccagaccgacccgcggacccgggtggtgctggtgctgctgcatcaacttgtcccacgtattggatcgtcgccgacaggtacgctagacaagagggacggccgaggtattacttcttccgttttatcctacatatacttatatagttcgtctttagttgttgctatttctctcttctcttattaaaccacatcattccaattatttttagccattggataatagatctatggtttaaattgtctattctttattctctcataacataatgcaatctcaattatttatatgctcaaaatcataagtatcaatttgttttagttttaattatcatattgcatcatatttgtacgtattatataacttaattttccacagcaacgcggcagggtgtttatccagtattatacgatgatgatgtattattcatcttattgaaattattaacaaataaaatgggttatacaacatcgtaaacacgttctactatttgaacggattatgttaaataatagaacgaatgacaatcctaatatttgaatagctacatatacaaagatatgctaatacaggaaaatgagcctccatatattgggatgcccctcatacaatgcgagcagacaagcgcaaccacaaagttgatcgtctctgtcacgcgtaaaaacatatgaacgagtatcgtctaccgtctttggtttttttattaaaattagttttgactcaaaagtaaatttagtcttgtgaggaatggcacaacagtcgccaaaaacgaattacgaatgggacttataatttatccatattttctttgagtttcacaaaaattattgttctattatgtatacacactggtgtagaaaccatctttggtcggtcgaccaaattttataatagtcccagttccattaaaaaccggaactaaaaatgatttttagttccggttaaaaaaattttgatcaggactaaagataatctttagtcgaggcatgtcaaggggccgaggatctttagtcctggttagtagtaccaaccgggagtaaagatcatttagatatttagtcacggttgttaataccaaccgggactaaaaatctatatttagtcctgattggagttataaaccgggagtaatatttctctcccatatctaatcggttaagtccagatatttagataagattggatccctctcttctcagatccaatccccttactcctcccctctcctctcctcctcccccggttggtggtaccaaacgggactaaagatagcgatcccggttggaaaactgggactacaaaggttctaaaccgggagtaaagaacatttctctaccagtgacattatgttaaaaaaataaagcctacaaagtttcttttttgaaatttgaactaaaaaattttaccaaaaatatattttcataatttagtacaaacactcattaatatttttttaaagaatatattgtcagcaaaaaaattttatatgcctgttcgtagcggattaaatgctaatggtgaaaatgaaattatgatcaaaacaaaaattaactctaaacttaagttttaaatttagatcttaactacatctagtaagctaaaaagctaaagagtaaacgacagaactactatgattcatgcagttaaacccatttagggtcttttttttctgcaactttaaactacaactttctcgttcttggttaacatgatttttaaattgttaaatgttgcatttgtttaaaatttatataaaagtttattttaaaaaaataaatttattttctaaatttatgcaataattaatattcaatcaatcatgtgttaatgattcatctcattttgtgtaccaatagaagcgaagttagaactaaatgaagaagaatgtcactcgtttgctcttctctagtttaaacttaacccgattcgagtgtatgaacttagacaaaagttaataaactatagctaaaatatttggtagaccgagttcctggacatccatcttctacgtagctcggcctctacgtgccaaaaaactaacctctaacttaaaggatcaaaatcagccttacaacccgctctattattgtacggattgctaaccgctgtgcaaacaagcaagcaaagcttagctttacccaggccctacctccctctgacggtgtgggcccacctgtcacaccacgtacgaacggcgaccgtgtgtccggtcgccggctcgccgctgatggtgtggacggctcagcgatatggcgccgtccgcccaccgcgctatcatctttgcccattttttttgtgctggtgtgcaagcaacgctaaagctaagcttaagtccaaactaaatcattgtcattagcgactcacaaacgaccacgcgatgatgatgatgacaataacgatgattccaagaatacgtgatatacgcccttataattagttagcttgtctcgggacattaggcatcttcttgcttgcatttttttttttttgcatatatatgctcccaaaatgccacgagctaggtagttaggcagttagttactactgtgtagtacttatagtgtactatatcatgattcttcaagtatcatcaatataattgatcatgttagaggtagagcatatacggcctctgttttaattttgctgtgtccgtgttcatgtagatgtagtattaaacctagctagggacacaaaaagaaaacactaattaatcatgcatactgagattcttccttgtgaatccatgcatttgaagcctccaactgtaagattaatttgtccgtatccatagatattactacctccatcccagaatatttgacgccgttgacttttttaaaaatgtttgaccgttcgtcttattcaaaaaatttaaataattgttaattctttttctatcatttgatttattgttaaatatacttttatgtatacatatagttttacacatatcacaaaagtttttgaataaaacgaacggtcaaacatgtttaaaaaagtcaacggtgtcaaacatttaaggaaggagggagtatatccatatatatgaggattgagttgtactgggtactcttacgaaattatttctgtgtttaaaggagtactctggattggggacattttcctattccgtgttagatggtaaatgatacttcctcttatatgatgttggctaggtaaaaatgaacaaaccaacatcaaacaaataaaaccaaaggaagcatataaactgaaagaagaaggtttaatccaaatgtcgcctatacctgtggatttcgtggtcaagctctttggctatttggattgaaaaaaattcataggatttttggaggtttaagatatttgggaaaaatttcctatgacatcctttccgacaaaggaaaaggattgctaaaacgcatatttgagaaaccgaaaatgctctagttaacaagcgaccaacgtgaggcgatattatcaggcgttgctgaccactcatttcctcatcccccctctctcccttcttctctctttgctctctctctctctctctctattgcttgctctctctctctctattgcgcatccgcatctggcactcgcatccggcaccgccgccgcccgtcttcctctcctcccttttgtgtcattgccccatcaccgtatccggcgctgccgcccgtcatcctctcctccctccatgttgttgcctcgtcgcctgaagcttgggagcttgagagcttgggagctgcggacgacggcgaccgagctccgtgcggcatcgacaacagcggatatgcggacatggctgagctctgtgatgtcgacaaaagtggccgagctccgcggcgtcgacgacggtggctctgtggatgcggtggagctcggcgcgacgtcgacgcggatgtggttgcaaaaccggagtggaggaagatgtagatctaggttttcatcttgaattttgtgacatttcagtccatgtaccatgatgtttcatcagttagattagaaatgttacggtgggtattcgatggtgtttcattctatttcttgatgtatttggatttgtttcatgtttcgatacattcgaaaccgttgtttcacatgttgtagtaaaatgtttcattgtgtgatttgattgtgtttcactatattcagaactgaaacatttttatgtaaggtgtttcaatttttgtctttgattctttgtggatttgttaatatttcagtaattgaactttgatgtttcatgtttcagaacaaattgttttagtccatgattcaaccgtgtttcatcatttgaatttatctgaaacgtacaagtgttaagctagtggtgaaacatttttcttacacgtattgaaacattgcccaatttttacaacaaaaatcgggcgcccaatttataggtgcttcgtttagaaacacatgaaaaattaaagacatagttgaaatgccatgtacaaataaatcccatgtataggaattcagaacacgcaagttaaaaagatgacatgttaatttggatggttcccaggaaaaaaatatcacaggtatttgatagttttctagagagaagatatgcttatggttagattgtatcgtgagagaaataccatgaggatcatttagattggtaaagtagtactttacatatatttatatttatatctatagtagattaaaaacgctagaaatacttataatttatgaccgaaaggaatacatcaatactatgcttgaggctagggtaaatgaaaaagaatcaacagagatgttgaatgcattattgagcctaaattaaatgcgctaatatactacttaggctttattcgaagatgaaagatggcggaactttttcatgacacctaaaacaagaaaaactattagcgtatgactaattgagtattaactaatgcaaacttaaaaaatattttttttattttatttagaaacttctactgatatagtattttttaaaagaacaccattaataattcaggaagcacctagaaaaatagaccatattattgatattgtatttttctaggtgcgatgtctgtactgagtgcgtgcgtatgtttcatgcaattaaaaaaaaagactctcacaaacatagctagttgaaaattccctacaagttgaacaaaaacacacacgaataacgcgcggtagaaaagataagagacagtaagcaacagtacactaccatacaagaagctaaaatcccggagcattgtcatagaacttcttctctacttgtcagcttataatggcgcatatactgccattggaggagtacgagtagtatcattattttcagactacggcctatttagtttccaaacaaaaactttttacccggtcgcatcaaatatttagacacatatatagagtattcaatatagaaaaaaattaattatacagattacatttaaattgcgaaacaaatcatttaagtctaattacatcatgatttaataatatggtacaacagtaaatattcgctaatgacaaattaattaggcttaataaatttgtttcacagttttcagatgaaatctataatttattttattattagtttacgtttaatacttcaaatgtgtatttatatattccatgtgacatgtaaaacaattttttttgcgaaccaaaaaggcccaggattctattgcagtgcagtaaagtaacgcgtggccggccacagggagggccatcctgccagtttgtggggtcttgaggtgttgtggaggcacatgaggaggtggccgatgataggtcaaaacctttttacccccacatgccactgtctgggaggtaatcacctcacctcacattgatcttgccaacttttacttttaactggccggattattattattcaactcctctgggtcacaggatcacggcgacctagctaaataatgtccttttgacacttgacagcaacactgcctcccaaatattcttaaaaaaatgagtaacttggtgaagttactagactattgtcacaaatttacttttgaagacaaatgtatacactgcatatggcatctaatataaatattttaaaatatattgctccaagtaatgtttaaagtagtaataattattttttaaaacacaaaacaaatataaatgctcacaacgtacacacacttactcctatgaatacatacatgtacatcctacatatatgaacaccgtcgaaatactagatcggtatgttttgagattgatgaagtcaccacggacatctcgttttcgacgaaatgacaaatatgttgcctatcactgaaagaataattagccgtgaatatgagtacatgtgtcgagtttagaacttaggtgggctagttccataataaggaacgaaagacatgatcatacctcatatcattttatgttttaatgatcgttatttcaatttgataatatcgcaaaatggaaataaaagggttttttttactgttgtgacttgtgacggtatacggtttgtaaccttaattagtacttattatgggttttttttctcaaatctaaacatcaacttattcgttttctgttatcatgcttttcaacctattaaaataatggtgcatttttgacaaaaagtctctatatatagaagtttaaaaaaatcaaataatccatttttaattttataatattaatacttaattaatctaataagttttctcgctttgtgtgtgctgaaaatatctctaccaactaagagaacgaatcggcctaagggttgatggtaatgccattgttatagaaacatatttaaatttgaattaattggctcatcgtcttttacttttcactaatagttatatatgtcatgaatttgtaatctaaatctatcgtggtttgcttctttttaaaagaatattatgattttcttgttattgtgcggtgttttcgaggttccatttcaacccttttttttttatattccggtagttgatgatattgtattcggttcctcttcaagttattacatttggctcaaaatataacaacgtaacctatgtttaaaatatagtaacgtattactaattgattggacacctataaattttgatatggcacgcctagattgttatatcatggaccgatgaagtacattcataaggagtcctctagcaaagacaacctatttctcttaaaagtcggaacttcctagacagcttttacatacgttcaatcttacaagtatgtacccactttcaattcttacaaattttgatatcttcaaggaaagaaaagtttaaatattcttcctacggccgttttcccctttccctggaaaaaaggatatgtttccggttacctgcgggagaagtaactgttaccacatgacacacccaaaaccccgggcaaaagtaaccccacacaaacacaaaagctgaaccctctcgcttcccttccctcccctattacatctcttttttgccttttccttttctttttttctcgaggggttaaaactttgccatccacaattgagactcggtgggacccagacccaggtgggcccaccctcgagtcctcttgtcatctcccccccccacacccccccttncctctaagtgcgtgccccccgccgcgtgtgccccccatccggtcctcctntnctttcggttcgctttccaaaaaaaaaagacgagagagagaaaaaaagttcttcacgaggaaatagttttaacgagacaagaggagaggagggagcttgaggaggaagtaggcggcggggaggtcttgagctgcggt

SEQ ID NO: 5905 - DNA, 34066 bp, Oryza sativa
aaaaaataaataaataaataaactgaaaccattttaaatagtataaacttgttagctgattaaaattcacaatcaagtagaaactgaaactatagccaagcttacgtagttgtcaaggtgaacagaaacatttttagtagtataagttatgagtgagaaatcaaaactactatttggatagatgaattttagatattgatgcagaaacagcggtgcatgttacatcacacatatggagctttgtttctggtagaatatatgtatctaaaattcaaaatgagtcaatgtggacattgcataacggcatgtcaatcagcaagtacgtgatgcaagtaggtggaatgttataatgagggtgtgtttagttcctgaaaaaagttggaagtttgaagaaagttgggagtttagaaaaaagttggaagtttatgtgtgtaggaaagtttttgatgtgatatgatgtgatggaaagttgggaataggcgggaaactaaacacggcctgagatgctttgctttctattaataagcagttaccattcttcatagcttcaaaaagcacatcacagtaatatttgaaaggtgatatcctcattactcgacagatgtggtctgcaagatggtacgggtataactacaaaaaattaataaaaagtagcagtcatgaaagctttctagaaaaagtagtcaagcctagtaataaaattactttctccgtttcacaatgtaagtcattctagcatttcccacattcatattgatgttaatgaatctagatagatatatatgtctagattcattaacatcaatataaatgtgggaaatgctagaatggcttacattatgaaacggagggggtacttcctagttaattgaaaaattgttaatgtatgggcacaagaggtatacaaggatacaacccaaagaaaacattttaacaaaatgtagctgtcatgaaagctttctaaaaaaactagtcaatcatactaatacaattacttcctagctagttgaacaaattgttaatatggctgcaggaggtatgcatgaatacaacccaaagaaaaaaattattaacaaaaatgacaacaagtgtatattgcatatgaaatcagtcaaaacataccatttcacaaattgaagtatgaaaacaaagagatgcaaaaggtgtttctccactacttctgaatgctggttctaattaattgagagaaatttgagcaacatactgcaaggttcctgcggagatagcgcatcaactcctcatagtattctccctctttgcaaattttgcgcgcgaaacaggaggtccatggcaatcgttttcgtatgcaataatctacaatcctgccatcaatgtatttaggaagctggtcatcactcatcaggcatacatctttaagaaacacccaaatgcattatgcaagacaatactctgaaaatcctgaaactaggtcagaaaccaaaaataattgtcctgagttatctaacaagattatgccattccacatttgtgctaccttggatggctgaattggtgcagttgggccctgtgtggcttccatcaaaggtactgtaccattgataacccaggcccactcacactaacaggccaaacccagatgataatggtaggcgacatcacatgggctacacaagtcggtgacaatcccggatagtggataatttgaggaattaggataatgaacatttcggttgattaaccacgaacatgacttgaagaatttaattgacattcctatatataaatactttaatcagatcattcgcccattcatattcctaaacaccccagattgcgtcccaaaatctccaagcaaaaaagaaaaggaaaaaaaatccccataatctaaccgaacaaattaacttgcgagcagaaatgggattaatgcgcggatggatggaatgcggggtagatagatattatacctgcggtgccagtcgtccttggagacgagggcggcctggatgcgcttggggaggctctcccatgggagctcctccctgatcgccttcaccatcatctgctcctccaccgtcgccgccatctgctgctgcatcctcgatcgatcgattaattccttccccaccaccaccacctcctcccctccctcacttcaggattgattcccctctcgccgatcgagcaatgcgcgcggatgcagaggagagagagagagagagagggagggggatgtgcgcgaagaggaaggagcgcatgcagaggaggaacaggagagagagaggggcttcctgcatcgtttatgtcctttttttttcccgttacatatcggttcgctgtggaatttgattatatcaaatttttcttaatatggaatttaaatcattgagataaaaaaaagatcatttttgtttgcgagaaacacggtacataagcagatgctttgcataaatatgcacattcacccgtataaatgcacatgacgtgtgaaaaatcatgagacaatgtagtttatatttgttactctacaaacttttttttaacgttactccacaaacttgctcgacatagggagggagaaaaataataataaatcgtaataataatggtactggaaaaaaagaagaaagcctatgatgcattgggctattgcattcagtaggaggtggatgggctgggcttaaagccttaaatgcaattgaggttctagtgacttactgtggaattaggttaaactgtatacttccgccgtttcatgcattgtccatatttatatagatgttaatgaatctagacacacatatatgaatgtggacaatactagaatgacttacattatgaaacggggggaatatcattttctttgatacaaatttaaataattacaaaaatatcgtgacaagaatttaaaatataacaaaggttgtgatattgtttaggtcataaagtaaaaaaaaaaaagaagaagaaagggctatccctcaccttgcatagattacaatttaccctttgtcaatgtaaggggttgtttagattgatgtcatttcaagccataccttttttttatataaagttgttaaaaatatgcatacatttagttttttttttgtcaaactttggtaaatacataagaattcctgccaaaattttgttaattttgtcaacttgcctaaattagtaagttttatattggctacaatctgaatagtgcatatattacaatctactattgtcaatataggtcaaaggaattctcttaaacgaccaccacaactaaaggccatgttttgaaagtttatagtagctataacttcttcatcttcagctcttaaaatatattttaacataaattctatagctctccaaacaaattttaacatagattctatagctacataatgcaaaaaataaattaaaagctagaggctagagaacctaactttttaatttcagattctcaaaatttagctagcaatcaattgcttcttagaattggaagttcaccaaaaaatacttaaacagcatgccaacctcaaggacatactataaatggaagtactactagtattcattttctttatgtacaacgctgtataaaaaaattgaaggtgtgtacatgttttgcacgtagtgggttagtaagctggttagccgaagtgagcgtagtttaattggttatgttcttttgtgatggaacgagttcacttggatttaagttctagacttaataagggtactcgtatttacgactatttattctttcagtgatagagacgacatatctatcaacatcgagacgcttgttatgacttcatcaatatgaagatatgtcggttgagtcttctgaatatgctcataagggtaggatgtgcatttgtgcatttataggggtgaatgtgcatgtgttgtgagcgcttatatttatactaacgataatacttctacgatatttttgaatactccatccgttctaaaatataagggatttttgtcagatatgacacatattagtactacgaatctagatggggagcttgtccaaaagtattaaaatatgatgtatcctagtactaagagatgagtcatatcggatcaaaattgcatatatttttggatagagggagatgtagtttgtcacatagaattgttgtgtgtttagttcatgccaaaattggaagtctgattgaaattagaacgatgtgacaaaaaagttagaagtttgtgtgtaggaaagttttgatgtgatgaaaaagttggaagtttcaagaaaaagttgggaactaatgccatgttttgaaagtttctagtatctataacttcttctataatcttcagctcttcaaacatattttaacataaattttatagctctccaaacaaattttaccatagattctatagctatagaatgcaaaaaataaattaaaagctaaagactagagaacccagctttttaatttcagattctcaaaaattagctactaatcaattgcttcttagaattggaagttaaaaaaaacactaaatagcatgccaacctcaaggacatactacaaatggaagtactactagtatttattttctttatgtacaacgcagtataaaaaaattgaaggggtgtacatgttttgccacatagtgggttagtaagctggttagacatagttgtcagggttacgggttaggtataccctttaccctttgatgtacgtcacatatcggtatggcatacccacgcgcatacggatactccccgcgtacactaaggaaatccttcacaaagtctacggaggggaagagttttactcggacaagactgggtcatcaatgtatcgtatagggtctgttatctccgagttctacttggaaaccgcctgacctgcgatataaaagggaccccccgaggaggacctggggcatcgaatctcagagccaacacaaccctcacagcctacgaagtcggagcctgcaaggagccaaatcgccgggatctagttgaaccaactcgaccacgatctcaccggatccgtcaagttccattattccctttgtaacctgtgttttccaccatataatcccatatcaactggattaaggctattacctatcaaggggcctgaaccagtataatcctcgtcttttgtttgcttgatgtcgtattacgtagatccttgtaccaacataccccaataccctctatatccggtctacgggtaccacccgtcgacagtggcgcgccaggtagggggacttggtactcaaggttctactactatgtcatccagcctcgtcgacaacagcgtcaacaccaacctcagccaagtattccctgcttcaacgatgctgatgtggactcaagtcggcgaaatcgtcttcccgatttacgccacgatgtcgatctcaaccggtccgccaatgaccggaaacgagaacgtagtggctacaaaccaaggcgactccatgtcaaaaaatccgcccgccgggacggagaacggagcatcgacgacatccgagctcgagaaggattctgatgcggccaaaccttgtcgttccgacatgaactgtgagccgacgaagatgacttccgaagcgacaaggtcctggtgtcctatccacaaaaccaggaaacacattttgcaagcctgctgggttttcctcaacgtccgcgctgaaattcgcgcctgcaaagagcgtggaattcagcttatttctccaactcgtgatgtctattgtcctattcacaagacaaagaatcacgacctctcaagctgcaaggtctttcttagcgccatgaaagcgccatcccctaaggtccaacagtcacacatccccatcagggataaagacaaggaacgaggagcgacgccaacttcagatcgatttgttggggtaatcgatattgattctcacgaaccatcagtcttgcaccttctcgaagactatggatcatcgacaacaagcgcgccgcgagaggtattggctatcgaggatgtcggcacatcagtgcgcaccaatgcagaagcggagaatcaattgaccactccagcccagcacatcagagccgtcaacgctatactgagggaaaccccctacgatcccgttctgaacgacgatctcgcgcgttggacagaacgactacgggaatcagtgaccaacctcagcaacgcgttcgaagaggccactgccgcagcacacccagagcagccaccaactcgcgatgccaatggtgaaaacctggaacggagggaatcgcctcagcgagctacccctccacctcgtggcactgacgatctccgagatcacatcaacggccgccgagagacacgacgcacacgagacaacgtgaatcgttcccgacgtcatgtctcttcacagcgccatgataacgaaaatcaaggagaccgctcaaacgaggaccgagaccatgataaccgccacaaccaccacgatcacaacgatcgcgaacgacaggtgccagacgataccggtcgaggacgtcgccataacgacgacaatgatggagaccggagccgagacaacagcgggagacgatgacaggattctcgagatccaggccgatatcctcgtaaccgtacgccggaaccaagtgacccatcgtcatcgtcatcatcctcgtcttcctcatcaccagacagacatccacgaaggacacacgatcgccgacaacccaccacccccagcgctgggtgtagggctttcagtcgttccctacgtgatgtccgatggcctgagagattccgacctggagcaatagaaaagtatgatgggagcaccgacccagaagagttccttcaagtctactccacagtactctacgctgccggagcagatgacaacacgctggcgaattatttgccaactgcgttaaaaggctctgcacgttcatggctgatgcatcttccgccctactcaatctcctcatgggcagacctgtggcaacagttcatcgccaacttccaaggaacctacgagcgccacgcgatcgaggacgacctacacgcgttgacacaggactcgggtgaatccttgagggaatatgtttggtgcttcaacgagtgcagaaatacaatccccaaaatcaccgacgcttctgtaattcgcgccttcaaatctggtgtcagagatcgctatactacctaggagttggcgacaagacgcatcacaactactcagagattgttcgaaattgttgagcgatgcgcccacgcagatgacgcgctaagacgcaagaatgataaaccgaaggccgggggagagaagaaaccagccacggacgcgtctgagtcaagcaagaagaaaaatcgcaaaaatgggaaaaggaaatctcaagcggaagttctcgcaacagaatacgcgaaccctcccaagcgtccagacccacagagcagcgacacaaagaaagcatggtaccccatacacaagacggacagacattctttggaagattgccttgttttcaaaaaatcgctcgagaagcacattgcatttgaaaaaggcaagcgagtacgcgtggtcgaaaaggacgaggaggcggttcctcatgaatcggattcagcatatccagactccgacctccacgtttcacacatcttcggaggttccacaacgtactcctcaaagcgagaatacaagaaagtgaaacgcgaagtctattcgacatggcagggggctgcacccaagatgaagtggtctgaacagaagatagagttctcggaacaagaccaccccaagaccgccgtcatcccaggacaatatccgatcgtggtcgaacccactattcggaacatcaaggtagcgcgagtcctcatcgacggtggcagctcaatcaatcttcttttcgccagcactttggacgcgatgggaattccgcaaagcgagttgacaccaaccgatcaacccttccatggaattactccccaatcctcgtccagaccattaggcaagattacgttgcccgtgactttcggccaagccaacaacttccgaacagagcagatcacctttgatgtcgctgaattcgatacagcttacaacgccatcatcgggagaactgcacttgcgaagtttatggccgcatcccactacgcgtatcaagtgctcaagatgtcgggaccgaagggaacaatcactgttcaagggaacgcaaagctggcggtacaatgcgacaaacggagcctcgacatggtcgagcaaacacccagcccacccgccacgacggagccacccaagaaagtgagcaagaaaaacaagacgccgaaaccggacggcgcaatcaagatcgttccactctccagtgccaaccccgacaagaccgtcaagatcagggcgacactaagcgagaaataggaactcgcgctcatcatcttcctccgcgataatgctgacgtgttcgcttggcagctgtccgacatgccaggggtccccagggaggtgattgagcacaaactcatggtacgacccgatgccaagccagtaaagcaaagactgcggagatttgcaccagaccgaaaacaagccatacgagaagagctcgacaaacttctcaaagctggcttcatcagagaagtacttcatccagagtagctagccaatccagtcatggtgcggaaggccaacggaaaatagagaatgtgcgtcaacttcaccgacctcaataaggcgtgccccaaggatcacttccctcttcctcgaatagatcaactggtggactcaacagccggctgtgagctgttgagctttctcgacgcttactctggctaccaccaaatcagcatggcaaaagaggatgaagagaagacagcattcatcacgccattcggagtattttgctatgtcaagatgccgttcggactaataaccgcagggaatactttccagcgcacggtccagggagcacttagcaaccagctcggcaacaatgtcgaggcctacgtcgacgatatcgttgtcaagaccaagacaagcgacccattgattgacgatctgcgggaaacgttcgacaacctccgacgatatcgtctcatgctcaatccagagaagtgcacgttcggagtaccgtcgggcaagctgcttggattcctcgtctctggcagaggaatagaagcaaatcccgagaagatcaaggcaatcgagaacatgaagtcgcccacaagactcaaggaaatacaaaagctaaccggatgcatggcagcactgagcaggttcgttgctaggatgggagaacgagggcaacctttctttgctctgctgaagaaacaagacaaatttgtatggacacaggaagccgaagaggcattcgttgcactcaagcgctacctatcaaacccccttgtacttgttgctccccaacctaatgaagaattattcctctatattgccgccatgccatattccgttagcaccatcattgttgtcgagagagagaaagtacaacgaccagtctactacgtcagcgaagctctccacgacgcaaagacaagatatccacagatccaaaagctactttacgcggtcatcatgacatcaaggaagctacgccactactttcaagcccacagagtcacagttgtctcctcctgtcctctcggtgaagtcgtgagaaacaaagacgttgtcggctgcattgtgaaatgggtagtcgagctgagccagtttgatgtccactttacgccacgaacagccatcaagtcccaggtactcgccgacttcgtagccgattggactatgcctgataacaaatcagacaaccaaatcgacaacgaaacgtggacaatggcgttcgatggtgcactcaacagccaaggagcaggggcaggatttatcttgacatctccctccggagaccaattcaagcacgcaatccacctcaacttcagggcgaccaataacacagccgaatacgagggactactcgccgggataagagctgcagctgtacttggggtcaagcgactaatcgtcaaaggggactccgagctagtcgcgaaccaggtgcataaagattataaatgctctaaccccgagttatccaagtatcttgcagaagtcaggaagctagagaaaaggttcgatgggatcaaagtccgacacgtctaccgcaaagacaacatcgagccagatgacctagcacgacgtgcgtccagacgagaaccgctcgagcccggcacttttttggacatcctgacgaagccatcagtgaaagaagttagcggcgaagttagcccggacacccccgacgttagctcggaggccacaaaggcagaacgcaccgttgccgatatcgagaccacagacgactgacacatcccactaatcaaattcatcaacagcaaggagctgcccgaggatgatacagaggccgagaaaataacccgtaaagcaaagatctactgtatggtcggcaacgatctatacaagaaagcgctaaacggggtacttctcaaatgcgtctcgtccgacgacggcagacacctcctcctagatatacatgaaggcatttgtgggtcacatgccgccggtcggacattggtcgagaaagcttttcgacaaggttttttctggccaaccgcccttaaagatgcatgcgacatggtccagcgatgtgaagcatgtcaattccatagtaaacacacaaagctacccgcgcaagcgctccagactatccctctgacttggccgttctcgtgctgggggctagatatactcgggccattcccacgaggacagggcggctacaggttcctattcgtggcgatcgacaagttcaccaaatggatcgaagtagtacccacggggaaaatcaaggccgacaacgccatcaaattcatcaaggggatattttgtagatacggactaccgcaccgcatcataaccgacaacggctcccagttcatcagcgtcgatttccaggattactgcattgggctgggagtcaagatatgcttcgcctcggtctctcaccctcaaagcaacggacaagtcgagagggcaaatggcatagtactacaagggatcaaaacccacgtctacgacaggctcatgtcacatgacaaaaaatgggttgaagaactcccatcagtactatgagccgtacgcaccacaccgacaacgtctaacaaggaaacaccattcttcctcgtgtacggctccaaggccatgctccctagtgagctacaacatcagagtacacgagtacagaagaactccgacgaggaccaggaggaacagcgaaacgtcgatctaaatctactcgaggaacatcgcgaacgagttgccgttcaagcagccggctatcaacaggccctccgccgttatcacgagaagcgcatccgagcacgcatactttcgatcggcgactacgtcctccgatgagttcaaagctaagcagggcgaaacaaactctcaccaaaatgggaaggaccttacacgatcacacaagtcttgcggccaggcgcattcaaaatcgcagaaggcgacggtcgcgaattagcaaattcttggaacattgaccaactacgtaaattctatgtatgagtcaatatcatccgtacctgtaagacaccttacagtatcaataaagcctattcttaggcccatattacaatcaaactgttttcacccgatgatcccttaccctaatgacacctagcgttgaaacctatcctcatgtccctttacgccgtcttaacaaggcctccgaggaacctaagggatcttcggctggggacgcccagagccaataaggccttgtcagatcctatagagacgaaagaccatgtaagatctggtcgtgtaagagttctcgccgtgcgtattaaccaagctgcgaaatcggaaattaactttccaacttcacggctgggggctaggatcagagcttattcaaccaaggcaggtcaaaggtccaagagccttatcctccgagaaaatttctccgacgacaaggctgggggctagggagagtgtacgactcaaacggctgactaaagtcgtcaactgagaacgcactcttacacacgacatccggagtaagaaagatttgttaaagatagatttcttttctatttcacaaaatacttcttacagtttttacacaaatccaaagctatattacacctttttcctgagatatctatcacagggtacgaagactaccaagaaggccaacgccagtccatagactggaagatcttctccgccaacggcgccatcgacctcgctagatggtctatctccgctggagtcctccgagaacgagcaaaaccctcacggagaaaatcgaggtccatgcgcgggcgatgatctcgtaggcaagccaacacgtgccctccggcatatcggctcgatcgacgacactcctgcttcaaggcctcgtcaatacgcttgccgatgccatcgagttgagcacaggcttcgttcagccatgagatgtatccggccgccgactcctcgggatctccacggggcactcgaagttctctacagaccctggccatggatgtgcagcaactcttcaagtacgagttgaaccacacctcacgacctcggagtgtttccacagcctgctctttcttcactgcaagcatggttctctcgagttccgctacttcaaattttgtcttccaatattagatacgacgatcttggccagcaagagcactctcgagatctgctcaatgtgagaacaactaagccaagctatacgcctctttcgagaacatagttgatctagtcgggagagcatcaagggatgaatggactactaacctaaggaagtcgtcgccatctccgtccctgtagcaagggtctggtccacattgtcgggcgacgcatgtggttcaaacgcgagaaccggaataatcgccggtgactcgggctgcccgcgctgctggacatcctcgtcatcaacatctctacaaaggacaaaagctctcaagatcaacatacaagagtaagccagaataataattgcacgcacaaaggcggttaagattcagttttacacagcatgtcttgggagtacaagaggtcctactcttcaaatagggggagaacggattcccccagatcaccgacttcttccatcacctctttacgtgtgttgctagccgccccctgatccaagatctcgcgcagatcgagttcgggatgcgatagctttacacacgcgaggacgtggcacgctccggtgtagatcccgttcgatgtttcctccccgatcttggccgcatgcttggaggggatctcccccatcgccgtcgccagttccgcaagagaagatgtcagcgagaactcgtcgggattcgctgggatagtagacttaatgccgcactccctggcgagctgatgcaggccagtgtatgtgacccgcaacgagccacggatttccaacaggttgttcccgagctccgacatgcggtcctcaagcccctgccgttgtcgctcgttgccggccaccaactccctcatcttcttgaggtcttcacgagcttccgccaactagcgtaccagccggtcagcacgctcgttcgccgacgccgcttccgacctcgcctccgcaatctcgcggccgatgccactagcaccggcctcgaggaggcgccccatctcgacctggagctcctcccaggtgaggacagcagccggtggaccacgaccagccgcgggaccgctgactgggccgcttggtgttgcctcgcgactcccgggcgcaagcacgacatccgtcgaggctacagcgggagacgcgccggaagtccctccggactcgtcttgcgccgccttcgcccatgccgccctatgagacaactatgtttcagaaaatgctcgaacaaaatcacggagacgtaagttcatccacttacttctcgccaattgtcacaagacgttgtcgtcgtggaggcggggaagacgtgtccgaggcctaaaaaacggtcgatgcgaagtaaggcgaaattcttttggctgtataatctgacgacaggatagcttaccgagggggttgatgccttgcgacgatgtctgctcacagagaacttcctcccctttgtcggaatattgccaccacttgtagtagcagcagcagcatcagacgcctccttggcgaccttctctttcagagacgccgccacctgatgatctgcgagcggcccgatgatgttagtcagaagaagagcctacgcttaatcaagtcacaatgtgatctcggaaggaaaacgcagaatgcctgtcgagtacacttacattgatggcggcatcacgttcagccgtccctttttcacaaagggaaacggggatggcactcgccgttgtcggaccactgatcatcacctggccaacacgacgttccacggcttcgctgttcagacctgtgaatcgagaaccaaatttcggtaaatcgagagaaacgcgaacatgagcatgtcaggataaatgcgagaaagataccccgaggagaaacccgggtcgcgtcctccggtccggaatagtcaaaggctggatgggcccgagcctggagcggctggatccgcctaccaacgaagtctgcagtgactttataccccgacaagcctcgtactcggagatcgtcgataatgtcgataaacgactggagagagggggtcaaagggggctttgcggtccaagacgaaatcttgagcctcgtactcggagatcgtcgataatgtcgataaacgactggagagagggggtcctagggggctttgcggtccaagacgaaatcttgtccagttattctttgggaacaacgaaggcagggtccgagtctttgatctgaaggtagaaccacctagtccaccatttgctgcgagaagaagggcactggaaggggatataacacgacttcaggctatcccgaagtcggaacccgatgcaaccagacaccctgttggactccatccaacgcagctcgtagtagaagcgaaagagatcaagaaagggctctaccccaatgtaggcctcacaaagatgagaaaagatgctaagaaaggcgatagaattgggtttcaaatggagaagagaaagaccatagaagttcaaaaccaagagaagaaattcagaaggcggagggagaaaaccgcagagaatatagtcttcgatcgcaaccatgtgacctaagacgggctggggattagtacctcctgcttccctttccatggttccgcgaccgggaagggcgccgtcttcctaaagcttcttcagtgacgcactggtggaggatgatttgctgagatccatctctgatcggagatcgccggagaaagagctcaggtcgatgtactagggtttcttgtgggagcggagaagacgaagagcgcttgcaggcgggatgttttttgcatggggggcgaacttcaaaatggatcctcaaaattcctttaaatagacgcactaccgacggtgcgaattccaaggaacagagagagatgcccgccggaaatttctgggtccgttacgcgcggcggttttttggacttcagtttaaattcgctcgtgaccgttgggcttcaaatggtgctctcgactacgttttgtctctacggtcctcgcaccgggaacgacaacagtctcgacgccagaagtcgcgaatggttacacgagctcattttaagcagaagtcgggggctactgtcagggttacggattaggtataccctttaccctttgatgtacgtcacatatcggtatggcatacccacgcgcatacggatactccccgcgtacactaaggaaatccttcacgaagtctacggaggggaagagttttactcggacaagactgggtcatcaatgtatcgtatagggtctattatctccgagttctacttggaaaccgcctgacctgcgatataaaagggaccccccagggaggacctggggcatcgaatctcagagccaacacaaccctcacagcctacgaagtcggagcctgcaaggagccaaatcgccgggatctagtcgaaccaactcaaccacaatctcaccggatccgtcaagttccattgttccccttgtaacctgtgttttccaccatataatcccatatcaactggattaaggctattacctatcaaggggcctgaaccagtataatcctcgtcttttgtttgcttgatgtcgtattacgtagatccttgtaccaacataccccaataccctctatatccggtctacgggtaccacccgttgacagtggcgcgccaggtagggggacttggtactcaaggttctactactatgtcatccagcctcgtcgacaacagcgtcaacaccaacctcaaccaagtattccctgcttcaacgatgctgatgtggactcaagtcggcgaaatcgtcttcccgatttacgccacgatgccgatctcaaccggtccgccaatatccggtttacgggtaccacccatcgacagtagtgagtgtaggttaattggttatgctctttgtgatggaacgagctcaccttgatttaagttatataatatagacttaataagggtactcgtatttacgactatttattctttcagtgattgatgacgtatccattaacaacaagacatttgtgatgcctttatcaatacgaagatacgtcactgagtcttccgaatacgctaataagggtaggatgtgcatttgtgtgttcgtaggcgtgaatgtgcacgtgttgtgagcgcttgtatactgacgataatacttctacgatatttttgaatactccatccgttctaaaatataagggattttggtcagatatgacacatattagtactacgaatttagatggggagcatgtccagaagtattaaaatatgatgtattctagtatcaaaatcgcatatatttttggatagagggagatgcagtttgtcatttaacggccggggcctcccctgctgtgttctcttaaagaaaaagaaaaaaaagatgctgtgttctcttaaagaaaaagaaaaaaagatgtagtttgtcacgtggaattgaatgaaattgaaatggttaagtcaaagttggcccgggatagacggcggcctgtcagtggtacgtacgtgttgatccaaacctgcaacgaaagggacacgcacatccgcaattatgcatggcgacggtgacgcgcggacgcacctaagcacgggctactactggtactagtaactagtgtaagctagaactaacgttaggctggccagccggaccagctaagctagttgctcacaccaaacagcaaagcaatccaccgcgacgcaaattctttgctttcgctctcgatcgggaagagaagggaaaaaaaaaaggagaagcttttgttgtcgagggtcatggccagttttgaccctgttcttctggtggcatccatcggcctctcaaaagccccaacgtgagtcgcacgatattgtcgtacctacggcggtgcttttggccttatatgattattatggacttttttctttaagaatttcgctctatttgagctaaaactgtcctctaataaattattaggagaccctctatcgcccctcctcttcattctagcgatcgacccacttcagcgcctacttgacaaagccaccgatctcggagcgataagcaaattgcgaggaagagctgtgcgcttccgcacatccatgtacgccgacgatgcggccatattcataaatccgaacaaggaaaacgtgagtgctttcgctgagttgctaggtcactatgggcaagcgtctggcttatgcacgaatctgcaaaagtcccatgtagcaccaattaggtgcgacgatttggacctcgacgacatcctacaaggcatgccagcaactagagtaaacctcccgatgaaatacctcggacttccgctgactactacaagactaaggaaagtagacttgcagccgctcttcgataaatcattgaattgcatagccggatggagaggaagacatgttggcctggtaggatgatctaccctagtgaaggtggtgcttacctcgcagcttgttttcctcctgacaggcctaaaagcgtcaaaagggtcactcgagatcctagataagcagcgaaggaaattcctgtggacggacgaagaaaccttgacatatgggaaatgcaaaatcaactggacacaaacacgtgtccctactgcttcgggtggattgggcatcctaaaccttgaaaagttcgcaagggccttgcgtctcagatggctatggtatgaatggaaggtatgaatggaagtcgccggataaagcatgggtaggatctggtacaccatgtgacgacactgacaagctcctctttgctacaacaacaaccataaaatttggagacggcgcaactactagcttctgggagtcggcctggtgggaagggagaaggttgaaagacgtggcgccactagtctacgcgcagcttcaaagaaaaagaacagatcgctccaacaagcattgcaatcaaatcagtggctactcgacgtgacccttccagcggatacaggatggacaacggaactgatcgaccaacttgttatgatatggagcgctacccagacagttgagttgtccgagcacgaggaggataaaataacatggaaactcaacagtcacggtgaatacacggcggcgtcggcatacaacgtacagcttctcagcacaacggccaccaacttcaacaccctaatttggaaaccttgggccccatgaaaatgtaaaaccttcgcctagctagtcattcagaacagagtttggacttcagacaggctagctactagggggtggccgaatggctccgtctgtcctctgtgtcgctaggcccaggaaatggccctccacctcttggcgaattgccgctacacaaggcgaatttggatggctatggcgaactaggtggcatgcagtaccttgcatcctaaccagtggcaacaagcttcgtcgatcttagaatggtgggaaataatcacaagcaccaaagaagcccccaagaaggccctccattcgttgacgcttttggtcgccggggaaatttggaatgaaagaaacagcagaaccttccagtaaaaggagctctcgtcgaatggcctgctaacaaaaataaaagaggaggccagagcatggatctcttagcaggagcaaaacatctggaaaattggcttataacttagttcgttaggacctttggtcatgtttttccttttatactgtacagtttactccttctctattcaatgaaattggcggctcgccgattcattaaaaaaatatttttaggtctctttcactcatgacatattttttatgatgtctaccaacaaattatacaaattttaactatcgtatagcaaaatttatcttttgaaatggagaaaggacatgtgaagctaaagggtttacatgtcaaccacatccaccacaaactttattacttcttttgaaaaaaggacaatacaaagcatatatacataaattaagagatgatgtataaaatataatgataataacatcataatgataaattttattaactaaaatcctgttacaatgcacagaaaaatgctagtttacataaaacaactcatacataaagttacatacatagtggataagcacgttaaatgctgtgattatatataagatgaaatatagaacatacatacatatggtataatataaggtaaaattttatataactgtctatgctttgccaaaactatgacaaaacgacacatatgttagacgctagtatatcgtaaaattacatatttataggtcaaatttacaacaaaactaagatcggaagtacgatgtcgaaatgctatgtacagatttagtgttatttgtcacaaagctatttacaattaaatcataactttcttaattttatagtagagaatatgttaaagtgatgcagatagagttaggctttccttagtttttcataattatttttattacttttctagtatcgtccgctacttaaaaaataatttccctagacaccactttttttccagcgtaaaaaaccgtatgtaaaaacctttgagggtgtcccatgaagacctgcatgcgaaaattaatgaagagcacaacagggtgcaacacttctgttataatttttcaatcctcccaccgaaccctatcactcccctattcctctctatcctctgccctctttcacgtcctctcccctatcacctctcctccctctatctcatccctactcgacgggagcatggctggcaatagcaccagcgacgatgggagaggcagtggaggcttcgtcgcggctcacgtctagtggatccggtgacggtaccctcatgcaggtacgggagaagcgcgccgggggggagggtggggggggtggtgaggcggcctcacgaagagctgggcacagtggcctggcctcaggagcgcgggggtggtggtggaactccggcgacgacgccagctcgggacgggcagattcgctgctgccagtctctggaactgtggggcctcggtgacggcgatgatgataggggattgcggcgacggcggtaggttggagctagggtttcaattttcggaattattattttctcccgttggacgtccacatatatataacatgagcattaaactaattaaggaaatctagtagctagtcgtggcgtgcccacaaaaaaaatgcgactgatcggtactcctatgattaattgattgaggcagagagacctaattcctagttgatcttatgttagaaaaatgacacatgcatgctgctgctgctgctgctgctgctgcagggggagtataatctttgcttgttcatcacgtgtgcgattctcgtcattattcaagggcagttattaataacgctataatccagctgtccggaaaccccaaccgcgcggaagcagacgctgcaacgattcttctcttgcacgcacgcgcgggcaaatcacctttcgtaaatatcacagttcacagttataacgggtttctcaaaaaaaaaaacagttataacggtactaagcttgtaacttaaaaaaaaagatgatttgtgactactccctcctccgtctaaaatttacggatttgatacgggctaggattacgaatttagatatgggacctatctatatttgtaacggtagtttgtgtcaaacccgatattaaattgttatatttttggaaaaagggagtagtagtggaaccataaattacttaaatcctaggctaagttgtggtttaattaatgggttattgattttcttcaaaatttatatgatgatttaattagttttaaatttgatttgggagcaagagctcaagccataactacactagatatgtctccgctctatttgcaactacgtactactccttagtaattgcggcaaaacaagtcattagtttatcaaagagctgagcttttgaatatcaagttttatgaatcggaggacaatgatctgaagcaccactaagaatttttcatttttgttttaatcccaaacatacttgttatgcaaactactactaggatgaaacatgttcaaagcaattccaatttgaaatatatctttcgacaaatagtataattaattctaaatagaccataaaagtaaatgttgaatgcacttattaatgtaaaagaaatgagtgatttcacagtcttgatgatataccggagggaccatattttctaatataaaactggaggagtacttctcacacctccggtactagaacgtattctcaaaagaaatcatattttgttgcctcaaatagacacgaggaagaagactccattttttggcgaggtaaagtgattatcaccagtgcttaatcacgatgtaccaaaaggaaaaacggcaacctaattaaacattaggaaaaaattatataagtgaaatttcctggtgaattagacagtgagtcgctctgcctagctggtgaaatttctcatcatcttattctgattaattacgagatcgatcaaatttggcaaccatagtcaggattacttcacgagatcgaccttaatgtttctttaaacaatgaaacatacatcgtttacgtcagaaacaagtcaaccatcgatgttgacaccaagttagttagtggtaggtgttcagtcagtcaaagtatgcttaagtgaaggacagtccgaaacacccctgctgcatgcaaaaagtagcactaactaacaacctaacgcattatattttcgctgaaaaaatatgctgaatgatgagcttcctttacaagttttcttcttttctccgggaggaagtatcgtcgatcgatctccccaagtatcctcttctatgtaaaccctcgattgcgtcaaaccgctgggatagataattaaactgttaaacccctaaaacaaagggttctttaagaaaatttggaggaattcgaccatccgaatttttttctacatgatcaggaatagctatccaaaaatgctatgaaattcttttggaatggctcagaaaatttagaggaattttgacatgagattcaacctttgggataaaaaaatattttcctgaaccctatccaatggtcattactgcagttttcatgtatttttttattcataggatttgaagtactagtgcactctaattctgtattttatttatattttttttctaagtaaagatcgtgccaaacttatttgagtacttagagaccgatgggactagatagctagcttacaattccaattatattttttctccacaaatgaaaaaagagaaaggcccagggtcttctcagctagcaacgcaagctgcgagctagtcggttcgggttcgagcctcaccccctccttaattcaaaatcaatctagtcctttctagattggtcccattttcaggtttcaaaaaaacaaatgaaaaaagaaaagactcttgtctacagttggtgcttaaaatttttagataattatagtaggtgcttaataattaattaattttcataaggtatactagtgtacgtaactatttctggtcagatgatctcaaagactgatcatatcagattgtgtttttctacaagttgacaactccgattactttttaattattattaagaacccaacccactgggttgtagcaggtgaacaacaatattgttaggtactttaacctaatttgtatacaataaagattttcctttttttcctgatgacgaagcttggtccgattaatcatgatcgtgatagtagcgcaacttcaaaacatatataatatacaagaatatatatatatatatatatatatatatatatatatatatatatataaccagtctgttcgagacaggctccaacaaatggatgaataaaattttgagaaacacacacatattaccaacacaaaggtagttcgctaatatatccttttccccaactttagtttgttggatgtttaattatcggggagaaatttgttgagatgtatggtacttaattgacctttgaattttgatgagagtttggaggatcgatcatgtggcgcaaagcgtttggtagtgacagtgtgcaacagcacctgttggctagctatagggctgctaattttccagcatccaccttccaagccaattgatcggccctctatttcctttacaataattgtgtcatgttcttttatgtcataagttaaacaactattaataacaagattcatggtaggaggcacggcagatacgttattgcagctaccacgaggctaggttaggtacttaggtatgattaataaatatgaaaaccgtgttagttcctttaactatttgttcagaggacctgatcctttaaattaattttttgtttgcttattttaccttgtgaagtactaccctctaacttagcaatttagcatgagacaatgcctcactttaccttctaaatttcctgtcttctctcttcatacaagtatgcattttaattaagttggaatgattttattttaacattattgcttggctacttgttaccatttaaattgcaggcaattttgaattttagaactcattttcggagtttttttagggggtttattatattttctgcttttctgaattgcttttaatttggaccatttagaatcagagtataaagtactacttaagattatttttagtttcttagatcacttgtttggcttataagccacaaataaaaggattaccaagaaaacgcataagacttattaaaatatatagatatatttaatattttttgcaaattgtcatgaaaagttttgaaaatattttgtaaagaaattttttatttgtgctctaacgttgattgatttcctcatttaccattgcaaaattggcgctctctctctctcgctaattacccccattctcaacttttatcctttatatgcctattccgttagttttacctagcgttagtaggtgttaacagtgaaatttggtaaactccgaagtcatcatcggcatagagtcaatatcggcttcaaagtcctggaatcaaccgatgggaattatcaagtcgctaatagtcagattcttactgtattcggataaggaaattaatttactaaaggaagtttatccataagagaccgagttcaagaaggatgcgacatgtcagtttatctattaattaggaatagtctgttagtttccttttatctttaggaaactgtgttgagtgtccgataagaacttaaagtttctttcttgtccaacaaggattagtatctatccatgggtataaatatgtatatccggggtcattgtaaattatctcacagatcaatacaactattctcggcccatcgccaccctctttactgaggtttttacttatcatccggtggaacttggcacctgacgcggggttgcatcggctttcgatctccagcgaaggggtaagccctacgttccgctggccctgacaatcgtatcggctacgttggtgttgtctaacgctacctcttggatcgctctggtttggttggtatgtttgtctacctacttatcatatatcttagttaatctagtcttagtatctcaatttagccatattggttgattctcgcttgagggtttatgtcggtatcggctaaatcgttttactagattaaattatctaaggtatccaccaccctgaaaactagtcaaaagcttaattgtttagactttatgcttctttgcatactttgcgatgcatcatccatagtcgtgcttaaaatcataaaagctaacctgtctttgattataataagggtttgattggggtttcaaccgatgagttatatggacgttgcatcggcttataaggattgtatgcatgtcggatttagccgattacaccaaaggtttcattgtttatctaatctttaatgacatcggaccaccagccgatgtatgctttaaccttcggaacaatgcttattctatcatatcattgttaactgattggtttctacttgattaaattgttttcttattacattaccattagttgattgtctttatattgttatttacatcaagtgtcagattctacatcaaccatatagccgataattcaaaatcctattgctatcggctgccatcaattggtattactccattggcttgtcagccgatcaacttattgatctactatttacatatgtcagtagcaggatcaaactgactagcacgcctgtatctcatcaatattttagacatgcgcggaagctaagcagatcttctaggtcgttgtgttcgtcgataacacagtttcggcaccatcggccgagcgcggatttttcgtcaacagtaggcaagtgaaaaggcaattttgcccttacatttattttatgcacgacagttttattaattatttttgcagggacaatttttatagcaaccttattatggactggtagtggaatctctcatgaatctatgagctattttagtcaggaacctggagttattttagtaatgaagttattatgcatttagtatattacatgaaattaattgacattggttgctcgttgtcttatagccacaactaaaacataaacttttttaacttaatttagagttgatttgggggttttaatattattttcagacttatctttgtaattggaatagaattatagaagtataaaagccttgccctgaaattatttttggtttgttcatttgatgcatcttaacttttattgtgaaaactttaatcaacaaactttgttggtacattaattaaaacgataggcttagcataattatccttttacctatgtacttttctgctgaatagctgaatggatgaatgatttgtgataattattggagggtacaaacaaattaattaaatattattttaaagttcaaaaatggatctaaacatttttataacaaattctatcgacgtttgagatcacgactatggtatttgcatagtatggagatcgttggtatcagggtatatgcgagattgaggtaaaagagtcagagacaagaatttttatgcaggttcggtccccttatctgacagataaaagccctactcctgttgaccgaagctagtgttgctctatattcatcataatcacacaagtacaatatttgggataacctatctagccgtcgtcgacatgacagcacgaacaccaacacgtagtcgacaatggggtagtactcttcctcctctaatatgaactcgtcgagatcagagatggcgctagatccctcttgtcggcctccgcagacaccaaattaagtctgtctaggctaatctctcatgtcgatgtctggcggcatattggtttgttctagcttgcgtgtctgtcgtcccctctcgtcatagggggttttgtatttatacccatagatgtccccttgtacaagtagaactagggagacaagtatggatacgatccgagtagtcattgtcgtttccatatagaactctactttctttccttatccgaaactccttctatatacgaggtacaattccgtttaagacttggtatatggtgggcccaccagcttagtcgattactattgggtatgcggtatccataaccatgacaaattcatatatagaattttattttgcacaaattgcactgctaaggagcatgagataggggtgaaaatggtacggaaacttttctgaattctagacctattttcgaaaacggaatctgtcagtcaagatttttttgaattttttggaaacggaaacgaattcagaaaaaaaaattctcgaaaacagaatctaatatgataagggcagttttcgtcgaaactcggaatcggttggaaactttccagaaattttctcggaatttctagaaattttgtgattgaaatacctattgacgagaaatctgcacttggccaacgatgccaagtctgtgttggtgcgaattaacttgacgaacacaacagcctgggagatctgcttagctccagtgcaggtccaaaggttgataagatgcgggcgtgccagtcaatttgatcctgcaactgataagatatacaaatagcagatcaatgggccgatcggctgataagccaatagagtaattccagccgatgacgatagggttttgatcaatcgactatatggttggtgtagaatctaacacttgatgtaaataaagtcaatcggctgatgataatgtaacaggacaacaatataattcagtagaaacaaatcggctaacaatgatatgatagaacaagtattcatccgaaggttaaagcatacatcggttggaggttcgatgtcataaaatccacaagattagataaatagtaaaacctttgttgtcatcagctaaatccaacttatatgctatccttgtatgctgatacaacgtctggatacctcatcggtggaaaacccgatgaaacccttattggcaatcaagaagcaggctaggaattatggttctaagcacgacttagtagatcaaactcaactgatgcagcactaagtatgaaaagaaaatatatatctagacaatcaagcccttgaccgatttttagggtggcaaatatcttagctaatctaatatggcaaagcaatttagtcgatactggcataaaccctaaagcgaatctcagccgatataagtaaatcgagctaccaaactagattaactaagatatatgataaattaggtaggcaaatatatcaaccgaatcagagcaatccaagagatcaaagcgatgcagccttgaacaacaccaatgtagccggttgttaacgaaaaatccgcgctcggccgatggtgccggaactgtgttggcgcgaactaagtcaacgaacacaatggcctgggagatctgcttagctccagtgtaggtccaaaggttgatgagatgcaggcatgccagtcaatttgatcttgtaattgacaagatatacaaatagcagatcaatgagccgatcgattgacaggccgatgtagtaattctagccgatgtcgataccaactgatagcgataaggttttgagctatcaactatatgtttgatgtagaatctgacacttgatgtaaaaagacaatcggctcatgatgataaataacaataatataatccagtagaaaccaataagctaataatgacataatagaataagtattagtccgaaggttaaagcatacatcggctagaggtccgatgtcataaaatccacaatattagatcaacagtaaaacctttgttgtgatcagctaaatccaacttgtaagcaatcctcgtaagctgatacaacgtccagataactcatcggctgaaaccctgatgaaacccttattggcaatcaagaagcaggctagagattatggttctaagcacaacttagtagatcaaacttaactgatgcagcactaagtatgaaaataaacataatatctagacaatcaagcctttgattgattttcagggtggtagataccttagctaatctaatctagtaaagtgatttaaccgataccggtataaaccctaaagcgagaatcagctgatatggttaaatcgagatactaagactagattaactaagataaatgataaataggtgcttacattgacaagattagagtgtcaaagccctagccccgccgatgcaaacagccatgacaagtataaattcgtcgaaaaagtataaaagtaaaacaggtggcgatcgccgaattgtaatgatcgtagagatagtttactgatgaccctaggtgtacatatttatacccgtggatagatactagtccttgttggacaagaaaaaaactttcctaaagacaaaaggaaaacataaaatcattatcgaacacttaaacacactttcctaaagacaaaaggaaactaacaaactcttcctaattaatagataacttgccatgccgcattctccttgaactcggtcacatctggataagcttcctttaatatattaattttcttaaccgaatcctccaagaatccgactgctggcgacttgataattcccatcggctgatttaaggactctgaagctgatattaattttaggccgatgacgtcttcggggcttaccaaatttcactgttaacaccggtacaattgcctaggccagcggaacgtaggacttaccccttcgctggagatcgaaagccgctgcagccccgcgtcaggtgccaagttccaccggatgataaataaaaacatcggtaaagagggtggcgatgcaccgggagtagttatattgatctgtaagatagtttacaatacccccgggtgtacatatttatactcatgagtagatgctagtcattgttggacaagaaagaaactttcctaaagataaaaggaaaacataaagtccttatcggacactaaacacactttcctaaagataaaaggaaactaacatactattcctaattaatagataaactgtcatgccgcatcctccttgaactcggtctcttctggataaactttctttagtagattaatttccttaaccgaatctactaagaatccgactattggcgactttataattcccatcggccgattccaaaagtctaaagccgatactaactctaagacaaatagatgactttggggcttaccaaatttcactgttaacaataccctagacattttttaaacactaaacaatgaataccatggtgtttggctgttattttttctagaatatttgttatgcaaatctgaagttacataagaatatatctttttcctgcattgggatttatcaacaacattactctcttcaaggtagataatttattcatagattgtgttttgtgatgtaccgttgagacttaacaattagaattatatgattatgttttatgatgaattgtttaccgttgagacttaagaattggatttatcagtttgaggggtttttgtattccgttaaattttcattaccatacccgcgccggttcgttttcgctccattttcggtttcaataatattgattccattttcgtatatggggtttctaattccgaaaaaattatgaaaacgaaaacaataaatgtggttttcgtccgttttcatccctagcttgagaaacgtgcgtatttatccaccattatgttccatgaaaaaaaaacacgtcttaaaggattaaatttgacaataaagaattttctttagaaagtatggctttgtatagttagagcaatcaaccaaatagtttataaaaagaactatatatcaaataagcgaagttcatcctggcacgcttagcctacattctgaacatgaccaaggtgctcttcctttacctctctttggcacctgagaacacaatgcattgtggtttgatttagagcattctcatatggtagaagacatatcatctatgtttgtttcatttgttgattttcctttgtttctttgtgagttggtttaagcagtaacatggtagtgtcacatgcaagatactttttgaaaccgacatgcaagatactctctcacacagactacttcctccgatacaagggattttggagggttgtgacatatcttataactacaaatctggacaattatcttttcaaaatcgcttatattgtgagatagttgtagtatttgcttgctatgcatgtcatccaaaatcctagtactccctccgtacatgtaaaggaaatcgttttggacagcgacacggtctctaaaacacaattttgacttcttgtttctataaaaatatttattgaaaagtgatatatgtatacttttatgaaagtatttttcaagacaaatctattcatatactttttacattttcaaactcaacaacttgagagttaatcatgatttatatttccaaggtttgacttaaacattgtcctaaataacttcctttatgagtatggagggagtacagttcaaaggttaacactagtcatacccacattaaatacaacctattctaatattgaaccaaaactaaagccaacaaatcaaatgctaagcatcactttatattttccagattttggcccataaagcctttgcttgtcaaatgcagaaaaatccctagttgagcatcgtaagtcgaaatttcaaaattgcatttgctaaaactagtaacgatataaacctactaggaaccacattatctctgttcttagaacagcactaggtaaagagcatgcattataaacaaactgcacaatgagattttagtacttggttaaaaatatttttcatctcatctgtcaataaccaaacaaattctcaaattttttaccccttcggcgaaacccacaaaggaccaaaacctactgaacaaaaatcatatcttactagaaatgttcatataagagttaaattaagactgtgctccacccaaacataatatttacaaataattgcctggtctaggatccatttcactatcaaatatttacaacacgcaacagtatacaacatgtgaatgtaagacctgttaactcaaggatcacatgctgagaatccataaaaataaatgaaaaacacagtaagtcattagctaatcgcaaatgctacctgcagaagagtaggtaattccaactctggcgtagaagatggatgccgggaagggacatgaaaatagagcatctgaaaaattgcaatcaagccaaaagcagtaaaaatcaatttggcagtcaacaaagcagcacatccccattcaaagtgaccaaacagaaacaataccacaataaacctgattttttcgacaacctaaggaaacactgaatgactaaagtaattgtgccttcagaaggaaaataaaaaaaaaaaaacagcaggacaagcaggtggttttaacctcatcacttctaatagcagttctgagagaattaggagttatttatttggtttttttctgttaaaaaaatgtatttggttctgttgaaaaggggtttttgaagattatctgctatatatgtccaatgagcattggatgtagataaggagggaaaaccattgctggcagaggtcatgtatacaattcactatgcattcctataacagatggaatccactactttgaaaagaaaaaaagaacaatacataaatctgaaaggaagacttgtctaataaagaatcagtcaggaagtcaccatacatcttattagatggacaaagcttaccaatttgacagcaatatacttttgagacgtaataattgtacaggtacaatgcaaaaggaggattgcgtacctttgaaattgccgggtgcattgtccccctattagatgcagccaaaccaagtagcaaaccaagtctagttatatcatgctcctgcggtaaagtaataaaaaggttataccataccaataaacaaataatgacatcacaaccccattttctcctaccattttgagtacggaagtaatcaaaaggaggacaaagtgctgagtggtgactgaggtgcaaagtggtacagaacgatttagatataacaatgaatacttgaacacaaaattagtgaagccagttattttctttagtaatggaaccaaaggacaaaaggccacctgggagagatatcggtaagcgtcggtcatagttaaaactcgtagatgttcatgcaaaccaaatgcaagaagcagaccagcatgagtaaaatttggttcagaaggtctattatattgtatccaggttcttaacattttctcctgcaaatagaacatgactgttacacattcacaagtagaaggaaatacagagtaaaaggtggcaaagcatttgccaagagttgtgaactttgcagcttttgctactgctgggtaatatggtttatctgttttgtgatagtccagtttacttgaaaaggagcaagcctgagcccagcagcgacaccattgtgaaactcagcccaagatttgaattctgagacgcttctagtacttaggtcaagattaacctatataaaatagtgtaatagggtaaagaaagttacaaccaaggatctacgatgaaaagatgttgtaaaaattcaggggcagcgcagcgttcatgttatgaggtgagatagatcgaaggtggtagcagtggcaacatgatatttatcgcccttccctgctgtacatgggaagaaatgcagttggatgtgggggttggtgaataggcttagcttctgttgctttgttaataaactggttaaatagagtacagctgacatgagtagccaatcaaaaggactaaaaagagcgtccaaccaaccctgaaatatcacaggtagcttcatatcattaactaatatgggttgctatctctaagactggcatatgcagcagtaccagatatgttgtttttctgtcatgaataggggaggccccgttccacgcatgacataggcagtgatattgcaattatatcacagtattaatgctacatggcgacgtgaacagttgatttcttcagaatgcaagtctaccagaaaacagataaaatttgagttacataagaggtaacattactgttgcattctgttgtgcaggcaaccgaccagccaaaacaagctttgggaaaaccagagcctgcagcaaaagaaaat

SEQ ID NO: 5906 - DNA, 72212 bp, Oryza sativa
cgaaattaacctgacacatgatgaaaatgaatcgctgttgaactggtgaatcgggaatacatctcaaggtgggaaagacaaagccaaagaaaaaaaaatcaatccacatgctggtagcatgggaaatattgtgtgagcggaacaggcgagtatttcaaaatcaagaaaaaaaccttgctgcagctactagacaagattcatgatgaagtcaaactatggagaatatgtggagcaacaaacactgcgagattatcggcctaagactctttgattgattagtggttttctccctcttctttttttcctcttcttttgctttttcttttctttttctttttatcttctttctctccttcaccgttggtgatcatgtaaatagtatatcccctacttaatataacaccagctgtgctggctcgttttttttttaaaaaaagaattattagcagagctagcactcgatcttatatatcttgatcgacgatcaccttgctccacacctctcaatagctctacatatatatagtaaagaacattcctttcaggattagttgtatgcaaaataagaaacgtgttatcgtatgattaaattagtattaattattaaaagtttgaaagattgatttatttgattttttgaagcacctgttatatatgaagtttttcataaaacacactatttagcaatttgaaaacatgctaatcaaaaagagtagctaagctcaattagctactcccttaattaatccaaaagtcttaagcatattttaacttttggttttctaaataaaattataatttttgtagtctatgttaatgtaggatgagtttttttttccgcgaacgctaatgtaggatgaattaatgtttccttgattttaatgacaaaagagatatctccatcgatggagggagtatttagaacatgccattagttttgacatgtttaccgggaaattgaagagcaatgtccccagatcgaattcgagtactggagaacaaccaatatttagatagcattacaactccaaacaaatctaggacaatgggcttggaattttaaactaactgttggacagcatagtttgcatggatatagagcactagtaacatttgttgagaaaaaaaatagttaatacaaacaatttatttgaattaatgattcctggggcaaagatcaattaaggaggtgggtaaactcttaagggagctaaccaactcaataatcgtacgtatttatatgcataataatcaatggcaggacccgtccgtcggtccgtgtttatgctaacagagactttacggattaatttttcatggtaattgaactaatcctatacaaaccttatataattcttagtatgttccaatgaagcccttgccggtttagctaggaacgacttaaaggtgcatattgttctgcacgctccaatttgtgatccatgagtcatactctcttctttcttattattggacacagctaactaatataaatttatctataaaaacattaaatcatgatgttttggtgagcacacatagaatagcatctaacgtactattgataatacgacatcttttcaaatatctatatcttttgaaaagacactatatatcaaagattttataaataaagtagtacctattggcaaataaaaagaaactgagggagagtaagtaaaaaatgtcgcagtacaattatgttgtacctaacaataaggctactgctacagtagcatggcactattccgtgcattagatgaatcacagcacgactacaggcacatataacttttcctctaaaaacatgagcgtttcagtgtagcacctgtggttttctgcgctggatgatcgccaaacctagtgatttcccctgaaggcctgaagctctaagacctcgttaatttaggaggtctaaaataggatgggattttagccatttcctcggctcatcccattgctcaaatttagctatcaatgttttgagaataatctacattgaataagctggattattataataagttgatacagaataagttgtgagttatttgtttctctggattattgaaggcatctaagggtagtgggtctttagccactcaataatctagaaaaagctccttcagatgagattattagattatactaatctggttcatagattataataatctattataataatctatcataataatctacttatttgttttagcttgctcattataatccaaattataataatcctaaactgaatgaaacagtacctaaccatccctacatgcttatgactggttggacggaaaatactcccagccctcaccaactgaccctgatccctgagggtgtgtttggataatgagaaatgaggggtgggattggtattgggaaataaataaagggttagtattaaatggatgagggagaatgaatggttaagatttaaagaggggtgggaaatcatttcccttagatatttgccaaacactgcttcatggcttaagccgaatggcattgatgagccaaaagggattgcaccttttaaatagtatgtgcactttcttaacttctatttttctcactttttgcacgcacgttattaagctattaaacaatgtgtgtttctaacatttttatagaaaagttgcttaaaaaaattatataatctattttttctaatgcttaattaatcatataatacatcactctgttttgcatgtcatgaaaatgtctcaactttctcaaacgaacacagcgctaggcgggaataagattagaagatcattcagatggaaacagatattccatccatgatctgcaaacagtaagggctgtgtttagatttaggggtgtaaagttttggcgtgtcacatggaatatacggataaacatttgaagtattaaatgtagtctaataacaatcggtcagtaaaccacaagatgaatttattaagccatattaatccgtcattagcaaatgttcactgtagcatcacattgtcaaatcatgacgtaattaggtttaaaagatttgtctcacaatttacacacaatctgtgtaattagttatttttttgtctaatttaatactctattcatgtgtccaaacattcggggcctgtttagttactaaaaagtttttccaaaaaatcacatcgaatctttggacacatgcatggagcattaaatatagatttttaaaaaaactaattgcacagttgggaggaaaatcgcgagacgaatcttttgagcctaattagtccatgattagccataagtgttacagtaacacaaatgtgctaatgaaggattaattaggctcaacagattcgtctcgcggttatgaaattagttttttttatccttgtccgaaaactccttccgacatccggtcaaacgtccgatatgacacccaaaaaaattttattttcgaactaaacaagcccaaaattttgctagggggtctaaagagggcctacataaaaacatagcaggccggccgtctactgtttcatgaaaaaaaaactgggaacagaacaatgataagttaacatatgaaccttgattttgattgatctctatttcatttgcatcaactaatctttggaacacaaaattacgccaaaacaattgcatcaaatatgaccgtcgtcgtggtgcgtacgaaaatcacacactgttttgatttgatgaaccatttcctcggaattgaatagcacatttccgtttgggacaatatttatccagctgctagatttcccaatttcctttcttttttttatctatgaacgagcgccacgtgtcagccgccggagcagcaggcggcgcaccggacgaggccgttctcgttgcacgccgtgcagacgcggaagccgccggtcttctcgctgtaccgccggtggctgccgtcgcacgtgccgcagggcacgaaccgcgtcccgccgcacgacgcgcacggcgtggccgccgcccgcgccgcgccggccaccacgcggtggagctccccgctctcgtggaggaggcgcacctcgtcggcgtcgcccacgaggcggcccccgacgaacagctgcggcagcgccggccggtcccggcgcatgagcgcgcggagctcggcgaggtaggcggcgtccatggacacgtcccgctcgtcgacggcgacgcggagcccccgcaggatggcgcgcacgtcgcggcagtcctcgaacgtgcctcgcacggcgcggagggaggtgaagtagagcaccacgcgccgctcgcccgccaccgccgcggcggccgcctccgccgcgacggcgaacgacttgcacgcccggagcttggtcgacgacctcacgcggtgcaggacgttccgggagcccggcccggggggcgcgggcgccgcgtcgtcgtcgtcgaggacggagccgatgccctggtggtcggccttaccgccgccgccgccgccgccgccgccgctgctgggcggcgacgccacgcacgagggggagaaggacggggactgcgtgagccggccggtggcccggccgcggcggacccacggcgaccacatcgcgccggcggcgagcgatcgacggtgactcggtgagggaggagtggatcggaggaggggagaggagaggagtccgcggtgcgcgcgcgcgcgcgatggatttggcgcgaaattagttggtcgccctgccccctctggcttgctaattttaaccatgcgttttaactgtctccgctgcttatttgtggcgctggatttgcatcgggttagtttcctttgatctcttctcctggtgctgacttttttttggggccaactcatagagcgtgaggatgacaagtgggcccatggatgtgatcgacagaatttttatgtggacactttttttttcgcaagatactatcttgcaaccattaaggcaacaaggccttgttcggttacgcccggatttaatccggactgggaataacaagtataataagaaatttacatagatacaataagagaccgggatttatttcggaccgggaaccaatttactcatgatatagacaataagaaaccgggaatcaatccactagtcaagaggtgtggaactaacccagatgttttgttgtccctatgatgagtaaattagtttccggcccggaataaatcccggtctctcattgcatctatcacaaatttgttactatacttctcattcctggccgggattgaatccagatgtaaccgaagaaggcctaagggtgtttagatccaggggtgtaaagttttggcgtgtcacatcaggtattatatagtgttgcactcgcatggggtgttcgggcactaataaaaagctaattacagaatcgtccgtaaaccgtgagacaaatttattaagtctaattaatccatcattagcaaatgtttactgtagcatcacattgccaaatcatggagcaattatgcttaaaaaatttgtctcgcaaattaatcgcaatatgtacaattagttatttttagcctatatttagtacttcatacagatgtttgaacgtttgatctgacagggcgaaaaattttagggtgggatttaaacaggcctaattctcgttcatgtatatgttcataacggataaaattagaatattatcaaagcattttgcagtgcaaatctatagaagtgtatttggcgtgaaaaactattttgcttactcttagaagcaaaatggctcttccatagtagataggagtgcctttttcaaaaaaatagtagagaggagtacacttctttaaattttggaacaaaaatatgtttctatatttttttaaaagaatatttttttaaaagaatatccataatggaactaagtcgtggagaaacttaaatcgtgaagaccagcaaaacgtgtaggcccagctaaaaattctcttctcttcggcccagtaggcgcaactaatgtactgagaagcttccgtagcttggaccaaaagcccataaaagtgttaggcctgaatcgttatcgcggcttaagccacagtgggccgccttgccgaattatagtgggaccggattaagccacacgatatcgtagcgcgcggccttcttcaaatcggagtcggactccgcatcgcctctgcccagcccagcccagctgacgataaatagccacgtcacccgcactccattccctccctttctctcccgcccaattcaatcaccaccatggctttttcctctactccccaccttcgtcactcttgcttctgcttccgccgctgtcatcttcgatgtttctctcaccgcagctccccgctgctccatgccgctctcccgtcctcaccatcgtcgttccagctggcctggctgatcgtgaggtgggctctgccgacgccggggtggtgcaagctgaacttcgacggctccgtgttccacgacgggtctcggcgagcgagcatcggtggcatcatccgtggcttcgactgcggcggtgcctcgccttcaccgagaccacggagcactggacggttggtgtggtggagggccgtgcgatgatccggggcctgagactcgcactggcgtgcttcgtcgagcggatcgtcgtcgagggcgatgacctggttctacgcagatgaggatccttttaatttccttcctcccttaaagctgaatctcaccatttgagaagctatggaatcgtcgacccccttaccaagtagactatgaagtcactttcattttttggttgtgtatgctatgtgtttgtgccccgtcatctaccaagtacttcctccgtattttaatgtataacgccgttgactttttgacaaacgtttgacctttcgttttattcaaaaaatttatgtaattataatttattttattgtgacttgatttatcatcaaatgttctttaagcatgacataagtatttttatatttgcatagaatttttgaataagacgagtggtcaaacgttggtttaaaaatcaacggcgtcatacattaaaatatggagggagtaaattcgacaacaaagctatccgatgtatatttgtggccgccatgcacgaggagatcctctccttcctccgccgtttcaccgagttcgaggtgagacacatgtggagattatggataccccatatctacacggcatgtatagtccgactgggtatggggtgccatgtatagatagaatatctttaagatgactcgggttaaattccaaacttgtatgtcaaggaaatacctgagatcctagtcggttatggttgtattttatctgtaattacatattccgttaggatatggactgcattttgtaatacggactccttcccctatataaggaggggtccgggtgcctctaggggcacgattttcacccagatcatacgatcaataatacactcggcggatcaatccccggacaggagtagggtattacttcttgattaagaaggcctgaacctgtataaaattccttgtctctaaacccatccacttttccatcttgatagccacccccttttagtattgccgaaatcttgtttcgaaaattggcacgccaggtaggggctgcgtcaagttcttcgccaaccagtgcgatgggtttcatttccggcatcgacgacttcgtcttccctcccgggcaggcgttctgattcggcagcctcgacttcatcaccaacgacttcggcaagatttctctcctcgactcggattcaaaccagtcgggaagagatcagatctccgccccgttcggtatcccgaactcggccgaggtctaccccaagatcatatccaccgagttggcttcaaacctctcggacaaggttcaatctacttcaacacgacccgatcaagatgatggggcctatccgccgatcttgatgaaactccccgacgatttggctgctgtcttcaccacaagggcgtcttctccccataggcctaggcgggatccggcttcagccccggcccggcctagctccatggaagtcggcgtcatactccagcctctcggcacggtttcgacggaacaactggacggctacctcagctcccccggcgtcgacttgcaaccaaccgagatcgtggagtacgatgacttcggctaccgctacgactaccgcaacctcgacgacttcaatgaaggctttgaagacaactacacgcctctctacttcggcattttcatggctgacaacgagacagaagaacagcgtaaagcccgagaagcagaagaactacgtgtacaacaggaagccgaacgacgccgactggaagagaaacgccaagcacaagagcgagaacggctgcagcgtgagcaacaggaacgtgaacgggctgcaaaggaggctcaggaccggcgacgacgggccttggatgccgggcgatgagcacaagaacttattgggaagcaagacgtcgagggaactgcggttttttgcgcctctcaacaggacgcggttgcagcgatcaccctcctcgacaccctcctcaaggaagacacgctcaatcaagccaatcacgtcgtcaacatcttgaaccagaccaagaccatgatcgccgcctcggtcccgattaactctgcaagcgtccgcacgccgactggcagccgagttcctcatcttcgatcccaagactaccaccaaccaagccttagcgtcgcaggtgcgggatctagtcgcaggagcaagggtcacgacgagcgatctgtccactcaccccccgagcgacacagggagcgtcgagttgaacgaccacgctccccaccttgcaggcgccccgtcgatcttcgcgatactatcaaccagcgccacgcgacaagaggctacgctccccaccattcaccagatcgctacgatgacgacgtggatggagtcgctgccttcacaagcgacctgcgtcgagtggattggccagccggcttcaagccgactggaatcgagaagtatgaaggcaccactaacccggagtcttggctcaccgcctacggtcttgcaatccgcgcagcgggaggagacagcaaagccatggcgaattatttgcctgtggccctagcggattctgcccagtcctggcttcacgggttaccccgtggcacaatcggatcatgggcggaacttcgtgaccacttcatcgccaacttccagggtacctttgaacgccctggtacacagtttgatctctacaacatcattcagaagtctggagaatcccttcgagattacatccgacgcttttccgagcaacgcaacaagatctctgacatcactgacaatgtcatcatcgccgccttcaccaagggcattcgccacgaagacctagtcggcaagttcgggcgcaagcctcccaagacagttaagcagatgttcgaaaaagccaacgagtatgccaaagccgaagatgccattaccacatccaagcagtcaggcaccacttggaagccgaagaaagatacgccgactataggggggagtggaagtaccaatcacaaggatcgcaagcgtaagcccaaggaacttgtggcaaatactacaccatcctcccgacaacgttcgcgcatcaacacttttgacaagatcatgaactcccaatgtccgcatcatcccaattccaatcacgcggccaaagattgctttgtctacaaacagtttgtagaacaatacgccaagaacgcacgcaaaacctctgacggagatcaaagcacgtcaaagaaaaaggatgatgaagatgataccccgactggttttcaagaccattgcaaggaactcaaccacatctttggcgaacccctggcttatgaatccaagagaaagcaaaagctaaccgaacgggagatcaacgctgttcagcccgacacgccccaatatcttcggtggtcagagacaacaatttagtttgaccgctcggatcatctagaccgagtggtccacccggggcggtatcccttagtactcggcttcgaagatccctcattgatggtggcagtgcactcaacatccttttcgccaagactctggacgacatgcagatccctcgcacggaattaaagccgagtaattcaccctttcatggagtcatcccggggctatctgctacaccactcggccagatcactcttccggtcacttttggcactggggagaacttccgcacagaaaacgtttgcttcgaagttgctgatttcgagacagtgtatcatgccatactcggacgcccggcattggccaagttcatggccgttccgcactatacctacatgatgatgaagatgcctggccctcgaggagtcatatccctgtggagtgacatcaagcaagccgtcacatgcgacaaggaaagctgcgagatggcccagatccgcgagagcacgctcgcccgagaagaaatccgactggctgcgtccacggcaagcgaaggagaagtgcctgcaaccaagataccaaagagcggagaaagcgacgccaagaccaagaaaattcctctagatcccttgatcctactaagactgctgtaataggcgctgagttagattgtaaataggaaagcgcgctcatcacctttcttcaaaataataaagatatctttgcatggaaaccatctgatatgcctggtattcctagagaggtgattgagcactctttacatgttaaggaagacgctaaaccaatcaagcaacgactccgccgtttcgcataggataggaaggatgcgatcaaggaggaattgaccaagctgttagcagcaggcttcatcaaggaagtccttcatcccgactgactggccaacccagtcctggttcggaagaagatggggcagtggcgcatgtgtgttgattacactgacctcaacaagtcttgccccaaagatccctttgggttaccttgcattgaccaggtagttgattcaacggccggctgcgagctactcagttttttggattgctactcaagatatcatcagacccgactaaaggaatccgactgcttaaagacttcattcatcacgcccttcggggcctactactacatcaccatgccttttggattaaagaacgcaggagaaacttatcaacgcatgattcagagatgtttttcaactcagattggccgtaacgtcgaagcttatgtggatgatgtggtcgtcaagaccaagcagaaggatgatttgattacggatctagaagagacctttgcgagcatccgtgctttcaagatgaaactaaaccctgaaaaatgcatcttcggagtaccgtcagggaagctgcttggatttatggtgtcccatagaggcatacaagccaacccggagaaaattagtgccatcctcaacatgaaaccgccgagctcccagaaagatgttcaaaagttaaccggctgcatggcggcgctcagtcggttcgtttcacgactcggcgagcgggggatgccttttttcaagttgttgatgaaaactgacaatttccagtggggacccgaagcacaaaaagcctttgaagacttcaaaaaacttctcactactccactactcttagcttcaccacatccgcaagagccactgctgttatacgtgtcggcagcttcccatgttgtaagcacagtcctggctgtttagcgagaagaagaaggctatgttcaaaaagtccaatgaccaatttatttcgttagcgaggttttggctgactccaagacaagatacccttaggttcaaaagctattatatggtgttttaattaccgtcaggaaactatctcactacttccaaggtcactcgatcacggtggtcacatcgtttccactcggggatatacttcataatcgcgaagcgaacgggcggatcgcaaagtgggccttagagttgatatctttggatatatccttcaagccgcgaacttcgatcaagtcccaagctttagccgacttcgtcaccgagtggatcgagtgctaagaagacacgcctgcagagaagatggagtattggactatgcattttgacgggtcaaaaaggctttcaggcactggagcaggagttgttctaatctccccgactggagagaggctgagctacgtattgtggatacacttttctgtttcccacaacgtggcagaatacgaggcgcttcttcacggactaaggattgcaatctctttggggattcagcatttaatagttcgtggagattctcagttggttgttaatcaagttatgaaagagtggtcttgccttgatgataacatgaccacttaccgacaggaggtatgcaagttggaagacaaattcgatggacttgagctcacccatgttcttcgacacaacaatgaggcagccgacaaattggctaattttggttcaaaatgagaagcagccccttttgatgtgtttgttgaacatctctacgagccaaccgtaccacggaaggaaacaatcgaggccacggacactcaagacgtaagcatgattgaagccgactggagagagcccctcataagatttttgacaaaacaagaacttcctcaagataaagatgaagccgagcggatttccaggcacagcagactttatgttattcatgagactgagctgtagaagagaaacccatcgggaatcctgcaacgctgtgtttctttggaggagggaagacaattgctaaaggatatacattcaggcatatgtggtaatcacgctgctacacgaaccatcgttagcaaggcttatcggcagggttttttctggcccacagctgtgtccgacgttgacaaaattgtgcgaatatgtgagggttgtcaattttttgcccgacagacttatctaccggctcaggagcagcaaaccatcccgttatcttggccgttcgcggtttgggggctcgacatggttggcctgtttaaaaaggctatcggtggttatacacatctctttgtagctgttgacaaattttccaagtggattgaagccaaaccggtcatcacaatcacggcagacaaggctagagatttcttcatcaatattgtgcatcggtttggggtacccaggaggatcattactgataacggcactcaattcacctgcggagtatttaaagatttttgtgaggacttcggcatcaaaatttgctatgcctccgtagcgcaccccatgagcaattgacaagtcgaacgtgccaatggtatggtacttcaaggaataaaagcgcgagatttcgaccgactgcaaccctatgccggcaagtgggtagaacagctatcatctgtactttggtccctgcacaccactcccagtcgggctacgggccagtcgccgtttttcctggtctatggagcagaagcaatgctgccaagtgaggtggaatttgaatctttacgatttcataacttcagcgaggagcgctacggagaagaccgagtagatgaccttaaccgactagaagaagcccgtgaagcagccttaatacagtcggctcagtatttgcaagggatgtgccgttatcacaattgcaatgtttgatcacaagcttttttagtcggtgacctggttctgagaaaaattcagactacacgggatcggcacaagttatctcccttgtgggaaggaccgttcataatttccaaagtcactcggccaggttcttaccgactcaagcgagaagacggtactcatatcgacaactcttggaatattgaacatctttgtcgtttttatgcttaggcattacttttgtatttcccactttgactgctaacgtcaagtttttccttgagttatcagtcggggctactataataataatggagtgtgatttttatcaattcaatttgcttacctgatttattattgccctgtttgattttttggcttggtcaatgaggactgaaagttttttaacaacttttacgggttttaggctcaataaggtttgataaaagcttttaagaaatcaggagctaagtttaaagatcaagcacagcataaattcatcagtattgtacaaattgtgcctccatcatcatcatcatcatcatcattgttataatacaacatcaatcggtatcagttttttcatcatcagagtcattagatccagtcggctggaggtcgttgtcctggaatatctcaactacatcaacggctatcttatcagcagctttctgcgtatcattgatgaggtcgagaacggcttcttcgcttgtctcgtctgcaaagccatcaatggcgtcaatgtcaatcttcgggtacaaggacttggtcattgtcaatgccaagctcgctcccatacttccagcttccttgatattcttaaaatatgtatccgcagcaattctcagcttgtcgaagatttcggaagcatcaaatgcactcggaccattgttattgaagaacatggcttggacaagtggtgtagtggcattggcgacttcatctctggctccttcaagcttcttgattttgttaactaagacgtcgaattgagcttgggatttgatcttgcagtctacacaaataaatctatatcaatgactaggcatgaagatgagagtggtgttttgaagtattagttaccagtaccttcgacgtctttcagagccgagtcactttgttttgccaattcgatcttgtctttctccagagcttggatccgtttttccagttccgatatcttggcggcttgcactgtatcgcttcttgttggttgatatcacaaggatagcagcataaataagtgagacagggatgagaattatcttttgactaaccactcagctcaaagttggaatcttgaagctcggtgattcggtctcttagatcatgttcagtcttcctggcgagctctttagtttcatgcagctggtttcgggtggcctcaagggttccaagatggggaactagtctctcaagagtcgtagtcttcgcctcgttcctgagatggattctctgcaaagcaaatttatccgtatttgagcaaagtggctgacaggatggttgaagctgtgtacaggaagacttacatttacaagacgagtggcttggccgagtgcctttttcagtaggcatacttcctcgtcttccttttgcttatttatcacaattccctgtggttgcatgtcatcatcccaccacttgactaaaatgggtgggcgagaatcttcagctgactgtatctggaggatctcttcttcgtcgccaatcatcgggccttaggcattcatgaataatggtgaaacaattgaagaaagtctgttggatcaaagcagatttgaagggtttgcttacctgttatgatttccggtcggggacgaggaggtctttgtaccctaacaggagaactaattccaggatcaacaccggtgtctgtcttgggagggctgttagcttgagcttctacttctgggatatctttatctggctctgtacccgactggtttccagtcgggggctcctgattagcgccagttctagcttcggccgactggttcccagtcgggggcttgttgctgggttctacattgtcggtggccggttgattatcactcgggtgatcttctgcagtcagcccggtttcttttgacgggcctgtctccatgtcagtcggctcggagtcttttccagaaggatatatgtcagatggcttcctacaaatttgagttatgctatcaatactatttcaatagtgggtaagcagcaatacaaggaagatggccaaatgatttgtacctggaagattttctgattttcgacatgggacgactggatgttttcttcttcagattagtttgccttggttgttttccggtcgcttctttgtcgccagttttttcagcatcatcgccctcatcatcactcaggaccaatttcctcttgcgagagtctggctggctagtttcctcgaggtgtttggttgagtatcagaccgaatttttggtcccccactcgcctgaccagtctgccggctgggtgatcggcgttgagcgatcggaagatccgacttcaacaaggcgaattcctgagcatgatatttcgaactttcaattagcttaacagaaggcaaaagcgtgtttttgagaaaggctgaaatgtttgaatacataccggtggaggaggattgaaggcgttgtatggcaccactagtagcaagtgcgaataactgactgcggtagcgtttgagaagattttgtacattctctccttcatgactttaaagtcaagagagtctggatcttcatggttcgggtcatgcttgccgttaaattcaaaggctgtacgggatctctctttaattggagctagccggctgttgataaaatgccgggtgatctgttctccctgcagaccttgctcctttagcttcagcatacggtccatcagggcaagtgcctgagcagcttcctctcccattggaagtgagttccaagtgtcctgataaaccggaggaagacacgagtactcggggagtgcaggctcggggttttgtacatagaaccaatttgcatgccagcctttgtttgaggttttgaagggcatggagaaatatttttggcttagtgttcctctcagttgaaatccagctcccccaactatgcatggcttgctcttgttcggttggggtttgaggaagaagatatggcggaatagggcgaaatgaggcctgatgcccaaaaatgcttcgcaggcatgtatgaagttggcaatatggactatggaattcgggtttaggtgatgcaagctaatcccatagaaatccaaaattccccggaagaatcttgaggttggaagagagaacctgccatagaagaaatgagaaaataccacgacctcgtgtgtgtcaggggttgggaatgcttcgccgcatgctggacgccacccaatgatctcctttaccagaagaacaccatgcaccaccatctccttcaggttctcctctgttacatcggagggcgcccactgactctcaaagctctctctctctctcttccgccatggatgcgatctggataatatgatttggttcggtgaatggctgggaatggatgggggattgatgcggtggatgcgcaaatgatttctatggagttttggaagatggatttgggagaattggagaaccctagttccgttggagtggtttcgtactgtagcggagaatggggaaaaatgacgaaagtctcggcggggaagacgaagcggcagttggttttctgctgttattagggtatcaggagtgctaatgggcctgggcctgtacagtacttcaggccaattttattatcagcgtggctagttgtgatccttagggacttgggcatttttgcttcggcaatttttgctcacaacagtatggcccaatgctgttaaaatcctttttgacgcagttagataattccttggaattactacgatgcaaataaaaaggtacccgacagaaaggtgttatactacttttgtaagcctttttaggttgcgaaggctgtttgggttttgttgagatgattggtttttgaacagtcattctctcggcatgatatatgcttattttgattatggcgtgagtcatagcctaggctatttagactcatcaattatcatgatatcatatttataccatatttgatagatcttttgagagtttttacttagattcttgccatatgtgttggtttatggacctttagagtattttttactcgggcctctttatatcttcatttttggtatattaaagctaaagcagtcggctggatgttttattaaacgtcgcatatgcttagctgtgtggtactttgggtaattcggttgtaaaaccactcggatggatattatttgcacttcgactatatgtttagcctttagctacttacatagtcgggggttacacctaattaggtgcatctattcgatgcacccgattatttatttttagcccttcacaatctttgattttggtactcgggagatcaatgcagaagaaattgaagcactcggattatcattttgtgctacgagaaaaggctattttgtcgactgtaaatgtctcgggtgctactgtggagattatggataacctatatctacacggcatgtatagtccgactgtttatggggtgccatgtatagatagaatatctttaagaggactcgggtaaattccaaacttgtatgtcaaggaaatacctaagatcctagtcggttacgattgtattttatctgtaattacatattccgttaggatatggactgtattttgtaatacggattccttccctatataaggaggggtccggttgcctctaggggcacgattttcacccagatcatacgatcaataatacactcggcggatcaatccccggacatgagtagggtattacttcttgattaagaaggcctgaacctgtataaaatttcttgtctctgaacccatccacttttccagcttaatagccaccctttagtattgtcgaaatataccgagagggaaactgcgccggcatgtggtcggagagaggagggatgccggccgccgtctgggagaaggtggatgacgatcggcccggggtggtacacgagcgcccccgcaagaacaagtgaagcgcaccaagaaacaagaagcagccggcatgcgagccgagccgtagtctctgatcaaaagttcaagacttctcccaatttgtgattattgtagttgtacttgtacgattagtgtagctaaatactattcattgtagaaatagatcgatgattcataacactaatgatgtatttattcactgattttgaaataaaacaataaacttttatatatgcgtgctctgtttcttctcgtgtgttgtgatttgtgctgcgtgtgattgcggtcgtcttcgatgcggcggtgtggggattggcggcggaggtggattaatttgcggcgagcaaagattccacggcgatcgtcctctcctctgtttcttggaacgcttctctctgcccaaccggaaacccgagctcatgctctcgccgccggccaactctccatcaagaagaagcactctgctcctcactgcccaagcaccacgcatctagggaagcgctgatgccagggggatgcgttcctcatctccatcgagcgccgggcccccgcgtgcgacgccgccgagctctcttccttccctggtggtgggggcctcgagcttcatctccgcccttgcgtacccgtcgcccgctccctcatcgctcgagctccacctccgcccacatgccggatttctggagaaagaaatctgcttcagttttcgtgcacgggagatgtttgctgtattgcctaagtgagttcctgtggccttgtgtttttatatcctcctattaatgaagctcctgactgttccctcaaaaaaaataataataagtgagttcctgtggttgttcatccatttgggccctatgggttcaaattatgttactatgttgtgaaaccaagtgtgtttttggtttatttgtgatggaaaattggcaatgaaatgtgtaaccatgagttggttttgagcgagaaatttggtttggaatgctggcgattgtcaacgtgagtacatgcgactaatgcggtcaggttgcgatgtctatactcagaatcggatgtttggtttcatgtgtgtaggtaatcgaagtcaactttgatcaatggcgaggatcgggactatgctcaggaaggagcagaggtcttgcacggtccagaagctgtgacaaggtgggactgacgtcatgatttctgattgtcaacctgggtcgacggcagatcaggactaaactcagtgaggagttgagatccagaacgataaggaagtcgtgtgacaaggttgagatcaaggtgacacacggtggacaaacaccgtgtcgggaggttatcgcaacgggcttcgcaaaatcaactgcaagcgttgaaattcgcaaagaaattggaattaagacgtattttgtgtgcagcgtataatacatggcgtatggtcgatgtgtacgccatgtattcgcaaagaaaattggcaactaagcgtataatgtgctgcatgtatgtgtgtcaaggacaacgaacacatgcatggctcattggtgcagccaagactagggccggccacgaggcaatgcggacggtgtgatcgtaatgggtctctaaaaattagatgcctttaaaatatacatattatgatatcaggcctgagaggcttagaggaaagacagaagaccaatcggtgatcgagcatatcgtgactgcttgattgtattttaaacttattagtgtgaaattcattaatgataataagattttaaatattatcttgtatttttatggtgaatgggggcctttatttttttttgagcaatgctgcacgtactaaatttttcttactaaacttttactaacaatcatttcaaccgtttgatttaagtagatggaagttacaaaaaatctagatgcacttatagcatgacacattagtgttagtaagaatttaataagaaaaagttagtacatatagccttttcctttttttttcttttctataccgggccacagaaagtcaggccggccctgcccaagacatgtatgctctaagtacatgtgtgtacattagcttgagcagtgcatgcatgcacgaggagacatgcatgtgtgctgtgatcaaggttatcattatcccgattcgtatcctagtatcttacgatactacgatcctactaagccgaaacggtaccgatcccatctagtatcctaatttttatagtatatcgatcctactattcattactacacgatcctacgaaatcttaggtgatatcccgattctacgatccctatgatgctacaaaatattatttaaaataacatggtttgaaaataatgttactaaatatgctcaaatttatatgaaaatcagttaaatatataaaaaccaaagtggtttctcttgataaatatctctgtttgcatgacatatatcattactgtatttttttatatggaatggctatatataataaatataaatattaattaaacttaaaaaagaaaatcttgtagtatcccgatactctgatacgatcctacgatacgatattactttgagcaaaacgataccacctagtatcccgatccccgatcttgataaccttggctgtgattggttggcagaggccaagccaaccatccatctgtgatcatgggctaggccaggatgccacatggctgtaccggattggcccagtccaagatggagcaggccgtcatggtccaagtgacggcggcccggctccgtctccgcgtgcgtgggaaagcaacggagacacgtaggatccgtacggtgcgggacccacaggcgacgtggtgcgcatcgactgggagacagacgcgtggcgacgcggcttcgatacggaggagaggcgcgcgcgtggagcggcggcttcactcgctgtcaagcgggccggccggagcacgggcgcccctggcgacgtggcgacgccgggttcgcgccgtatgatgcgggacccacggcgcggagagtgtcaggcaagtgctacggtggacgtgactatcacttctaaatttatttatttggcaaaattttatacagaaaattcaaaaatatgcaattagctatgggacaccgtaaaaacgcgtatttgctgtaggacatcataaaaaactggttattagctcctggacatccgctgcattattttattatttttagaggaatatgagagagaaacggctgtgtaagtacggttctacccttcgaattaatttttctttattcttccttattcttctctctctcattctttctctctttctctctcagctatttcttcaagtgagcctgagggagagggagagcgctggtgatggcgtgggccggtgtagcgcctcggctggggcggcgctgcgcggtcatgcgggaggtggtgcctgagctagagggcaggttgtgccggcgcagttgggcggcatcggcgcgcaggcaagggcggccgggctcggcggcgcgaccacgccaggagcgcggctgctccaggccaacttcaggaggctggaccggatggcaccggcgccggcgcggcaaggctcaagccgtcgctgcgggcgctcttctcatgcgggatcttcagcacctgaacacacccagcactcagcccgacggcgacgcccaacaacaatgtcgtagcagggatgagtgggtctaagggcggatcgagcatgccattgggttggttgtggaggcggcggcaccggcggtggagacggcgtcgtcgctggttgtggaggcggcggcggaggtgacagcggatgcagcagcgggcggcggtggcggcttcgatgatggtcgacgagcccgacagctgcggtgacggaggcagcggcgagcagtgctgggaagcgggcggcggtgatagtttcgatgacgatcagcgagccggcggctgcggctttgacggtgacggttggcgagcggcgctgggaagcggctgccaacaatggggattagatagggctaagggcaattttgtctttttgaaatttctctctcctctttttgataagaaatgataaaatattacctcaggtgtcctatagcaaattacacaaattttatggtgtccatcagcagcgacgtgattttacagtgtctcccagccaattacacaattttcggatgtcctagggcaaaatttgcctatttattttattcactcataaacttagaggcaacccatataatgtatcacctttagtacacataccaatacctctaatactttcacacttttcttgaaatttgtatggaggttacctcttgatttaggggtggctcatcatctctctcctcatttctctcctccaccttatcactcaatccaatatggcactcttagaggcaacatatggggcattatagtacttgccctcagaagccgtttagcacagctctaactcccaactccaacttacctagagccggagttgtgccaaacagtatagatccttagattttcagagtggagttagtagagttactcctaaaaattgaagtgggtggagttgggttttactactccacaactctactccaccccaaaagatccactatcctttatttttaacatatttacaacaaaatgccagtgaactaccctacctaacccacctcacccctcaggccctcatcccatactctccctgtttgctagcgatgcgcagcgactagggttggcggcgcgcttcttgcctggcgacgcgcggccggcgacgcacggcggcgcgcggatgtgtcacgcccggaatttctatccaaaattccaaacgcttacatgtgtgtgaaccctcgtccaggaatcaactgaggcacacaataacaaaattgataatagagtacaattattactctaattattaaacgaataaaatatcattacagaggtagatagttcctctcaatcaataaagatctaagcagcgaaaaaataagatacacggcgcagacgactccactccacaggcagcttgaccagggctacacctaatcctccacaccatcagcacactgtagaactcctcctctgatgaatgattgcaaggtgagtatatgacatacttagcaagccacgcagcaaatatgcaagtgcataggataacaaaggatggcatagtagggtttcatttgcataaacaacatttaataaacatttcagaatttaataaaatagttaagtagtaattaaacaatattaatccaacgctatacaacataccctgttggataggcccaaccattctgaacaaccatcccggctgcacagttctatctccaaaccaggaatataccattccaaaccaggagctaatcaaattattaccagttatagcatcttttattatgatgagaaatgtgaaactaatcatgaaagatattgttagacccgcccataaccgcgggcatgactattcgaatagttttactctgtccagagatgtaccactgtacccacaagacacagccccacaacatgtcaccatgcgcctcaataccaccacagtacctcagaaaggagctgtgacagtacccctcgcacaacacaatccaccacagcacaccgttcctggatcataatcacccccttataaacaaggcatggactccccagcgacccccgtgggcttatctccgccacttctcagtctggtgccccgcaatgaaccatgctatacaaaaggtaaagccgttgcccacgctggcttgtggttggcacggttaatgtttcacaaccgaaactcgtgaaccagtccttaattgtcatgtgcacgaccatcaaaaccatgtgctcacaacccaccattatcaagttttagttggcaaattaattaattaaccaatcacgattgaccatcgtgagctatcattaagccatcattaaataatagtgagtcataagtatcccagttatatggactagtgtttctaagcatggctaagcaattatgtctaacatctagttgaaccaatatatataaagctcaactagtcaaattataatatcccaaggtatcaaggaatcaagtaatcaataacaaaagggctataacaaacaataggttaattccacccaatgacattcgaaaataaatgcaatagttgaatagaaacaatagctttaaacgggatcaacatgctcaaagggttgtttgggatctgtgtgacttgccttgctggccttggaagtcttcaaattcttctcctgcaaaaacggactctccagaaacgtcggaatctaaacagaaaagagcaaaatcaccaaaacagcacacaaacaagcatgaacagtacatgtggatatttttaacatgtagatctcaattttagaaaaatttagagacttgaaccaactaaatccgagctaagatgaattagttatgaatttttaaagattaaatcggattaaaacacttatatggattttaattgaattatgacgcaataatgaattatttttgaaaaggaaaagagaattactgcgtcagcggctagggttcgcggtggacagggtgcacggcggcggctcacggaaacgaacggccgagatcgatccatccaaaacgaacgaccgagatccatcggtctacgaccggtctacaacggacggcaacgatgacgtcggcgatgacgtcatcatcggcggcggctcgggcgtgcatgctcgccggcgaacgacggcgcgacaacgcgaacggaggacaccaacacatagagggcgtcgtggcgaactcaccggtgaccaaaacagcggcagacggtgatcggacgacgtcggcgacgaggaagaagcggcggcgaccttcggcttgacgacgacggcgatgctccggcgatcgacagcgatagcagaggggcggacgaggttggcgacggcttggcgaacccgacggcggctttcccgagcgacgacgacgaccgaagcgacggcggcgcacggctggagcgacggcggcgacggcgacgctaggctgcacggggctagggctctacgggcgacgagaggcgaaggcgagggtggcggcgggtagtggcgggcttgggggtcaatttatagcggctaggaggcggcggcgaaggcccacggcgaccggcgatgcgaaggaaagtctagggttcggaggagagagatcgatccgaatcgaactcgaatccacggatttccaaacgaaattagccgacgattccataagagaaaagatagaggggatcccgaagatcatttcccctctactaatttcatcggaaacggaaaggggcggccggatttggaaggagatggcggtggcgcggtgctagggctcgggcggcgggcggccggaggtagacgacgacctgacaggcgggccccacctgtcagcgtccgagggcgcgcgcacgcggcggctccaggcggactgggccggcttgggctggggagagagagagaaggttttgggccgactttcggcccaaagccaaaagagaacttttaaaaccttttccaatttaaattattcatgaaatgcaattccatttattaaaaatacttccttagctcaaataaatcccagaaaaatctaggaattatagaattaagcaaagtatttaatgaaattttatctggccccattttatattggaatttattaattaaaactagatcttctcttctaggcttttaaaataaattctaataattccaatttagacaacaatttatatattttggatttttagggtgtgacaggacggcggtggcgcctcggggacacgcaggcggcggcggaacggccgacgatggtagggcggcggctcaggacgcgcggcggcggcggtaggactcccggtcggtggcttgccctaaggtacaaatccggtacatctcctctattttcctctatttattttcgattttagttctagactaagaacaaaataggctgattttgcatgtatgttgagggtgattcttctttgtatatgataaggattaacatcgcaacataagccgattgtttcattcataaagggttcattcatctaggggttgatgatcctatttttggatatgaagaatggagatgattgttcattatatgaattgctgccattggtttatgcattcagaatggtatgaatgcttgcaagggaatgcaagcaatgatttgcatatatctgtccaatgcatgttacttctgttggaaaaaaagggaacactttgggtgattttgcatttatatttcatattgtgacaaagtgaatttttttatgcacatacatgagtactgctagcctttgttcagtaaatataaatatttttttatgttagtattgaaaaaagaaaggtgtgattgggtggatggcagggatggctcaaaatgagtcttcaaaaggtgttaagatggcaatggattgtgctgattagaatgaccacaacactagaattgtatgtgagctttttgttgatcaagtagtaagtggtaatcgaccaaattgccatttatcaaatcctaggtacgatgaagtcattgaacaatttgccgcaatagcaagtttgaggtacactaggcttcaaattaagaataaacgggataaacttaaggtcgaatacagctattggaagaaattgagaactcaaacaggactaggatgggacaacacaaggcaaacagtgatggcgactgcagaacgttggaggaaattgaaatcggtaagtattttataataatgtgtaaaattaagaattgttctactaggttttatgttctaactcaattttataatgccatgttatgcaggacaaacccgggtgtgcaaagttcatgaaggctagctagcaaaatgaagagctacttgagaagatgtttgaagacattcgcaatactggtgctgaccattggtctttaggacaaggcaccattccgacaaacaccactcatgcaattcatattgccgatgataatgaaattgatgaggaaactgatgaggatgaatcaactgccaagataaagagggatggtggtggatcaaagatggataaggggaaaagagcaagagtggatcccaaaagatggtacaggagatgtccaagagtaatgaactctcagcacagacattatcatccattcaatcatttgctaggtcgagcgaggatcttctgggttgttccataaaggatgttatggccttggaggaggattgtgggctagttgaagggacaaatgagcacctcattgcaactgagatttttataaataaaaggatcaaagagtgatgtttgtcaattcattgcgcactcctgtaggacatttttcatggcttaagaagaagtacgaagtgaagtatggaaactagttgcatgtggtgttgccatggaatctatccctttgttttaattgtattttttttcatttcagaaaactatctatggtttgatttcagttatgaactattgttggtttgtatcaccttattgtatggggtgtttccaattgtgaacaattattttcagacctatttcatgtaattgtttgcgtatgttcagacttatgttatgcaattttagacctatgttatgcaatttcatacctttgttatgcaatttcagcaagttttcatgaatatcatgttgcataagttgtaatttatgttgcataactttatgtgtagatgtcaagtgatagtgaagatggttcatcggatgaggaatatgattatgatgagtttaccatgcatttgttcgaaactgtagcatccaatctttcttcgactagaaaagctgtagagagttataacacactctacttggaaaaggctccgccaaggacatcacgcctcagtgggatggaatgggtgcaagaaacgttagccacatgaggtgaatgctataagatgcttcgtatgaatgggaacaccttcattgtattacatggtcttttggttacaagcttgaatctactatacatatgcatacaatggaggcacttgcaatttttctatacatacttggtgatggctcatcaaaccaaagagcacaaagccatttcaagcattatggtgagacaatttctaggaagtttgaagaagtattgcttgctgtggtagaattggggcgtgatatcgtgcgcccaaaagatccaaacttccctactacccatgatagaattaggagggatcatcgcatgtggccacatttcaaagattgtattggagctgttgacggtactcatatccttgcagtagttctagatgaagataaggttaggtatattggtaggtctaaattgaccactcaaaatgttatggctaattgtgatcatgacatgagatttacctatgcatctattggacaacctggatcgatgcatgacaccactgtgttatttaatgcactggaaaccgatatagctatcttcccacatcctccccaaggtaattgccacatattatgtcttgtctatttttctatgaagagattctaaattggaatatttctaatgtttgtatatttctaatttttttaatcgtagggaaatattatcttgtcgatgttggatatcccaatcgtccagggtacttggcaccatacaagggacaaagatatcatgtccctgaattttggagaggttcaacaccaactggtgagaagaaaaattcaacttcttacactcgagtttgcgcactattattgagtgatgctttggtgtatggaagatgaagtggcgagttctcctaaatatgcctagctttccgctaccaaagcaaaagatggttgtggcggcaacaatggcattgcatcatttcatttgtgaccatgatgcaccagatatgcattttcataggtttgataggaatccagattatgtgcctaccattcccaagagatttatattattaatgtactaaaaatttgtattatttgctaattatgtcaactattttgtcaattattatttaaccttgtaattttgaagaaattctaaagaaaaaatatacaattatcacttatataccatgaaaacaacaaaaaccacaagggtattattgtcaacctccctcctatcctctcttttaggagttctggagctgacaaagctagccaaacacttttcagctggctccagctcccattgaagttggagtttggagccttaccaaacgggccctcaatcatgagtgcgggagcggctcgggcaggatgcgtggaagcttctgattcggcaagacggtgaggacatggattgatacatccgtttcagcgagaaaaaaaatggatcgatgatgtggcaatcatccggagctattcctttgaggagaaggaaaagcgagtggctgagatggagtttaggctagggattagccctaagggcatttgtgacaatgtcttaggggggtttcaactataaatagagaggtggatgcaagggtgggggtgtcatttttgtaatctttggagatgctctataatagagtttaggtgtgggtttggagtgtgtttgcccgagtggcttttgtgtttgaatttaaatttatgttaaggtgcgtgtttgctcctcattgagcggttgttttgcaacacctatgaataaaatgagttgatgaatttcgtttcatttttgcctctctatttaaattccacaagttaaattccgcttttgtttttgcgatttggatttttcgataacggttttttctttctctctctcacctctcccctagttttggtttttcttctcacctctttcctaggtctggttttctaataacaattttgagaaatcaattttgagaaacacttttgatgagtactttcaatggcaaatcttgaatttcatattcacccctctaaagcaattcttggtgtttcatatgtgcactagtttacaacagaattatgcatatcacacagaaattcagaaacaataagctcttctcttattagatccatttatctattgaaacttaacttttatagcatgattgacatccttaatttcaatttatcgtattcagacatgctaaagatcattttgcctatgcttcctttcgtgatctgaaatttattctcttatagtaaaagatttcttggaaaactatctgcttagattctactatctctgaaatgtatatttgagttgtactattgaaaaacgagtaccatttgttttgacttttaatcacacgtttgcacatgtgtgtaccatagtgtgttttaccattttttagaattaacaatgtaacaattttaattgggaaaatatgttcagcgttctaattaattagcatgtgattgtcatggtttcagttagatattgcatcattcatttgtttggcttgtcctgcttcttcgtcttcgacggcttcctcaccgtgaagaagtaccatatattctctccgtaacccttgtatttctctacaagtaattattcatgcatgtgttgtgcatgcacttatatcaccatggttaattaattatcatatatgtattcaatggttgatcaattgttttacactgttaataaagtgaaataattaaaaaagattggttaccgatcaatttgactggatcgaaactaataatgtcaacctcgttgatgaagtccgtgggtgcctgggcggcctacgttgctcgatctcgccgcggaggtagaagtcaacgagctcctcatccaagaccacgaagtggtggcctggagacaactgcagcttcggcaccagcttgtgtctccgccggcctccattgctcgccggcgctgccaccaccgagcagtcgccgccattgctctccgttttcatctgacgacgacgtagtattttgtgtggtacgctaggaagaaagaaagaaaaaagaaaaaagaaaaaagaggaacgtaggtattgatagatatatcaagacatgatgtaatcatgctcttttctctactatgtttcttaatgcttattctctctataggtgttgcacggcactgtaacagagaaacgttatgttctagtaggaatgcaagtgtagcattagtctgtttaaaaaatcttcattatagatggaatattttcatatatttttagtttcatatatttttagtagctaatattgctagttcttttgttgttgaacatggtacaaatttgtatccttgttctaaaatctgagattgtattaacacttgttttgcaatttgaatcttttgctttaaaattgaaaatctgagagtgctttttttgaaatttgatattgtactagcacttgtttccttgttgattttactgttatcaagttgtcatcgttgattgccaatacagtgtccctgatgccagctgcctcagcaaagtcagagcagtagtcagattacttgtttacattggcttacaaagataggcatgctggttcagagtaaaagtccatgaatcataagatatttttctcccaaaaagagtttacaaggagtacatgaatgaacatccagatagatattttcccctaaaaaaagttggatagttttacatgaacatgaattaactatattttgtccaattgctacaacgcttaaagattttgtcctgaagttaagctaaaactataattcaaaatgagtactgctgggctcaagttctcaacttttcaagttatggatataacctttcccctaggtgattttacttaatttaaattggcaaatgaagtgaatttgtccggttctttttttccgataatggaagctttattaaaactcactcaaatacaccaagatgataccttctaactgagctcagtcacggcctctgtatgaaatgcacacagccacaaaacatgatctaactagaccctcaacacaaaacaaagaaattagtgactatcaagccgtagactagatcgccgcgacgccacccatgttccaaggcaaaaaaaaaaaactcccgtgccacctgttccaaacgacacaataccaccataatagtatcctgaagaccctattgtggaggataggccaggtgcgtagctaccaggtgactaaagcaataacctgcaaaggagaagacaccatcttgttgtcaaaaattacctcgtctctggttagccaaatggaccaacaaagagttgttgcacccatcaaaagtagatttctcatgtccttaggaacacatgtaagccaacgcccaaacatatgattaacattttgaggaggttttaagttataagccatatgaataacggaccaaaccaaacgagtaatatgacattggaagaacaaatgttgtatggtttcgtccttgtgacaaaagcaacatttcgtatgacctttccactttcgcttagctagattattcttggttagaattacgccctgacgtaagtaccaaaggaaaatctttactttgagcggtactttaaccttccaaatacgtctatttatattcgtgatgcctgtatggacaagagctaagcaatgagaattgacttaaaagactccattgggggtgagatcccatcgaaattcatcttgatcctgtgtcaacaccaaatcagctatgcgaggccataaattgtgacaagtggctaattttgctccgattaaatctcgtctccatgaaaagctcggaggattgttttgaaagatttgtgacatagtcgactgtttatgcttagctatgttatagagacaaggatattgatctctcaatgaggtattacccaaccctttatcatcccaaaaccttatttaagagccgtccctaatacgaaaggactcgaacctaagaaaatctagtttagctttcataaggttggcccaaaaatatgagtctcccgcattcaaaaagcctgagataaaggttgcgatcccaaatatttattacgtagcatctgttgccacattccatatgtggtgagtaatttgtatagccttttgctaagcaacgctacattctttacctctaggtcgcgtattccaagccccctttgatctttgggtggacagatgatgtcccatttagcaagctggtatttcttcttatgtccatcccctttccaatagaacatagatcgaaggtagtcaagtttcttacgtaccccgctaggtattgcaagaaaagacatcatatacattgggagactgctaagaactgagttaatcagcgcaagtcaccctcccaacgagacaagttttcctttccagctactcaatttgttttcaaatctttcaaccacttctttccattctgcatttcttaacttcctgtaatggatcgggatgccaagatattggaaagggaaattgccaacctagcaaccaaagagttgattatattgatatctgtaatcaagcgcttagccaaaacaatatagttcgcttttataaaagttgatcttcaaacctgataggtgttcaaaggtcagcaacaccgacttcatattttgagctttatgtaggtcatgattcataaaaagcattatgtcatcggcatattgtagtatggacagtcccccatcaatcaatgtggtatgagaccttctactgcccttgtgttttggccctatttttcaagggtggctaacatgtcagcaataaagttgaataagattggagagagagggtctccttgccgtaggccttttttagtctgaaaaaaggccccacgtcattattgactttgactgccacacttcccccggaaatgaaatattcgatccaagaaatccacttgggcaagaaacctttcatccgtagagtttgtaacaaaaagggccatttgaccttgtcgtaggccttttcaaagccaattttgaatatcaccccattcaacattttcttgtgtagctcatgaactgtttcatgtatgatgatgactccatctaggatatttcacccacgcatgaaggcaatttgagttggattcactacatggtcacccaccgaactaattcggtttatggcgaccttagtgaataatttataattggcattcaacaagcatattggtttatattgttagattcgatttgcttcttcaactttcagaattagagtaatcaccccaaaatttaaaccaaaacttggaagaccgccagaatagaattcattaaataaattaagcaaatcatgcttgatgacttcccaaaaatttttggtaaaattcaacagggaaaccatctgacccaggagctttgttatgctccattgcaaagatcgcttcctttaattcttcctctgagaaaagggcagtaaggaagttattttctacttgtgtaacctgagccatatcttcagttatggtctcatcaagcgaaaacggattttctttggtagtccaaagagtctcttgtagaaattcgtaatgtatgttttcaacgcatcagccccctatttttccttcatcctggtgtagaaagaagatcctcttcttcctatgtttgccattggcaatttgggttaaaatattttgtattattgtctcaaaagagtacatccgagacttttgcgcgttggtaccatttaatctcctcttcatgaagtaggcttgtgagatgatccctcgattgatcaagaagaagtctagatcccaaaggagtctagcctctgcagcgatgtccagagagtcagtggtttgttgaaaatgagcttttttctgtttaaaaatgccattggtatgagcagaccaacctctaagaaatcgacgtaaagcgctcatcttgttattctatctttgaattacattacgacccttgactagtctattccaaacttcgacaacacattcatgaaaatcgtcccacaaaaatcagctgagttccatcttgaactgcttaaggtttccagcgaaagccgcttcctctgtgtcaaggaacataggcatgtgatatgacacccctctatatctagagcatggaccgaaaccagagggtatatggattcccatttctatggaagtgaggatcctttctagcttctcgtatgtcggtataggaagtgagtttgcccaagtgaattgcctgcccgttatagtgatttttgttaagtcaaagatatcaatcacagcattgaagagaaaaggccaacgagcatttgtatcgatcattgttttcttggcactacttctcataatgttgaaatccccctattaaagtgggtagatgattttgttggcatgtacaaattgattccgccaagaaactagatttaaatccatcttgggccggaccatacactgccatcaaaatacatttaaaattatcctccctattgttgatatgaaatttaataaaaaaacccccttcgacaattaaagatagatccaagatagccacattaataccaagaagtataccctccttatcttccttttggtggaaggcaatgccagacaaaatcagcacctccagtgaggcgatctgaatttgtctttgacatttcgtcctttcttgtatcaagcaacgcaacaaagtcgagcttttttttctctaagtatatctgccacataccgaaatttagtcaaatctgaaagacctctgcaattccaaaagatacctatcatgacgaaaccattttggtgtttttttggatttttgggacgagtctttcgctcttttctttttgaagatgatttagattttctagtggaaaccaataagtcacaaattttgttactttggtccacatcctccatatcaatctctgaaatatcctttactaagtgatcgggtagggcaccatcaatatcgtcgccctcgtcatcacttgacataaaaggatccatctccgacacaaaagtattggtctggttattttcattagatttggttcctactttagatctatctacctcaatatgtttcaaggcattaagcgagaaagaaataggaaaattagagttacccaaagtaactcctaaagatctaaagttggaaacaacattatcaagaggtagagatgaaaatggctgtggaggggtagtagcagtaccttgatgaaggatgcattacgggcatagttatcaagaccagaccggaccggcatcggttcaggaaggcatgtctcgtagtgatagagacaatgctaactgcctaagtgcagtcagtatttgctaactaatcacatgtctgtgatttggtttttaacctcttgtgtctgtaatccatggatccaaggagtttgccttcactgttaatcactagcacgggatagctcatctgtaatgggtgggaagcctcatctgtgtcggcgaggggtacacacgaaccaaaagtcacttatgtgaaaagtcatctgtgttgggtcggccgccgtcacagatgacaatcatctttatcgataaaagacggtcacggatgactctcataagtgacggttcataagtacgagaattacaatttttgaattttaaatatataaaaaccctaaaaaatatattttaaatattactagcatattctaaatggtatatgcatacatgtcatatatgagatttgaacataagacttctcaacacatgcaaaccaatcttaccatctcacctacagaccacatgttgattggtaatcagatgttattcttttaactattgtccaaatatgaaacacaaatttgaaactctagatgactttaaataataatgctttcaagtacaaagttgcagatctcatcgagctctagaactttagtgtagggtatatctccattcaaggtcgtttgaaaaattcaaaaaatatttttgaaatatatcacatcacctgtaacacttattcggagatgaaaacaactttaaatgaaaatattgtcaattagaaagttgtacatctcatcgaaccctttgactttgatatagactatgtctccatctgagatcatttgaaaaattcaaaattacgtatttcaaaatagctatcaccacttataaggcatattcagacatgtaaactatctcaaatttaaatattattagttttaaggtcataaggtatgtctctatttaaggttgtttgaaaatttcaaacatttgaatttttcctcatacgtgatggttcgtgattgtcactcttcatggataatgctatccgtgaagggtgttaattaagtcccgtcacggatgagtgctctcatctttgatgggttatctcattacacctgtcacggatgacatgttatccatgacggggaatggttgtgacctgttatgttataggtcatatgcgatgtgttagaactacgagtctacgatctgacaaagatgactttaaattggtgatggggcatggtttgtgactcgttataggtcatccgtgacgtgttagaactacgaccccacaaagatgacatatcggtgacggaccatccccgatagtcatatcttaaacatgatacttttttaaaccgttagagatgagtcatccgaaaaaggttgcattagctcgacacatatgaatcgtcaaggatggccggacttatactagtgaattatcatgtgctaatttgatcacacagaaaatatgcgttgcaacagaaacaaccacaaacagccgtccagcgtggtcagggaaggaagacaatatgtcggctcaactgcacgcagccgccccgctggtatctctacgcaaagcatagctctgtttagatttcaacttttatatcacattgaacttttctacacatacaaactttcaactttttcgtcacatagttcaatttttttaaacttttaattttagtgtggaactatagacagcccattctgttgttccagacgcgccgccgcaagaacctttccaagtgccgacgtcgcaataccgcgcgtctctgcctcgagcaacgctagtgcgctatcacgcattatatctcaagggaacccaaatgaacttattccccctatcactggtccggcccatcgacaaacggcccaggcccaactgaaatgcattttatttatttcatttattttttcttttcctccttgtcccctctcgttagggtttcccctttcgcccccgccaccgcggcaaaaaaaaaaaattttggaagcctcgacgagcgggacaacgccccgcgcttttcccccacttctccttcccctccacctcgtcgccggcggcggcggcggctgcggcggtggagagcgagatggctccggcgatcgggtcgcggcggctcacggtgctgcgggagttccgcccgcacgggctcgcggccgaggaggccgacggcgagggcggccccggggagcggccgccgcaggactacgactacttcctcttcgacccggccctcgccgcctccccggccccggagcccggggaggaggccgcctcctcctcctccggcgccgacggcgaccacgagctcttcatccgtgggaatcggtgcgcacgacatcgcctccgctctacagtgactgtatattgttggtggggattgggagttgggggcatgattaagctttgtcatcccgtcgaaatgggggaaatgggcagaattgactttattgctctgtgatcgcagcgaaatgtagcaacaactatgcattaagaatctttgaatttcattgttcgatttccacctctaagtcatttgtatctctacgtccgggagaggcatatggttttgcagactcacactaagggtgtgtttggataatggaaaatgtggagtggaattgggattgggaaatgaatgaagggttagaattaaatggaagagggagaatgaatggttaagatttaaagatgtcttttagtggatgggaaatgatttccctatcccattagccaaacagggcctaagtaatgcaacttcatttttaatttactagaacttgtagtatgcttatgtgtccccaatgcatttctgcgtattggcttctatattttatatgctgctatttgttctagtggtcaaagagcaaagatgtgagcgcaatagggcattttaccttcagcgtgcagataagcacaatgcatttccaggtcaatgtcgtactctggaatgctcctccgtagtcaccctaggaggcatgcacatatttaaaactttcactttaatattcacatagacatttagagtcaccaaatttagtgatattattagattcgtcatcatgcatatttccatatcaatacatttaatctctttagctaagcatggtcaaagcctcaaaggcatctatggcagactagatgctagcagaaagaaattggttaggtggatttttgtttctattgatatctgaaaaatgtggcatgaacttgtgtgtttaattgattgatcgatctgttttaaatttaaagggatggaagttgagttcatttatttcttttttatgataatttatttcatttttttatgccaaagtttgatttgcatgtttccagtgaattagatgaaaacacataatataggttgggtgaagtgggaaatttctttttgatgataatttatttcatttctttcatgccaaagtttgacctgcatgtttgcagtgatttagatgaaaacacaccaatataagttgggtgaagcgggaacacactagttgtgtggtggttaggcaccgagttgtggtgctacccgcccagggcttgaatcctgggttgtgcaaaacaaaggttgacctcgctgagtaaaaggctttcagaattaaatgcgactgtgtcctgggcctccagcatccagcatgtttttcgacttacagtggaaatgctctggggatgcctccccatagagtcgagttttttttttaatatataagttggatatgaagttatatatcttgttgatggtactatattttgtgcttaactacttgaattttgtagttcaattgattctttcatttggtaaatgttgatttcttgtatcatcagtatgatatgttcatgttttccctatcttgcaggataatatggagtgccggctcacgtgtccacaaaagatacctctcaccaaatacagtcataatggtattttgactattttgttttgcttgtttaacaagtaactatcttcccttatctttttctttttcatataattgctcataaaattagaactgtgactgctgatttctctgtgctcgatgtgtttcctcctctgagtacttaatctgatcttttttgtttctgtacagacatgtttctttattctcctgcacctctaaattgttttcaatgtttttactagagctgaaaattgctccttcaatgcttcaactatctactctgtacacattttagttgtacagtactaggttgttgatctttccggagaacaaaatgagcatgttgacatgaagcaatacgatccttttttagcttacagtgcattttcttttcatttagcagcatgcttctgattactaaaaatctacaatgggtgctcatttgctgatgttgaactgaactgtaggcctgctggtgtaggatggacaaaactcgtgacgcacttctatgtgttctgcaggtcgatactttatctatatacaatgtaaatggtgagtttaccctcttactatatagtgtagtgccaaatgatcgctgaaatattatcccttaattttctcatgcacatgatttaaattgcaggcgaggttgccagtattccactaccatatgctgtttcatcaatatggcctcttccttctggccttctacttcagaaatctactgatggaggccatatggtattatcctcaacttcactgctaaaatcgagggatttaattcgtcctaacaaggaatttggattgaattacaatgtttcatcccaagtcaatactttggagactgtcagtaaagctgatggggctattttttcgtctcacctcatcttgaaacatccacttgaagagcctcaggtatatttgtgctgcatccacttgaagggcctcagatatatatatgtactactccctccgtttcacactataagacgttttggcctctccatttctcatctggattcagtaacatccataggaattcagacacatatatgaatgaagcacatacatcgatccatgcatgaatttattcaaaacccaaaacattttgtaatgtgaaacagaggaagtgtatgtttttgaccatgatgcaagtttttgagatgaatttgccttctcttccttcaaatttggtagattacaaatgcattgatttctccatggtggcatgttttccttttactattactgagtgccaaaacagaaaggtgcacatattttgcttattttactgcttttgtgatttttataaggtgtcctcacatttttagatctaaagtttgaagttgtcaccaacatagccagcaatacttctgtgagaaaaatatgctgctatattgattttgaaagtgcacttgtatttgcaactattatcttgtggtcatgattttgtagttgtagggaatatcagtggaaatatgctatctctatctgtattccatgcattgttcactggacattttatgaatatataagaagtctgattgatttctttatccattttgttggttgcatcatgaccaaatatttttaggcaacatattttgaagaatggggcaggttggatatgatgaaagattttgatgaaaaaactatatggacaagtgatatagtacctctaatggcatcatatcacaaaggtactattttttcaattttttgatctttacatttcccattattttgtggcttgaaatgaaaattgatttttcatgtggcaggaaaatttcagcactctgtttggcaaattgatggtacaacttaccaggaagaaatcaatgacaatgcagtgcccccaattccatgtgatatttctatgcataagtttgcattccgtaagatatggcaggggaaatgctcccaatctgctgctagtaaggtttgctccattccaacttcatgaaaagagctcttttttctgtcatattttccattttccatctatggccatatctttcaatgttgtattgcttgttttctgattgattcattagacaaagtaacacgttttttgtgctgttaagatcaacacaaaagaagaggttgttttgaaatgatattcattatgtaatgtaacataataagaaaaatggggcatggatagattatggccacaaccgatatatacttctcatttctttgttgcagggtctctgtttgtagctttgaatagatgaattctaggtacaataggacaatggtgatcctttccccctctcttctgcaattgtcaaatgtgctccgtgccagttgaaggactttaccaaatgggcattagtgaagctttactttttttttttgtagggagtgttcatgatgacttagaggccttccatgagcctgacgctagtgtacccctatgaaatttgcgtaataagataatcaaactccgtttaaacataatttatatctgtctctgttgtttcccttttttgtatgggattgtttccctttacttgttcatactttgcaattattttaccaccatcattttctttgatatgttttggaaatgactccaatttcctaccaggttttcttggcaactgacatcgatggtacaccaataatttgttttttacttcatgagcaaaaaatattgcttgctgtgagatttcaagttgacgagaataatggagaatcctttggagatattaaacctcacatgagctggaacattcctgcattagctgctgcaccagttgtcgtaactcgcccaaggtggtttgccttagcacatggttctgaatcctcaaggaactatttttaatgctgctatttgtatcttgcagagcatgggctggagtccttccctttacggacatcctcattctaactcctgacaatgatctacttctttatgtatgttcactgtggtcatgctgcaggcatacgttctttcatcatgctcatatgcttatgaagtcatgttccttctgctcctttacattttgatcctaaataatgccctagcagctgcctttctttttgtgtacatgacctttagttcattcatgtgacaaatctggttctccattgctttagtagtcataatagcagctgcgcttttctgttgtatatgattaaattctagtttcagtttaatattagggtgtttgttgcagttcgcaccaggtttaagcaaagtgttaaatttgcaccatgtattttggtataatgcttcacttagtagcatgtttttagcttgcccccttccatctgggcttcttttgctgacatggcgcaacaagcagccaccttaccttagacctgatctagaaaagctgtgtgcatcatgtgccatgtaatttgcaatcatgtcaggacacagaattagtaagtttcatggacaaacaaagaattaaagcatgaatccatcacaatgggtaagtttcacggcaaaataagttaactaaatatccagtgccatttgttgaataaacagcgtgacctccggatgtatcatagcatcactgcggattatagaaaaatacagatgaatgacactacttcacacatccatatttcacaccacataggcaacagataataaatcatggtttatttagtgtctgaaccgtgattgcaatttacccggtgcaatatgctcaggtatgcttctctagataaggttagcaaggtggatgtttgtttgtccttgtcagcaaacagaagggggcaaaaggcggccaaagtgcaacaatattctaaacatggtgcaaaccatagacttttcttaaacatggtgcaagctgcaagaagcaccctaagtcctggttcaaactgtaattcttgctcttcttttatttgtcaagtgcagtctggaaagcagtgcctctgcagatatactcttcctactgaattggggaagggtatattttcaaattatgagctaaattctggggttacagagttttactctgatatggagatcacaagcataacggatgctgttgaaggtcgtataaatgtgacatgcagcaatggtctggtaggttgacatatattgctttagtatacttgtggttacttagaatggtgtgaattcctggctgtattttggttgtgtttttctaagtttttttttgttgtgttgatttttggttatttctatatgtttgggttcattaaaaaattggggatagtctttctgttggtagcaatttgctggcttatttgtcaagtctttaggtgtgacgtgttagaactcagaagttcatactgatgtgcttctttatgcaatgtagaaaaactgatgctatggatttggtgttatacttatatattttatgattttatccatgatggctatgttgtttgccattcagtaaaggttgttgacttcaactgtcttcatattcttttctttgttaacacaacatttatgcggaggaaggcaatggttgatgccattttagtttataatctgcatcaagttactgaagtgaccatagtggatatacctctaaacctcccttgcagtttctttcgtttgcgcaagtgacacagttatctcttaaattcggttgttaatttttattaattatgttttaaccctaaagacttctcaaggggccatataatgttgggcatgctagcagcggcacagtttcttgggcatttgtttgatttattgctagcttaccacagttgtaaggatgcaattggctagtgcactatcccacataaaacctgcatattagttcatttttcatccaccagttcaaaaatatatttataaatataactacaattatgattgagtgggtttgaaatcctgcaagactgccccctatgcagctctggcttgccacttattttagccaaaatggcttcatatgtcagactcaatttcttgcccaaccttccctaacttgtggccatcattttattggccacaccctttgtggcaaaccccatctagactaagatcgagttatcacaaggttagacatggaccaatgctattactaaaattcttatcgttctgacttcctagcatatgctgcgtctggtttcaccttcactgacatgagcctttcttctaatcgccgagagtcacattttgatgttccaatttcattattgtttatttactgttggtgctacaatgtcaatgcccataataacttgcctacttgaactgttcaagaagtatcagtggggctacctgtcactaatgcagaagggggctaatctatacaaaatatgattgttcttacaaactattctcctttccacgttcttatctcttatgtggctttgatgttaaagctcattttatctccaactggataatgccttgacttttacggttttacctttcagttgatcttatggaacatttttacatattttgctctctccagatgctccgatgttcattacgcaagagcccttcctcttctctggttggtgactgcataaccgcaatggcagagggcttgcagagctgcttttacagtcattttgtttctcttctctggggtgatagtgatgctgcttacctttgttcgagctctcatgtggattcagaatgggaatcatttagttatgaagtagaaaagatttgtgcaaaatatggacagatttcaccagctaaatcatccgaatcgccttgcacagcttgggactttctgatcaacagcaagcaccacgccaagtacggcaaacaatcccgaacctctttgcctatgtcatataatacaagcagcatgagtttccactctttcccccaagacggaaatagtgcagatgtttcattttatattcggtttataagtgaaactttggacacattgcatgccctatatgagaacctgaagctgaatattttgaggaaacagtaagcgcttcctattctttttgtctaaatgttttgtttgttgatattgattatctaagtgtgatcatgttgatgtttgtttattattactatacaactcctgtgaccttaaatgtttggtacacgtttttgtttatatttcataccatgtattgcattcttgtaagcttgtggtccaaatttacatagaatataatttttggatcccaataattgtgtaatttggcaaaacaattagttttcttctcttgatggtgaagagaactcaggggagccttgcctccagaggtgtgggtgttatgtgatagagccacagatatttacaacatacatgctgctaatcagtggacatctaagttcttgaaaggttggttcctctaccaactggtaatgaagagcttagagttccgcaatacggcagtagtacgagcacttgctttttctctaggggtggagcaactagttaatgggatattgactaatgggactatatttttcttttagcatattcagtggtagaatctatgtttcagtgtcagcaagaaggcatttcaaccatcaataagtttggtgttcgtgattatattttctgatcctatgcataaaaaattgcatatatcagcaagttactgctgcttttctagatctacaacataagattgatgtgatcttgaatgggttgagatgtctttcgattatatatatcagcacattgttgttaccatgtatatggcaaactgtcttgatccattttaaactatcttggctttgtggtttccttttcagggatctagctagtcttgcttccttgttatgtagagttgcttcgtcccttggtgaaaacagttatgtagattactattgccgagactttcctgacaacttggttgaattccattccctatcatctgctactgccttaagagctccaccatgcttatttcgttggcttgaaaactgtctccgtcatggctgtgatttgaagacttcagatgatattcctgctctaatgtgcaaggaaaaaagttctgctgtgagctggggcagaaaagtggtgtcattttatagtttgttattaggagcagaaaggattggaaaaaatctctcttctggtgtctactgtgaagtagccagtggttcagccagaaacaccgaggaacttactgttctcactatggttgctgagaagtttgggcgccaacaattggatttattaccaattggagtatctcttgtgcttcgccatgtctgtccagtatcattgctgtttgttataagctggtactgaatttttcttaagatatcattttatattacaggcactggacaaatgccgtgagtctcctccagatgactggcctgcacctgcttatgttcttgttgggagggatgatctagctatggcaaggatggggtcaggaaggagagaaaatgggttttggaacaatgataatctgacatcaatatcagtcccatatatgctacatttgcaacctgtaactgtactgacgactgcattggatgtccctccatcagaaattttgaattccgaggatactgattctgtttacagatctgtagaagatggaatggaacacatcttcacctcaacaacacaactgcgatatggtcgtgatttacgtctgaatgaggtttgtcttggtattttgttgttttggtctacagttgtcttttgagttgttgtatttaaattgtagtattatctactgaagtccaattcttacttcaagtgattgtccctacagctgcatatctttcactcctttaagttctatataagttgctgagcccacatggagatattacaactatactgaaattgaaacttaagataaattgcagaaaacttcaactgttttgtccaaactataaatttgcagcaactttaccaagcatttgggataactacaacagtagcacatgattttatcataaaagaacatttcgtttagcatgggacatctgacaggtcaggtccatctgtcatacacacagggccagcttgcgcatggcatggtgtatggtacactgtaacagcatgagcattgtatttgtgtatgacatgcaagcttgttgtatcagattgtcctgttgctaacggcagtgcctatgagatacagtttctgacaaaaatcgtgtgctattgtggtagttttctgatgtcccacgatagttgtagaaaaaaataagttttgatatataaagttgtaggtgcaagtgcaaatagtttcatgaacatagctattgaccactgtaattccgtgactgtaaatgacctgtcgtttttgtcaaggagttaaatacatatctatccttgacacatccacaacaggacaatcacttagcttgcataagatataccggtctttttcaaccttatattgtcattgtccgtcaacttggcttgatagtgtttattctaatattctttatatattgcttcttattctatcatattgttttaactaggttagacgcctcttatgctcagcaagacctgtggcaatacagacacccaataatcctagtgtgtctgatcaggatctacaacaggttctcttcatgctatttgattgcaattactgactacatatagtaaattatcgtttcacctaacaactacatttattatcacattatattattgtttctgcttaaattcgaattacaagaccatgctcccattgtcactgtgaccttcctccatatgctgtgcatttccgctctgtggatctttcatttctttatgatatgtcatttcagttttcttaagtatttatatattcaaaatactggtaaaaaccattttttgtcagggtactaattcagttcttatcgtgatctcaacagttatgagtaaccttgtcccaacttatttcttgtattttcagcaacaactatggaactttgcacaaagaacaacagctttaccttttgggcgtggggcttttactttagctacaacttacacactgttaacagaggtatgacttcacagtcattataaccggatggttatggttgcatcttatccagtattttactaccttggccagttgatgttctctatgtcatcttgttatggggccattttcttttgctgcaggctctggttttcccaaagcttgttttggctggtcggttgcctgcacaacagaatgcaacagtaatgttacctcttatgtaactcaaattttatctgttttctggtagacttgcattctgaagaaatcaactgttcacgtcgccatgtagcattaatactgtgatataattgcaatatcactgcctatgtcatgcgtggaacggggcctcccctattcatgacagaaaaacaacatatctggtactgctgcatatgccagtcttagagatagcaacccatattagttaatgatatgaagctacctgtgatatttcagggttggttggacgctctttttagtccttttgattggctactcatgtcagctgtactctatttaaccagtttattaacaaagcaacagaagctaagcctattcaccaacccccacatccaactgcatttcttcccatgtacagcagggaagggcgataaatatcatgttgccactgctaccaccttcgatctatctcacctcataacatgaacgctgcgctgcccctgaatttttacaacatcttttcatcgtagatccttggttgtaactttctttaccctattacactattttatataggttaatcttgacctaagtactagaagcgtctcagaattcaaatcttgggctgagtttcacaatggtgtcgctgctgggctcaggcttgctccttttcaggtaaactggactatcacaaaacagataaaccatattacccagcagtagcaaaagctgcaaagttcacaactcttggcaaatgctttgccaccttttactctgtatttccttctacttgtgaatgtgtaacagtcatgttctatttgcaggagaaaatgttaagaacctggatacaatataatagaccttctgaaccaaattttactcatgctggtctgcttcttgcatttggtttgcatgaacatctacgagttttaactatgaccgacgcttaccgatatctctcccaggtggccttttgtcctttggttccattactaaagaaaataactggcttcactaattttgtgttcaagtattcattgttatatctaaatcgttctgtaccactttgcacctcagtcaccactcagcactttgtcctccttttgattacttccgtactcaaaatggtaggagaaaatggggttgtgatgtcattatttgtttattggtatggtataacctttttattactttaccgcaggagcatgatataactagacttggtttgctacttggtttggctgcatctaatagggggacaatgcacccggcaatttcaaaggtacgcaatcctccttttgcattgtacctgtacaattattacgtctcaaaagtatattgctgtcaaattggtaagctttgtccatctaataagatgtatggtgacttcctgactgattctttattagacaagtcttcctttcagatttatgtattgttctttttttcttttcaaagtagtggattccatctgttataggaatgcatagtgaattgtatacatgacctctgccagcaatggttttccctccttatctacatccaatgctcattggacatatatagcagataatcttcaaaaaccccttttcaacagaaccaaatacatttttttaacagaaaaaaaccaaataaataactcctaattctctcagaacttgctattagaagtgatgaggttaaaaccacctgcttgtcctgctgtttttttttttttattttccttctgaaggcacaattactttagtcattcagtgtttccttaggttgtcgaaaaaatcaggtttattgtggtattgtttctgtttggtcactttgaatggggatgtgctgctttgttgactgccaaattgatttttactgcttttggcttgattgcaatttttcagatgctctattttcatgtcccttcccggcatccatcttctacgccagagttggaattacctactcttctgcaggtagcatttgcgattagctaatgacttactgtgtttttcatttatttttatggattctcagcatgtgatccttgagttaacaggtcttacattcacatgttgtatactgttgcgtgttgtaaatatttgatagtgaaatggatcctagaccaggcaattatttgtaaatattatgtttgggtggagcacagtcttaatttaactcttatatgaacatttctagtaagatatgatttttgtttcagtaggttttggtcctttgtgggtttcgccgaaggggtaaaaaatttgagaatttgtttggttattgacagatgagatgaaaaatatttttaaccaagtactaaaatctcattgtgcagtttgtttataatgcatgctctttacctagtgctgttctaagaacagagataatgtggttcctagtaggtttatatcgttactagttttagcaaatgcaattttgaaatttcgacttacgatgctcaactagggatttttctgcatttgacaagcaaaggctttatgggccaaaatctggaaaatataaagtgatgcttagcatttgatttgttggctttagttttggttcaatattagaataggttgtatttaatgtgggtatgactagtgttaacctttgaactgtactccctccatactcataaaggaagtcgtttaggacaatgtttaagtcaaaccttgggaatataaatcatgattaactctcaagttgttgagtttgaaaatataaaatttatatgaatagatttgtcttgaaaaatactttcataaaagtatacatatatcacttttcaataaatattttttatagaaaaaagaagttaaagttgtgttttggagaccgtgtcgctgtcctaaacgacttcctttacgagtacggagggagtacaccagagttagaatgaatcaagataatcttctattgtgggtttctgccttttataatttattctttgccatcttgttgtcatgtagtctgtaatagcaatttcttatccctgtcacctgctattgagtgattgatcattcatgattataagcttttacctaatatttttttgttgtaattttttatcaatcgggtaagctacattccctgcaatttatgccttcttgcaggaaatattatccatctgctcttaaaattttcatattttctattcttccagtcagcagcagtgatgggaattggacttctctatgaagggtcagcacatgcattaaccatgaaaattcttctggtactttcttggccgtgctatatgattgggattcctttcactttctgttagttttcttttagcaaaggatcacttcatttcagttgtccatgacactaatgttgagagggtaagggaaaggacattagctacccacaaatatcaattgttcatcacattttgtctgcaagagttatatacacacacaagacagtcatgagtgccccattggccaatcctagactatggggtaaagccatagtatactataaacatatctacacttaatcttttcctttggcattcaatattctatcagttcgccagagcagaaatactaaatatgttccttttttttaatctcctgttggagttggatattttgccctcacagcggtttcatatctacaatttttttggtttgtttgtggctcagagggagatctgacactgacctatccgagtggattgtagaatggctttaggtgaacgagggcacaaactggcaaggaaatagatctagagtagctggttaagaaaatgatctgcagaactgtagggactatgagacagtgttattcatccttttgctttacttaataaatctgctgtccacttaaatagaatcatggatgtaacaaaccaatctaaaagacactaagggtacaaagaaggatataattgaaccaaactaaagataaggaaataattgaactaaactgaatccgaagcaaagtctaccagcttcttgggctatattgatgtggcattgtgcacatgataatatatgaaccaatttggactaggtcatatttttttttccttttcctaatgttgtttctttttacttatcttgtgctcattacattcagggtgagattggccgaagaagtggtggtgataatgtgctagaaagagaaggctatgctgttgctgcaggctctgcattaggacttgttgcattaggtgaatttcgtttgacagattcatgttgcatatcttaagctggcacttcagcacaaaaataaccgaagcttttgttgaaggtcgtggaagcaatgctttcggattcatggacactttcctggaccggctttttgaatacattggcagtaaagaagtctaccatgtaagatcttattagccctttatccttatttatctaatgctgagtgctgccctaagatggttggttcttaatgcgtatttgttcaaagcatgtcatgacttgtgagttttgatagtacggaaagaatggagataacaactatgctcaatgggatgacaagggttctgtgcatcttgtcacctttggcagagtggtgagaagatagatagattgtgttttttttttcttgattgcaagttttcaaccataagccaggagcccaggagtagaactactttaatagagccagccctaatacaaactaagatgaaggcttctctttaagcctggatggcgtctatggcttgctgtgccaattcacgccatccagtgtatctcccccctctcctacacacagtgtatctcctcccactatggtactggtgcatactacatggtccaggagacaaggactttgtacccccattacttctacctctgtttgataccttttgctttatattatggcattctcatcttgtgaagcaattcagttttgctaatggttttataaattattgttaatattatcaggaaaaacacttaaatgcagcaatagctgctgatgagcaaagtggcaacaccggacaggtactcactctttgcagtcatggcacatccataaattacatgtgaaccatatatttcatttctgttactatcttgtttgtacagatgatggaaggagcacaaataaatgttgatgttactgcacctggagcaataattgctctagccttgatatttctgaaagtaacatcacttagtcctttgtatcctttttaaatcctctagaaacagtctacattttagaaaagattcttagggttttgcctaactaatgcccattttacaggcagagtcagaagaaattgcagctagactcagtgttcccaatagtcactttgatctgcagtatgtgagacctgattttgtaatgcttcgcattgtagcacggaatttaatattgtggaacaggtaatcttgcaatttcaatctgaaatcttagtgtggctttgtgataaatcatcaacggacttccagtaaactggcataaagctaagtattgtttttatttcgtagaatacaacctaccaaagattgggttgagtctcaagttccttcatttgtcaactttggtgtttccaatacgagtcaagaggctatggacagtgatgaattggatagcgaagctctgtttcaagcttatgttaatattgtcactggagcatgcattgcacttggtgagaaatcaacatttgttctgtaaatccctttcttcaccctatccctgccagtattactatactgcttgctatatgtgatctgggagtctggaaatagcatttatatgtgttgactttgtcccacgtctgcttgtataagtgggtgaatgattatctgatgattctgagtaaatctgagagcaggattgaactagggacaccttttctctgaaatacatgttgccctttttcacttatccattgaccagtgcttgtctaattagtctaaccatacctacagataggctaaccctcttaaccttcattttcccctctggaattgttgagcttttcttttgcttaaaagttgactttaaagctgtccctcttcactgttttggacgggtggatcaacatcgagtacttctttcagttgagaagagatatctattggcttacgttaactcctagggaaggaaacacagaagctatagcctattatatagctcaactctctcccttcctgaatttgcagcaaagcttctctatctgtcattaaaggcatggcctgttgctgcagtatgccatctcctttgccgaactatctattatttattgattatgggttcattaaacaccatcctggttactgccttcgtacttctggtggcactgcatttcattgatagaacttacttaaatttgcaaatgcacaagactattggtgttggttaaccagtagaaatggcattaaatattcttatgaacctagcaaatttttctgccatttacagcagttatcaataatttcaggtctcaaatatgctggcagtagaaatagtgatgcccaagaactactctacgcttatgccgtccattttctcaatgaggtaccgacatacatgcctatccaatgttgttcctatattggattctgataatattgttaatatttcttatgcagatcaaacacatatctattcagactgcaagcatattgccaaagggattgttgcagcatgttgatcgtggaactcttgagctctgcttgcatcttattgttctctctctatcactggttagttagaatgcatatttctctgttttatgtataacaggtacaacattcttgttgtatttcaagcttttcatgaagtcttttagctttacatatcttaaatatgggtgatcattataataaaatcaattttctcgactttgtttttgtaatttgtgtttcttttttgttaggtaatggcaggatctggacatttacaaactttccgcttactgcgttatctgaggggaagaagttctgcagaaggacaagtaaattatggactgcagatggctgtgagtattattactgtcatgaacaactgtgttctctttaaattcaaaaccagatgaggactgattatttcattgccctttttagaagtctaatggggcaactttttttgaattattcctgccaaaagaccctccagattcctgtaactaacctgggactatttcaaccggttcattctgtaaatagcatctttttatgtttatatttgacctgatgttcatataggaatcctggatagtttagtgagagcttgtctggtttatatgcccaagtttgcaaactgtactcagatcttagttaccatatggttaattcatcactgcatgaagttcaaatataaatctgccaatcgcagtctgttaacattctgatagcttattttgtgagaacactgagcaatctggacagatagctccggcaggtcatttacgatgtgtaggtctatctgtgcatttacctgtcttgtctacaatgcaggtaagcttggctataggattcttattccttggaggtggtacacacacattctcaacttcaaatagtgcagttgccgcattactcatcaccctttacccacgtttgcctactggaccaaatgataatcgctgtcatctccaggtggttttcctataattctgagttctacacttttcactattccctccattctgagttctatatgtcgttttgactttggttaaagtcaaactgctccaagtttgaccaagtttgtagaaaaaagtagtaacattttcaacacaagacaaatatattatgaaaatatattcaattattgatttaataaaactaatttggtgttgtaaatattattatatttgtctacaaacttagtcaaacttggagttgtttgactttgaccaaattcaaaacgatttataatctgaaatggagggagtatattggtagcttcccttgttgtaaacaactaatgttctttgtatggtactgtaaataggcattcaggcatctgtatgtaatagctacagaacctcgatggattcagacagtagatgttgacacaggacttccggtgtattgtcctcttgaagtgacagttgctgaaacggagtattatgacgagactaattactgtgaagtgacaccttgtcttctgccagagcgctcagtggtatgtggactctaacaacatttgtttgttgcaaaaaattatgctgaaaacgatataaagctttcagacaagtaaacacatctttaacatgtcagatgacactaaattacagcaaatttactgatctatctacaaattattttccaactgtgaacaagatagcattactattttcggtttaccattaacttataaacttatgaatagaagttaatggaaaaccaaaaaatagtaatgctatcttttaaagggcaaacatcaagtgcaaaacctattatgtgtgcacttgtgtggatgccctcaggatgcaaaaaagtctgaaattattggtgtcgctctgttagagaaatgacattaatgactgtgcagacttgatatcaaatatgatattgtttgggatacacaagaaaatccaaaagttatggtttacactgttcaacatcattccttttagatactccatctgccccaaaacaacttcatttttcacaatcttatttgtttcaaaataacttcatccttcaagcgatcattgcgttggagtttgtaaaagtagaggacaaaagcattaggactggataaagtggggagcaattgcatggggatttgataaagtggagggcattctagtctttttggttctatattggtatgtgaggatgggtaaaaagtgatgttattttgggacagaggtagtagatatttctctcacttagttcaaacacaatcagctttggtcatggaaatcaagatcatacagtatctcttctcttcatctataaatgtttttggaattttgggaattgtatggaaagttcatgcaggtttacacccagactgggtttctctccaatgaattgcacaatctgaaaaggctatttctgttgcagctgaagaacattcgagtttgtggacccagatattggtctcaggtgattacacttacacctgaaggtatgcaactcttctaaatatttcatgtttcttcagaaaacatatgtattcttatattttctctctttaatagataagccatggtggaaatctggagacaggactgacccattcaatggtggagtactctatataaaacggaaagttggatcttgttcctactcagatgatccaattggatgccaatctttgctttctcgagcaatgcatgaggttatattgttttcttgctcttctgacaaaagactatgtgtctaatatttctctattggcatgtagtttgactgttttgtatcaatctttaggtttgtgatacaccatccacgagctgcagtaatcaggcaaacagtgctactcgtagttcacttagagtcgatcagttagtaagcacattttctgctaatccaagcttgatagcttttgcaaaactgtgttgtcagtcatggaaggacaggcaagtgatatttttgatgttttctttgtttgattgttactttatatatgcagtaatcactacgacctatttggtgcatcagtgtctggcttgctttctaatgtttagttatcaatgtccaaatgcaggcgcaatggcagttttgaagagttctgctctcaaatactttatgaatgtatgagcaaggataggccagcactattgcaggtttcttactgaatttttgttcacattttgttaaatctccagtgcccatgaattatcatgtatttagtcatcattatctcttttccaggtgtatataagtttttacacaataattgagacaatgtgggagcatctaaagattggacattttcctttctctgattctcttttcctttccagcttgaaggttagtacttgcttttaagttctccagatctgcgatgttctctttgttactagtttgggttactcacagagcttctggaaagatggttccagcaaaattcctagtcccacctcaagaaattgactagtttctattttttctctttattatgctgtttctcttcttcttattgtactttgtcttttttaggattctgttttgccagcttctttgttgaagatatctttatctattagatcaattttcacatactttacctcgtttcgacaaaaaaaaattaaattgttctgtatcccagatttgctaggaactggctgttgtgctgagatttgaaactaatattttttgctgtgctatgatacacttcttggccatataccatagcagcttcacatacatcttctgctctgatgtgttgtacctttatttccttcttatagattagaaaatgaacaacatttggtaatgatattatgatctttctttgaacgtgcaggttgcatcagcctataatgaagcactgattgatggtagaattacaactggaggcattattcagtccacatttttggaatcacttatgaagcgcatagagtacatcttcgcagaattgccgaacctgcatgacagcttcatcaattacctgaacaaaggcaaatggcctgatgcacaaaacgaagcagtgctcctttcttggtatctccagtggtacagcatcccacctccccatattgtgtcatccgcaattgaaaaggtgaagcccagaactcggaccagcttgtccatgctcccgcttcttcggctcctgctgccaaccacacatctcgtggggctcatggagattgagaagcttcacatgactcatggtcacgagggcttgaccttgcactgaaaatgcaagaaacgtttagcaacgagtgagccgattgtgactggactgaatagtatcagggctcattgttcttatctactagtaaggatcatacctaagtgctggaatgccaaggctttgtgtggaggcctcaatcatgtgatcctaccttgcaatgctcatattgccatctgatattgtaccctatgatcctgttgcatttagatgtaagtgtccattttggctttagaataggaatgaccgaatgagtgagcctagtttgagcctttgataactgctacatttgggctcaatgcaacatgggttcccagtgtatgccgaccggtttcaataaactggtggttacgaattgagctataatagagcacattttgtttctcaggctagtgattctattatatcatttcgttttttataattataacctatttaatgagacttttcttgttggtataagtttttgaatattggtcaaaatcccggctcctaagctggtcaccacatgctggctgaaataatttaaatttaggggaccacctatatatatatttgttgacacattttctactaaaaatttgacagatgtaattatagtacaatcgtagtgtaattgcactgtaacttgcatgtaactacagtgtaacttgtatgtaagtttcacgtaattttgaatcgttagatctattacaagatttgttttggtgaggaagaaaaaaatcacagtacacatatgtgaaaggatttgttctcacgaccactattttactgaaatagtatgttactgagagattcttaaaagttacatacaagttacagtgtaattacatgcaagttacagtctaattacactacgattgtactgtaattacatctgacaaatttttgggggaaaatttatcgacaaatatatagcaaattcgcacagccaaacggtttattaatgaccaaaacataatttgtatataaaacttgtgtccttcgcaatttaaaaatgaaactactttgaaaatactcaaaaattgacttcaaaattaagttttaaaatttaaatattgacaacggctgattcttttttggaagcgacgaggctctttatctgtacatttcaaaaggaaacaagaaacattcaaatttgaaatgtatttatcgttacatttgtgaaatactactatataacctgtccctttttatgcttgtccctatagatgattgcattgtgattattattctactagcaaaagtgcccgtgcgttgcaacgggaagtgttaagaccagaaaattaaggaaaagtaaaaagatttatattatgtaattaattgaaatacaaattgtttacacccaaatttggcacctaggattaaaatagggaaattgccaaagtttggacgatctaccggtgtttcctctgggaggccggtctgactgccgtgtataggccggtcagaccgcggcctgaactccggttagaccgccggcatgtggccggtctgaccggcagagtccgagcccaagtctatttcgtcgggttttgaagtttccttgctctggaaggcatgtttcgggtttcctttggtttctatcccgagagttggacgtggaggagagcctgtagagggcaagaccaacccctatataaggaataaggccggttcattgtaaaaaataaataaatcaatcaatcaatcgaatcgtttttcatattgcttttagttttctcttagtttgtccatctttgtctatttacactgtaaatcgttcgccgccactgcgagagtgcgacacctctttgtaggtttatcctgaaaaccatccattttgcccactagacgggtagttatccatcgttctatctagatcggctccgctagctggtttagtttatcaaaacccaacttgatctagtgcttgctagattaggatggttggcgactctagaatcaccgcaaagctttaggtgctgtgattgtgcttgtcaacttgtcacaaaaagttgccaacacaaatttccttcaaaatttggatatttttttaagttggaaagtgtataattaaattaatttacaagtaaaataggtgctacctgttggatttattctttttaaattcttcataattaactacactctttggaatttcattgaaattttcaaagcttaattgctaattttgacaatacaaacataatttcagcatttattcttcagcctgcgaattaaaatttaccgttcgttctcttttgggtaagcgaaggtgaagtgttatttgatgcggattctggatgatttgttgtgtgttggacttggaatgttgcggacaaaaataggtgaggatggaagaaaatttcaccagaagaggttagagatattgaacgtataaacaatgaaatcgaatagaaatcagacttatttctgccctttttacatacaatcagacttttttctctctttttttcattttagatggacgacaaaaacattttcaaattttttaagtagtagagatagagattagccattttcgttttcttagggagtattgtcacggaaaacatagtaatttattaatatataactaattaagtactagtaaaaaataattaaaaaaatagattaatatgtttttaaagcaactttcatatagataatttttgcgaaaaatgcaccgtttagtagtattagaaggaaagaactcagtattaagggacctgaactgaacttatttcgtgcggagcctatgttggtatttcataaccttacagagaaaattcgcaagcacacgtaaaataccgatgtagcacttcacccgaaaatattctcaggtatcgatttccatagggaacgggtattacttccatatcaagttcacccaaggacactaagctatggtaggcgaaggatagagagaatttcctagtgggatgcttaattttaatcctaatgcaataacactggcagctcttcctagatgtcactctactacgtacccagacagggaggacttaagtgctcttgagagctgtcatcagctctacacccacctcaaacgtactgtgggatacgcagcaattactagatattaattacctaaataccacgtctaaacaattaatatctactctagtgtttataactcactaaagcaatcactatattttagttgattatagggaacaataatcctgtatgctgattaggaactaaccaagaagtagttctcacaagtaaatctaaattactcagaaagatatttctattgaaaacagagtaattaatagaataaaagaaacaggagaggattaccaacaactccggaattcctccgacttcttctactctacctcttcctaattctagtatacaaatagtacaatagagcctcttataattcagctcaagcttggaagtgtgtgaaaaagtgaagtctatttatagggcaagtatgatggttggaatgatgcgaaatatctaaattgccccgcaatcgtcatcaggagagcatctggagcgtccctgccaaaccccagatccaacggaggaaaccagggttcggccgaaccccgaacctaggctggcccatctggctgccaggtttggtctgggcctcctccttgccctgccttatccatttcttctaattttgggctaattctccggagttttggtgaagtctaaaacccaactcttatatggatagatttcttctcacttttagtctaaatttcctcccaacttatgtggtttataacttgcatcaaatatgcaccaacactcatggaatatgttagaattaacacctatcactatattggatattttattatctgagttttacgcaggcgttggcggcacaacttttgcacttaacagccgccaacagcatacacgcggcccatgaggcggcctgggaaccgtggcccgatgtgggagaaggcgtagtcatccgatctgattgacggtctagattgatccgggtctatataaaagttcggcatcctaaaccctaaccctaaaataatttcctctgcctccctctctatctatctatctatctatctatctatctatctatctatctatctatctatctatctatctatctatctatctatctctctctctctaaatggcggcgcctctccctttctaccgcagcggcgccgctccccctccccctcccacggtggcgggtggcggcaagcggcaacgccctccctttcagtaggaggggaggcagcgggcaggggcggtgccctccctctgccggatccagcgagaggggaggcagcagcggcgcctctctctctctctctctctctctcaaaacgacggagccagcggcgccactcccctcccccaccggcgaaggcgtcgttccacctccccctcccccaccggcggggacgccgctccacctcccccacccatggtggcgggcagggacggcgccctcccctccgtcggatccagcgggaggggagccagcggcggcccggtgtccctgtgatgaaggcggcggttcggcggcgacggtggcaccctccccttccggcgtcggtgtttttgtgcttgtgatgttcttgggttgtcgttgttgttgatgaaatatgtttttgtattcttgtagtagtgttttctctaggattttgggccaaatttgattcgtactcgcattaagcttcaaattgaattgtttttatgtttgttcgcccttttttccgttattacggacgacggaaacgttttcaattttttaagtagtatggatttttgtaagttaggtttatgaaaaataaatgtgttttaaaatacttgttttatcagtaatcgctggtaatttttaaaattcaaaattttgaattttgaatagttgtctaataataaaggtaatcgaacatgtgggaaaaaaattccttgttcttacgttggtcgagagtgacttgtgatcgcattttatttcagatttaaataggggaacattgtgtaggttaggttatgtgttgtatctataagaagagtaaattgcacccacggtgtattaacttggcaggtgggtataatttggtgcaagaacttgaaaaatgagtgttctagtgcaacaacttgacatgtaagtgtaatttagtacaagaagtttataagtgattgcatacatgcaacaacttgcaagatatgtacgattttgatacaataagttaagaagttatccgacaacttaattatttggagcacttttttttatacatatttaatttttaagtacttattttgacaatatactagcgtggatttatatataagcatatttatatttttattctaataactaataaatgaaagtcaattaaactggatgtagaaattattatatttcaattgagatttgggaaggtgaaaaaaacaaaaattcttaaaggtaattggatgtaaaattgtcaagttttgtactagaacgcacccacttgtcaagttgttgtactcgaacggtcaattctcaagttcttgcactatatcgcacccatccgataagttgttgtatcgtgggtgcaatttactcttacaaggaatagtaaatggtgacttctatatataatggcacaaattatacacattaaaaaatccacatgatttctccttttaattgcctaatcaactctttctactcgtccccctccggattccgatcaggtgcagtcacaatagtgactacaactttggcagtaccgaatcatccaaccatccagcacacaagggatagtccagattttactgtgtgcatgtgtcatgcatcattttagcaatttgatcaagcacagaatagcttcagttcaaattttgcctgcaatttcactccttttgatatgaattttcttgaacttcaagaaaatccaaatatagttaaaaaaacaaaatagacacatacttcatttcattatattgaacttcataatatcttgcacatagaattgacaaaatgagctagagtttaactattttctctggaattgggtgtcatgcatccactgagacaaaagctttgaaaatcaactagctaagctattgctaggttaacccaattagaaaagctttcacggtccaaaagtagatcatcatttgcttccaaaatcagcatgatgccttctaagttctgttgacctcttcgaatgaacttttaagataagatgacatcttcaacatcaatagaaccctagggaaaaaaagataatatccaaattagaataatttgttagcacatatatttatctttgaagaaactggtcagcatactagtagaagttgagcatagctgctaattgcttcatattcttgatgttcttccacatcagtttgcaagtttttctcctttgccttttcttcatgctgcataatagatttgagaaggggctcaatttatagtcccattttaacttgttacatagtagggtacaaatatatttacctttctattttttttttttgtgtttttgcagtttatcaatccaatttgttttccgttatgttacacgtttccggctctcttttttttctggctctcctttttcttcagaccagagacatatgtgccaagttctgagataactgggatgctgactttgcaactatgccatcattgtaaatttgttttattttgtcctcaacttttttactaacggcatgaagtgcttcttccacaagcaagtactacatccgtttcaagttataagacgtcttgactttgtttaaagtcaaactgctttaagtttgactaaatttgtaggaaaaaacaataacattttcaactcaagacaaatttattatgaaaatatattcaattattgatttaataaaactactttgatattataaatattactatatttgtctataaacttagtcaaacttagagtagtttgactttgaccaaagtcaaaacgtcttgtaacctgaaacggaggggagtaacattcttcaaagtctgcagctctggaagccaaaggaagaaattcctggtacagatatacctaagagtagcatgcagcttgaggttttccactatctgtttcccatggatgttttccactatctgtttcccatggatatcttgaatagttccacattttgcttatcgagtccaacgcttcaatacatattttttctggcaacattcaaggcatgtctacacagttgacctattctctcaaacaatcgacaactccatgacacggtctgatcaaaagggttggcagtcaccttgtcaccttgtgctcatcttcaagtatgaactgatcatcaagtgagccaattgcaattatgaaatcattacttctatttgatccttttgtataggcagccatggatttctcatgtattggttggtataagaaattgagttgaatttaagcatgtgtccataaccatgaaggtatgatctaacaaggtctaacaaattgagttgggtggaccaaccgccaacgcattacattggagaatgcaataaaaaaaataacattgggtttggtggtttggcagagaaccttataatgatcttgtgagataactgttttgccaaaaaggaaattaggaaaatgatagacttggaaggacacaatgaaaaggaaatgaatcacaaggcaacagccaatttgtatattgactgttgcagctttactggaacgtttgcgacagttcaagaaaattgtccacgggacaaaccgaaaacaattccccaaaagaatttagtaagattatatacatgcatccatggaaatacactcaccttttttggacgggaagcagagaaagcattctcctcagaaacaaccgcattcaaactctcagacagcatcagagctctcgtctagggctatcttggttgcttacagctacatttctctaccccatggccaccattctgtttaaaccctaggtgaatcaacagcatagattcctaaacctagaaaataatttatggcctcggccgccacttcttcctcgctaaacgatctaatggattccaaatagacaaattcttcactgttatctctgaggttgattctcaatcggctcaaccggcctcctttgagggctcgagacgatgtgaccgtaaatgaactcgttccatgtgtctggcaacccaggtaggcaccagtggatgcagtccgcgaacttgcgggggttcgccttctgctccttcgtcaggagcttcccctgccgcagggtgttcaccgatgtgtgcgcgtccttgcggatctctgacaacgccgttatgttgatgaagtgcactggcaccctcttcatagccttcgttacgtgatgagctgtcgagaacagatcccagtccgtgcccacctccaatttctttgtgtaattgatagctggctgcgtctcagagaagcattttatggcatctggttttccccagccctcgctcctgtataaaagataaaagttatcatacaatccatgagcacacccagccattttcactagaagaatcgcacaagatatgacaacagaataacattaccactatctgaactttcaagctaacagcaccattttaatttcctagctatgtaaaggatttaactgtgtgttttttgtggatccctctgagaaatcaattgacacacggacacacgacccacacacacagaggagggaggacttactgcatatgcacaggtgagacactcatgaagaagactgtacttcttttcggatctacatgcttttctacccatctagaccatgtcttgggaccttccggtatgcagctacacgttccatttcatcgtatttcactggtttctttgaaaaggacccaccatgtctgcaatcaaggtgcatttacaagcttagtctagcaatatactacctccgttttttaatagatgacgccgttgactttttctcacatgtttgaccattcgtcttattcaaaaaatttacgtaattataatttattttgttatgagttgttttatcactcatagtactttaagtgtgattaatatcttatacatttgcataaaatttttgaataagacgaatggtcaaacatgtgagaaaaagtcaacagtgtcatctattaaaaaatggagggagtaggacataataatattccaggcaatcccaaagattttgtccagcatgtctcaatgtccacaaggataaaaaattaggttttagaagttactcacaaaattttcatctctggtgtattcatccaccaaatataagtgttgaaaatcaagtagtccaccccttcccaattcgctgcatgttttgcaattgatgttggcttgattatgcggtcaacgatgctatgcatgtttggatcatctgagtttgactcaactagaaaaggtgaccaatagaactcgatagtagcattgtactcctgaaatattccatataaatgttccaagttagaaatgtaagacattagccattattctttggtcggcaaaaatagaaatgtacaaagacatatagctttggaatctattagaatttttattaattatagtgatattttataaaaaccagttatagccatattgttagtaattgtctgtgactctgttttgtaaaccattaaactattccattatttgtcatgttagggaacagtgcagtagctaattacctcaaggcggaagacatttagagagtcattcttgacaagtgatttcttctcccagggagcctcagattggacaaggcacaccatggactcccattggttccgattcagcgaatcccccacaaacatcagtcgtttgttcctcagtttctccaggagcaacttagcgtcaaatctgggaattttttgtcaagccacaaaatcagtttttttttttaaaaaaaaacatgtaacaaaaactgcatagtatagattatagaatatggatttggttggatgtttttcttagaccaatacttagggctcattttgatcaagagagattaggcccaaaaaattgaatcaaaatccctgctcatcccatggaatttggtttagccttttcctatccaaccaagaacagttcaacattcatacacttgagtttcctaaccagaaaatactatatcaagatttcatgatttatcagcacataaaacttgtttgcaacttgaaaatacggtccagggtctcataaagactttacctgttagaattgtatgatagacatgcataaactctaatatatcccaatatagatatgttaaagttagttcaaacgctgtcatccagcaactactcaggtttcaaaccactcaggttcccctcctaacaactttctgtaacaaacagaacttctctatcaaccattgaattgattaatacatttgaagactacactgatcaataggtgcagtctcttttctcgttaattatagcacctaaccaattaaagtacaatatataccaatcttggttgcaaagaaacatagctcatgagtacaggtttcaatggatcaagcacaccagatctactttgtggtcataatgcagcgtgatgctgcacaaccacttgccttaatggaactttggactacaaacaacaattaggacaaaacccttgcaagaattagaaaaaaaaaatctccgcaactcctaatgttaaagtaaaacaaaaaaccatccttcttaatttgcaagtactaaccagctggtgtaaatgtaaaatacacaagttgctacgatgcaatgatcccctaagaactatagcaaattggcaatggcatcctagaataatatcgagcaacagtacaaacatgtcagaaacccctccccggagtagttagctgttaacagaatcaacatcaccatgctgctttcccccacttaaactagttcccggtccactattttatagcctaatcgtgcccaaaaccagtgacgggctgacggcacacatggaatgacatcaggcgagagagcaagtagtactgtagtatcaacgaccattgccattgtcgtgtacacccacatacgcaaattgcggcaccagcagcagcagccggagaccttcgagcttaccacccacgtcaacaaaaaattcggtagaacagacaaagcagcccaaaaaaaaacagagagagagagagagagagaagagacgacatgatctcatcgctcgcaatcgcatctgcggtcgaacacctcaccacgccacagaccacacatgatctccgcagcagccagccgcccacacgcagcacgcgtacacccgcgctttccagttcacgaaacgaaagcgcacgcccgccaaccccaattgtacgtacttggcgggcgtagatacgtacgtacacgtatacgtgtacggtatacatccgtagagcgagcggatatgcaggggaagggaatggtggggggggggggtggggggggagtagtacggcggcggcttacctggggaggtcgcagccgtcgggctgccaccgccatttctggtagtcgtcgtcgcggcggccgttgcgcatgcaggtgacctgctcggtgaggaactcgcaggcggactccttgtacagcggcgcgttcgcctcgtcgtacacccacctccccttgtacacgtcgcagctctcgccaccgtgatcccctcccacctgcgcctccgccgccgccgccgccgccgacgacgacgacggcgacggcggcggcgtctccgtcacctgctccagcagagacggcggggtctcggctgacgacgctccggagtccgcggccaccggctgctccggtggagcctcgccccgatccgtcgcctccaccgccgattcgaccccctgcgccggtggggagcgcacctcggccgcctccgcctccgcctcctcctgcggggagtggttgttcccgaaaccgtcagtacatggagagagaacagcgagga

SEQ ID NO: 5907 - DNA, 76520 bp, Oryza sativa
tctactgaattgaagatgggtaatattcaccaatacttgacacttgatagatgtagaaatgggtgagatgatcatctttgctcatcagttttatttgtttaatattcaccaatatttctggttaactgtgtggtactggtgttcgtttgagtttgatctggaacaatgagtacaaaggttgataagttgatcaaagcaagtaccacctatgaacattgatgagcttccatctgaaatacaaaaaaatattggtcacctcgacagcctagtttcaaactcttcctggacatatgacaacaagctaaccttgttttttagcagcttcttagaacatggtaattttttttcttgctcattttatcatttctatggtaaagtatacagaaaagaagcagtagttaggatgacatggcgtctaactcttcctttgttcaccgtgtttggtatgatgtgattttgttcaccaaactttcctcgctgtctatgttagaccagcattaagctagtgatttgtagctttaaactttctttttgaacacgtacacgtcaaccaactaacaatatattttagtaacagctaaacatattaagatatttttattgttccttataatgacccctatgttttattccaaaatttcccttagcttcatgcatattatatcagcataatcaattcagtgattttgtaaatttgtggagatgtcgatgtctcattacacacctttagtccatatcatattaacaatttaacatacttaagccaatgattaacagaattgctgggcaccttcactgtcgacatgaatgatcatataattctcttgaggtcttaatgatattttggcacagacattgattttgataggtgatacattgtaattattacctgaatccgtggtgatacttaacaaaacatggcagtaaaatattttcagctcagatatcaatgagttctgttattgggcatcattcagatcgaccagtgaattttgttcatcataatgttttatgtcaaaacccttgttacacgtacttagagcaccaaagaactatgtggtgttgtgactatcagacaaaagtgttcgtcattgatctgtagaggagccaaacatatgaaatggtcctacattagtgatctgtagaggggatccaacatgaccctacattagtgatctgtatggggacccaaacatgaccatacattaatgctggtgtttaaaagaagactgtactgattgagcatttgagctgttgccagggaaggtatcagccactcacccttcttttagttcatcctatgtgttgctgtgttattctgttttctagtccctactttggtactatacactctgtaatctactactactctatgattagtactagtatctccttttgagtgaactattgctttcacttgactggttcagagagctacagtagtagcttctcagtgactgcaagaactgaattaatgaaaaaaatggtagtacgatgctgatgcattgtgtggtcaccaggaagctaaatgctgccttgctgtgcttacctgtgggagtaatgtcggtcaggggaggctcttcaacacacttgtcctctacttgatgctgattgtggaatctttgactgcttggtgctggtgatctctgggagagaaatgaaggaccctgacattgcccacgtggtttattttatgaagttcatgtgcatagtgaaaacatgttgatttttttaattaaattgtttgtaaaaatttagcttttaccactaattttcatgcaactttctggataaacttaggcctggtttagttcacaaattttttttcccaaaaacatcacattgaatttttggacacatgcatagagcattaaatatagataaaaacaaaaactaattgcacagtttgtatggaaatcgcatgacgaatcttttgagcctaaatagtctatgattagccataagtactatagtaacccacatatgctaatggcggcttaattaggctcaaaagatatgtctcgtggtttctagacgagttatgaaattagttttttcattcgtgtccgaaaaccccttccgacatccggtcaaacatccgatgtaacatccagaaattttattttcgcgaactaaataggcttacggaaacaaattttgaaacgcccaaccaaaatatgtgaaaacatgttgatgtttgaactgatgtacccacagaagtagaacagcatgttttggtgtccctacgtagtactagtaccactagatgctccagcttttctccgttggaaaacgttcaatttaggtccctcgactacagcctttgttagattcgtgtgtccctaaactcgtaaaactagatatggaggatctctaactattaaaaccgggtttagtttatgtggcatgtttaacctggtttttatttgacgtgccatttacatggaattattattaacaaatactccctccatcccaaaatgtttgacgctgttgacttttttaaaaatgtttgaccgttcgtcttattcaaaaaatttaagtaattattaattcttttcctattatttggtttattgttaaatatacttttatgtatacatatagttttacacatttcacaaaagtttttgaataagataaacggtcaaacatgttaaaaaaagtcaacggcgtcaaacatttagggaaggagggagtataaaactaaaatacgtggggcccactaacatgtgggcccatctctctttctcccatttgaccccttcatctttgtcttcaactgctgccggcgtcaaaacttgcccgcttgttggcaccctccttatgttgatgttgatgctgatgccgagttgccgacatagcgggacttgacatacctggtgtagctgccgccatgcccaagggaaggggtctattggtttcccacgaccaccaccgtgggccttgaggatagggaggataccaagccactgtcgtcgcctcgatgatggtagttccaccccaagtcgccctcgatgatgatggtgtgctggagatggcgaaagctatcgatccggcgaaggctacaaaggtgtcgacgacaacgggggtggtgtagaggagcttgggcacgaccttggcatgtgtggtgcttgaggtcgaggagggtctcctggaaggtgctatggaatgcggacctcgtcgagggcttcctagacgtcgtcgaagatgaggttgagtcaccgctaacccctacccaagccaccattgaccatctcttctggcggtaatacggacgtcgctttctagatcaggaggcctagggcgctagctcaacctttgttgctttcggcagggccggggagccattctgtgtgtgaacatcgatcgtcaagggctccacctctcagcccactatcgatggggatgcatcgtgtccaccttatccctaggcggtcaccatccctttcctcctcctcgtcagcctgtacatgtggatgccaaggttgtgacctgcgttttgtacactatgtccttccactcgacgtaaccgacgtcatggtgcaggccggtggtgaatggcggcagcgcaggatggatggccaggatggagtcgtcgctattgtagctccggtggctgggtggtgggccttgagaggggcgagtggcgcaacgaccatcatcgaactcctctacctaggaagaaggtctctggttgtgctgcacacctccgccgtgcatccacatatcctaattggcatgacgccctgtggctatagatggcctaaggcctgggctcgacggcccgtcccaggcacaacacgacccaactggtgtcgagcccgtgttggcccgggtcgatcgttgggatgtgcctagacctctgcctcgtggaccggcttggcatggcgcaatccaatgattagggaggcaaaatagatgagggaggccaaatagacttattcgaaggaggagcacggcccgagtcttattgggtcgtgcctaggccgttggtgcagtccatgagcgggcatggcacgacccggcatgtaggtcgggtcgtgccggcccgactgatcttgggcccgggctaggtcgtgctcaaactgagctagccggcggctcatttggccatctatacatgcgacaggagagtgaggaataaggaatataggaaagatggatcccaccgacatacggcctcaacatatttcttttattttatcttcgcttactgggattacacgtcagctaaaaccaccctaggaagctgccgaaggactttacaacggttttttagatagttggggaacgctatatacctgattttgcgaataagggacaccgatgaaactcgacccgtagttgagggaaataaagtggactttttccgtgtccatttgatctcggctcttgggccttagctgggtgctacggtgccagacaataataattttgggctctctacgaacggtctgcacgtcactggagctttgtgtttgttctgtccagcatcggctccatctgggaatcgttgtcgagccctattcaacgactgggtctccaagagagaaaatgaagcatttcttatggttttgttatacgtttgtcgataattatttcattaaaatcacacatatgttggtgtaattaaaatatactccagcatgcaactgtaactagcatgtagtaaatagtagaatataagtcccacgtaaatacagaaacatttctattgcgtaactcggttcttttatttgtatgggactatatactacctacattgtaatagttatattattattattattattattattattattattattattattattattattattattattacattcgtatgattttaatgaaatgaattgttgataaatttatagacagtcccaagtatcctctcaaaaaagaaaaaggtgaacatcaactattttgtttctttcgatcctgctgtaaaaaaaaaggtcttctcccatcaagccgcagattgtagtagttatccttttccactgccattttaggtaaaagctgttaaaaaggttacaaaaatatcattagactatatatttctctttggtcatttttttaagatcgtaaagggctttcccatatcaaaagctagctaatgagaggtgaggggctttctcatttatatattaagttatttctccttccacaaccaatatggaactattcaacaatcttcccttcacatattggtgtctctcagccgttcaccgccctttcaccgtatcccaacagtccctcaggtatacagtccccgcaggtgcccacggtccatcaggtctttacacactttgtccatcgggtcagagatgttgaactagtgaggctctaatatcaattgtaagatcgtaaagagcatttctcatcccaaaaactaatcaataggtgaggggccccccacttatatattagttcctttgtccttccacaaccaatgtgggattattcaataaattttaatttattaaattaaatgatgctaactttttattcattaatggggagggattatttttaaaatatatgattattttgtttttcttagcataagggtttcaattgcttctctagtatattatttatgtgatattaaagtataattatacgaaagtacttttgatgacgaatccctttgcctggcaaggcggcggcttcctcagaaaacgagaataacattgattttgcttcacatatgattgagatgtcacaccatgttgaattctacatgaattcctcaaaacatgtgtttggatgtactgcaggaaaacacaggaaattagaattatatgttgacatgttagagagaaaatagaaagagaaagagaaagagagaggatgcattggaagtcccaaaggaatttgaaaaatgaggttagacatcatgctaaaattcctcaaaatgtgaaggaactttccttttatacgtttttcctttgaagtaatcctacacaccaaatgacttatatagatattttgtcattgattggattcatctagatttcctttaatgaaaatcccttcaacctaaaggagtccttaccgttgaaagagcactgtgtgtgcataaatgtaggtggttggtggagttgcggggtggattaggggtgaaaattggataggtatttccgaccacccaccttacttgaggcttgcgggaagaatatgagatagaaaataggatactcggtactatccaagtttgaacccgaatttgtaaaaaaaattgggttaaaataggagaagagttgtatccactcgtatgtcccatattataaaatatatatgaaaatctattataaattcacctaaaacatgataaaagattgattaatcactattttacttgatgtatcttttttaacattttaattgcatcactatatttaatatcaatgaattagagatacaaatagatatctgttcccgaatccaatttagaggaaataatataggataatagctgggtgagtgatatgttatctaacattactcatacctagtttcgaatttaaagaaaaatatgggttatgatgcggaaatgccatgatctgaccgtatccatctgatttcacccctagggtggataagtgaaccacgactctagatctagctaccaccaccacaaactcgatgcttatttgatatacatgtatttaaaagaaatgatacttcaaggtgattcacacaaagttatacgattaattaacaatgatactatgatgtttaactggtatgcctatgacttgtttggaacaaaaacacattattttcacgtgaaaacagttcataatgttcaaacatgccaaaattaaatgctaactactctgttgacagtactaccttcaagcattttcaggacagacgtagctagggtatggtagttggaggagcagttatatagcccttgtataaaggcataaagcaaaaggaacctagttttctatcaaacgtgtactagcaactacaaccagcaacgccatggattgttagttgagagtcttccatatatatcatgtcagttatccccagctcctaggttttttctccagctatgatcaatgattcaaacgagtacactttaaatttgtccgatccataggtctgaatattccatctgcaacttttggacaatctggaccattcacctaacctggtgcagtagttcttgcatgcttgcgagtacaatatatataaacatcaaatattattggaacttagaaattaagtcgacttttgtgtcttgactatcattgagcaggtaatctgaatgggcatccaaacatcaccatacaggcatttctagtaagtttttggacttctttttgatgaaatttttggaggatgagatagttcagggtatatcattccattcaagatggtcatcgagtttggtatatttaatttgttataattaatgactacttcatttgtgaggtcatcgactaagatctagaaagctaaggcgtgtctatcgagttgttgatgatcaaattagcgatgccgactcatagctaggtcgccgacttgttcagtggcgttagtttgtcaaggaacaaagacattctctcttgattgatactcattcatatgcttttatatgtgccgtagtttatcagcgttgtagtcgtgctcatctttcttgtgcgttttaagatgtggagcacttttttgatagattttctcaattatatttgtaatctcttctattttaatataatctaacctgtttttgctttgttttttttttcatgaaggaaaggaactagctaatctagtgcagtcgcttcctgttgattcgcatttactttctgaacccaagcaaaaacgtaaccaatgatatcatatcttcatattgtagaattaagctgccagatactagtacttttaacaactaatgataaattaaattcacgtcatgagttccttctttttcttccatgggccaaatggctagaaactgcattgacaattattttgcttatcactcagcagtacacaagtacactgtactgaaagaaaagaaagaaattaaagaaagacagaaaggacgaaggggaaaagttatctaatcattcataacttctcaaatacaccatccataatgttgaattgcaaatccatcacagagaatatggataattgacactttttccactcttctgtaccccataaaattctcagctagccattagggaggttttgtgcctccttcacaggattttgttaggtgcttgatttttccttgaaggacaatgcaaccagaaactcctatgactgaacaatctgccactcatttgcctcttccaaccaactcatgtatatattgttgaagtgtcactaggagagggaaaaaaagataaaaaggaaaattacaaataaagttgatgaacaggaaatatgggacagtcaaattcctgatgccctttgctccaaccaaaagatgagaacaaccattctgacatgaccgatataggggcatacctgaacctgatgttcagtatttataatgtccttttgggaattatgtgatggttgcacctctttccagctctctcttggcttagaatccaagaaaaagataagtttatcagcaattcagcattacttactgacatatatatgaatcaccaccaactacccttgttcagtaagcattggtatgattcagttgggatagttgcctagtaggttgcatttcattcctttccttttctgactcccatttttcttgttcttggttggccatgaattctaactgcccaaatcttgcttagctgtaggctacaatgccaaaaggagaaaagatggcctaatctttttgtttagtgataggaaaaaaatgcatttatttcttcggaacaattagccgctgaaatataattgaacttctataatactcccttcgttccaaaatataaaagattttgggtggatgtgacatatcctagtactacgactttgaacatgctacattcattcaaaatcccttatattttgtgacggagggagtataataggttatacttgcattggttgcttactttttaattgacagcctacttgatatagctagttagtaccaatctatactgcatccctgtagcctgtacatgttgatttatgcagagatgaaagctcacagaggtacagattgagcaggatcactgatgattgatgaaacaaccaacctacctgatctgatacacccatctaaactaaaagagcattactaatatttgtaataatatttcttcctacatatccacaatgactctcatttggatgttaattaaccaaacaatagatctctcagcctgccattaggcactgaaaatgttgcagattcatctcctcctgacacatgtagtgtgtggccaatactgacaatgactgtcaggtaacaaatcagctcaaacatctgtaatcacaattctgacagtgactaagcaacatttaaagagctcacacattattagcactaattaattttatttatcctaaaaaaaagtgcagtaattagctagcaaatccagcctatataatccccagccaaaactgatcatatcctccaagcttgaacgccaagatcgagatcgccggagatgaaggcgccgccgccgccgtcgccggtggccaagagggcgcgcgtctcgccgttcgtcttcctgctcgtgctcttcctcctcctcttctccttcctctacggcgaagacctcaaggagctcctcggcagccaagctcaagcgcggccgagcctccacttcaatgccgccgccgccggtgatgggatcgagctgccggccgccacggcggcgacgaccggtaatgtcaccacgcatgcatggtgcatctcgtcgcagttgatagctagctcgaatttgttttgacgtgttgtgcgatgggagcagaggggaggacgacgacgaggaggtggcgggggcggctgccgttcgcggcgaacggcgacggcgaggaggaggaggaggagtgtgacgtgttctcggggaggtgggtgcgcgacgaggcggcgcggccgctgtaccgggaggcggactgcccctacatcccggcgcagctggcgtgcgaggcgcacgggcggccggagacggcgtaccagcggtggcggtggcagccgcgcggctgcgccctcccggcgttcgacgcggcggcgatgctggacaggctgcgcgggaagcgcgtgatgttcgtcggcgactcgctggggcgcgggcagttcacgtcgctggtgtgcctcctcctcgccgccgtccccgaccccgccgcgaggtcgttcgccacgtcgcccgaccagcagcgctcggtgttcaccgccgcggcgtacaacgccaccgtggagttctactgggcgccgttcctcctccagtccaacgccgacaacgccgccgtccaccgcatctccgaccgcatggtccgccgcggcagcatcggccaccacggccgccactgggagggcgccgacgtcatcgtcttcaacacctacctctggtggtgcaccggcctccagttccgaatcctgtaagcatcccaagaacataattaaccatagcaagcaggcaacgacactaatggcgagacacgcagggaggacgggccgttcgacgccggcggcaactcgtcgacgacgacgtgggtgtcgacggaggaggcgtacgcgatggcgttccgggagatgctgcagtgggcgagggagcacatggacttcgcgacgacgcgagtcttcttcacgagcatgtcgccgacgcacggcaagagccaggactggggcggcggcgagccggggggcaactgctacggcgagacggagatgatcggcgacgccgcgtactggggctccgacagccggcgcggggtgatgcgggcgatcggcgaggtgctcgacggcgatggcgccgacgtgccggtgacgttcctgaacgtgacgcagctgtcgctgtaccgcaaggacgcgcacacgtcggtgtacaagaagcagtggacgccgccgacgccggagcagctcgccgaccccaagacctacgccgactgcgtccactggtgcctccccggcctgcaggacacgtggaacgagctcctctacaccaagctcttctacccttgaaaataattaaaaaaacaactagaagcttctagaacaatccatgtaggagtattatgtaatgtatgcatgcaggcatgcagctaggccgcggcatctagctaacatggttcaatatttcggaaagaaaaaaaaaggtaaaaaaatccttccatgaatctagagaacacctttgacttcaccaactctccctttctttggtcgaagtaaaaacattttaggggacaaaaatttcagaaatttcaatctaaaattttaaaattgaacaaaatctaactgagttcgaccaagattgttctagatttttttttaaaaaaaatcattttttaagaggaagaaacatcctatagctagctataagaaaacataagaaacaagaagtgcacattctagtagctcttttagtggcaaattaaaatgttgtgatttgttttccttttgttttggtcaattaccatatgtgtcaattgctgtgcagcaatgtagccttgatatgctgctaaaaaaggagaaagcagttagcattttatagtttttctagcctttttagatgctctaatgagatggcttacttgataaaacattacagtaaaccacactttgctccacctaattcactggtttctagctatagcttctcatgaccaccagaatagcagatcagtaacaatggcctcttcgtgttgtcgtgtagtagattctttacccgttccggtctaccacgatttctatttatacaccattgaacctttaaaaatcaaatcttatagttttttagagtttagtgatcacgttatgttcttttttatagtttttagaagcactatcaaatgccgccactatactcctttatggcttgcccgcagcatccctttttagtgttacttggatttgaaaaattaaacttgatcatatttggtttccttttttaaactctggaagtcccgccaatcgtcgcgaacctactcctttatggtctacccgccaccgttcctccttttaatcgtcattagaattctaaaaattgatcctaatcatcattggggtgatgtcccatcaaccgtcaccaccatacacctttgcagctcgtcttgccccttttctttttttgtcatttgtaactattatattctagatatatgcttttttaatattcattattttttattttgaatttttttatttctaaattgtattcctatctgatttttactctatatttaagtaatctcatattgtattttacgtggactcttctttcatcgctacttattctttttattctgtgtaactgcgtggctaatatctatacaaaattatatattttttacacatgattttctttgaatttcattttttttaaagaaccacagtaggggaagcccccaccgttaagattttatattaataaaggggaaaaaattacaacaaatttaaccactataacaatgtatctctttcagaatttttgactctatgaactaaaagggagagatcattcctaaagagaactctccaagagggaacagagggaacaatgttttaaaaaattaaactattcctctgcttccaaatattccaagcagcataaagcaccttctcaacaaaatgggtagagttatatgaatttctggccgtgaccaacatttcaccaaagcttaaagaaagattccaaactacaccaaattgcgcccaacattgagtgctaaaaggacactggaaaaataagtggagagttgtttcccttgatcctgttgaacaaagtacacagagcaaggaagcattttgaggggagcaatgccttctgtctaacatgtcataagtatttaaccgatcaatcaagaggagccaaccaaacaccttgactttcatagtacaactgctcttccaaatccatttaatataaataggcacatggacacgagaaaaattcatggcataaattttctatgaggaaaaaataccgttgccccaaacatatgtccaacgatcactctcatcattaagatgctccaaggtatctgcagatgacattgccaaatattcctgaaaagcttgctctgaaagtggcaaggcaaagagctgaggtagatcagaagtagagaacatcagaactgagagatttgaattcctggcaaaacaatatattctgggataaaccaaggccctgactttattgttccacaaatcttcccaaaacaaacaagattttccatcttgcacagtacatgccgagatgcctctaaaaatatccacaaattgcaaaacatccctccaccaaaaagatcctttaggagtaatagcatgaggaggttctgcagtgtagtaagtattccaaatcaaactgacccagggaacaggatatctattatagaacttatgcagattcttcaagagaagggcattattttgcaatctaaggtctattacacccaaaccacctctatctttcggatgacaaactctttcccagagaaccaaagacttcttactagaattaatatcatatcccctccacaggcaatgtctcctagctctatcaatactttctatgactgtctttgaaagtgaaagagagcacatgtagtaagtgggaagggaggaaagaacggcattcacaatggtcaatctgtccccataagataacaaagcagtggttgttgagagtcttctctctactctatcaactataggagcaaaatcaataatcttggtcttgtggttccaagaggaagacccagataagtaaaaggtaacttaccaatagagcaaccaaacaattttgagagatgatcaactttttccaaatctacattcagaggaatcatgcatgacttactatagttaatcttaaggccagttgaagaggcaaaagtgttcaaaattgccttgagacagaaaagctctttttgggaagcagtcaaaaaaagaagagtatcatatgcatactggacaatcggaaattcattactaggtgttgggattggcattgtaagaactccctaagaacaagctttattgactatagattgtaacaagtcagctccaagaacaaataataagggtgaaagtggatcaccctgtcttacaccccttttgcaatagaaggatttgccaggaacaccatttaggataactgaagaagaggctgaagaaaaaatctgagaaatccagcttatccatttaggatcaaagcctttctgcctcatgatgtccaatataactgaatgttcaatagtatcaaaagctttctcaaaatccaattttaaaagaactatttccctcttagaatgctggcactgatgcagatattcaaaagaccaagccaaacagtcctgaatatttctagccttaatgaaaccatattggttttggtggatcaattcaatgatgacagattgtagcctatcagccagcaccttagtaagaagttttagagccacactctgtaaagaaattggcccgaagtcatttaccttttcaggagaagacttcttagggactagagttataaaggatattaatactctcaacaccagagaaccctaacaaaattgagcacaaagattatagaagtcctgtttaattataggccaacaggccttaatgaagcaaccattgaatccatcaggccctggagatctatcaattggcattttgttgacaaaccttatcattatcggataaataggcatctcattcgtcttacaaaccttatcattatcggataccccttactcctctgccattcaccaccgttgtgtcctaaatcaagtgtttttcaatactttttttattgttttatccaaatttttattatttataaattcatactatttgaactctagttttttttcttaaatccgaatttttatttcttatgccagattttagttaacctcgtattgagtcctacacattattcattcaatatttattttttattttaaatttcagttatttctaaactgtatttctacttaattctcatatttattcttctagtttcggaatttattttattttttattatagcttttaattaatcttgtttgtgttttaaattttctcttatttcaataattcttatttttattcaaattttagttatttaaaaattttattcttagctgaactattatatttttttgctaatttattattttcttctattttttattttaaatttttattaatcttgtatgtgttcaacatgaactattctttcaatatttcttattttttgttacgattttcagttgtttctaaattgtattcctacatgaacttttttatttattaaattcgaaatttattttattttttactccaaatttaattaatctctaaatatgttctacttggcctcttaatttaatgtttcttacttttttgtccgaattttagttatttataaattatattactatctaaactcttatatttctttttaatgtttcataatttattttatttttattctaaattttaattaatctcacactgtattctacatgaattattctttcaatatttcctaatttttcttccggatttcagttatttctaaatagtattgcaacttaaactcttatggttatttttaatttcggaatttattttgtttttacttcaaatttcaattaatctctaattgtgttgtacatggactcatatttttatatttttttactttttattacaaatttcagttatttcttttttgaggaatttcagttatttctagatgtattcctattgagactcttgttttctttttctctgattaatgtgggaatttctagccttcaaagcgaatgtgttgctccttgcaaagttgtcttaataatataataaattatttatttttgtagttggagatatcgagaacactaattagcctagtatacttagcgttttatttaactattatagaaaaacgaaaaaataaattattttgaaagttttaaaatatgagtagaatttgaagctgaaagtttgaaattttgaattgaaaattttaaaatttggctagaggtttttaaagttttgaattaatacttttaattttgagttcaaagttttcaagttagagttgaaagtttcaaatttgaaagttagtcgcacagatcaatttgtgtatgagtaactaacgttggactaagtcaacgcttaatagaagctaaaatttaaattttcaaccttaaatttgaagttaattttagggttttttcatcgaagtttattattcaacctttacttttagattgctaagagcaagtatataaaagttgtatttatgaattatttttcgtttacaaatatgttgtttaattagcttattccacaaataagcaaaacaatggggccattacggccataactaccatcggactaatcgatttcataccgggcgggcccaagattttgagattgggtattcgaaatggaaagggggtaaaaaaaaattttacaacacgcgagcataatatttgatacgtatgatcaacaatatggtattttagtactgcttattgaattagaacttgcgacaagatttttagcaaatttcttgatttattatgatgtactttgtgaaagaacatatgcagtacaatctaccaaccaagtatatatcgattagtatcatgccatcacagcacagttaatgtacaaattaggcaaccttgtaaattgggttcgaatttgagggaggcagcctgctaggctttcttgttgggcttcttttgatcaataacgtttattttctttatttctttgcatacatacgaaatatatacctcagggggctgctagctggcgcgtgcgcgccagcagcgagcacctcacctccctaattatctatagtactattagttaacacccacttaactactaatgactagtaattagggaagattctcaagatttttttttcttttttgggagatttttgtaccaacagattgaaaatttttaagttagatttgaaaacttttgatttaagatttaaatttaaaagtcaaattttgaaaactttccactcggatttgaaaactttcaactcagattcgaaaactttcaactcagattcgaaaactttcaacttgagattcgaaaactttcatgtccagatttaaaaaatttgaaaactttcaacttagattcgaaaactttcaagccaagatttgaaaaaattgaaaactttcaacttgagatttgaaaattttcaactcaagatttaaaaactttcaagtccagatttgaaatatttgaaaactttcaacttgagattagaaaattttcaactcgagatttaaaaagtttcaagtccaaatttttaaattttaaagttaagaattaaaaattactagtaaactaatcactagtaaaaaaactaatctaaactaattacgttacgtacggtacggtaaaaacagcgaaaaagaaaaaaaaagagaaagaaacagcgaaaaaaacggtaccagcgagaaagaaaaaaaaagagagaatctaccaagcgaagaaaaggagagagagttcagaaaaccgatcgaagttcaaagacgaaggtatgcacacagcttaatataatgccttaatttttcaacaggtttcagtacttcacgcgcataataataataataataataataataataataataataataataataataatagtaataatagtaataataataataataataataataatattattattattattattattattattattaaagcgaatttgataagaatgaacagtaaaccagcaaattccacacatcgaacaagcaatctaatcctcttgatatgttaccaataattaatttctcagtgttgacatcgaacaagcaatctaatcctctcgatatgttaccaataattaatttctcagtctatcaaaaaaaataattagtttctcagtgttagtggtgaatgcgtacgtggcaaacatcgtcagataagagggatcatcaatcaatatcaaggaaacctccggccaggcgcataacacaacacgcaagtacgcaacataccaatattgaaaatttcaaactcaaaatcttccattgcacacaaattaaaaccaaatacaaaatcacgcacatgataaattaacagtacgactaactaggggcaaatctctttatttatttattactcacgcaaaacatattgtatggtacctgattaataattataataagcatctgtgatacatgcatatctatctaagagattttacggtcctcgagaaggtacggagggataccaaattttatatttccgatactatataaggtacgaagatttgtaaaaaatactcaagaactataaaatttctctatataattaaatttcctaattaataaccacttggaattgagcatgatggaatcatctcaattaattaaccgtcttcttggtcggtgtgcggccttgtagaggactgggcatgttgtgcaacgggttcgatccggtgggaaccagacgctccgtcacggccaccgtgggctcgtcggcggcggccggaggagtcggcgcgccgttgtgcacggggctcggcccgctgctggggacatcgtgcctcatcacagccgccatcttcttctccacggcggcgggacgacgaacatctcgcgccgccgcggccgtcgtcgtcgccacgaacaccagcagcaccatggcgatggcggcgaagaggaggagggagcagcggccgtggttggcagcggcggcgccggtggccattgttgacgacgtcgtctagctgtgtctgcttgtgcggcggtgaagatgctagctagctagcttcgtgcaacgacgacgatgggcgagtgcgtcttggctgcatgcgatggagctgtatttttataggcataagtatggaatgtgcgttgtaattattggtagggtaattttatcatcgttattaagaaggtatcaaaggtatcatatttttaaatgtaaaatttggtatcttagatacgggagtagtacctcaggtacaaaaaaattttggtacctaattcctttattggtaagtttattatcgggtgcgacgttggacgtcgatcgatcgatcgatccccatcgtgttatggaattctaatggcgtttttgtaaggcagaaccttctttttttaatttttggcaaaagtattaattgcaccagttatgtaaaggtatctgtgtcgtatggtaagtactttattccggttaattatatgataccagaggtactactatatgtatactgcgattttccttcttttctgtttgaattttgaaaggtaacatcttgattatatttcgttggcagctaggatatgataacttatactgtactatgttaattagattgtgctcgacatggcatcttaatatataaaaatggcgaaccatatattagtatatagatttattaattaagaacataatttattttctacctatagaaatatccaccgcaaatatataaggaccataatttgtctgttcggaaggcccgtatttggcccaaaaccggcataaattttgggctcgtatatggtatgcatgcactcgaataaatataccctgatttcaaatataccctgatttctgcatgtttcaacatctcaccgcctctcttgtctcttctcttgtacacttacaaaatttgaatccaagagctaaaattttgatcgatcttattgtgtccatatatgcttaaaatcctccttctcccaagcaattcctcgacgagagattctgattcactggtattaattagttccgtgaaaaataattataggtatattttcttcacaaggaaaaaaaaaagaattcccaggtctatgcttatatttgcaagtctatctttcctaaagcaaaatctaggaggacacataggaagacaaagttttgctcgttatccatgccaatctgccatcgcatttctgttgtttttacaacaataattcaataactttattcattactatgtgcttttaggaggcacaaatactccattttggtgacccgcatatctgttggtttaattttgtcttaatttcattgttttaatttatgttcctttttttttctcatgtctagcttgttcggttctcttcgatcaatcgatcgcgtgtttcatcttattatgtctttcagttggtggttctgctcatttctggcattccaagctaggtaggttcactgctgaattcattaattaataacgcgtgccattcataacattcaaacgaagacgatacgagaagccaatgataaatcaaaacaacctacgctatatatattccattatccatgcaatcatgacaataaaccacactttttattgaaatatcttgataattaacaaaacttgcgtacatgctcacttgatgctagctcaagatcgatcagataaacatcgagatctgatacgcattgaatcatcaatctagcacatcagcatgtaatgcaaaagtacgtgcttcaaactagggtagcccactcatggagaaggttgatgattgtgtatcgggttcgggccgctaggaacatcatgcatgattctgactcgagacgagctaggtggatgatggggaggagggtggtcattgtgtatcgggttcgggccgctaggaacatcatgcatgatcccaacacggttgccgcgagaaccggccgccgccaccaggacgttgccgtcgtcaccatctgccgtgccggagaaggaaggcggtggacgcgctgccgccacggccgccaccgccacggcgaacaccagagccatgaagagaaggcagcgccggcgctgggcgtgggtggtcgccatgagctacgaattcttgaagcttttgttatgatagtggctatatgcttgtgagaatggatgatttgctacggtggaatgccggcccgttatttataggcgggcgtggctgtgggaaggcgtactgattatttgcctacacatggtaagatattatatcgttgcatccctgtgattttgtgctcgatcgtcagctgtaaatgctgagaaatatgcatggcaccagatagcaggccggatatcacgaccttattaccatcgtttacacccgtatcagatacgagctgattaattttccatttatttggggtatgctgcccccttgattctctatagagattaaaacccctactacgtcaatgtcaattcaatgttcgtcgcaaaaattagaaaataaagtactgctgcatacgttgttttctcgcaaaatgtatcggaatagcaaaaaaaaaaaaaaaaactgaattagggtacagaaattatagaaactttggtacctactacggacaatatcttaactacttaaaaaatcggtaactttccgatcctcatcatgtttccgttcgatttcgcgctaattcttcgtccatacgagtgcatcatgaggcagataaagcaaaaaaaaaaaaaaacatagatacactactataaaagttatttttcttcacgaggccccatgatttttgcaaacggatcataactagtggcgtctgcaaaaatcgagggtcattttcccatacggccgcttaagtggcccgtatggaaaaatcgatttttcccatacgggcctcttaagagggccacatgcaaaaatgagctcatttttgcatgggaaaaagtataccgaaggtccctcaacttgtcagcgcgatacaaaaacgtccttaaaccccaaaaccagatatacatggtcccttacctatacaaaaccggttacccgagatccttagttggttttgacccagttttgacctacgtggcgcgtgggccccacatgtcagcgtgccacgtcaacccccctctccccctcttttcttcctttctcccatctctctctctcactcttctctcgcaggccggccggcgaagcagagacgcggagcggcggtggcggcaggcgggcacgcgcgcggcggctggcggaggtggtggccccctagcagcgggcatggttgtcgtcggcgccctttcccgacgccggccgtactgcgcagcgctcgcccacgccgcgccgccgcggtggggcatggtggtgaggtgggagggagggagctgggagtgttgaggcggaggaggaggaggtgtggttaggcgcgagctcgccgtcctccccgcccccttcgtgccggtggggcgaggcaggaaaaggcggcgggatggtgtggcgacgtggtggcggcgggctgggcgcaggcgggcgacgcgacgcccaatccgacgcgggccgcggtcgcgcagctcgcagtactgcggcgtcaagttctaccgccgcaccgggcgatgggaatcgcacatatggtaagcctcctcgtctcctgctcgttctttccattttcgagagctcaacgaaggaggaaggaggagagagaggcaaggggagcaaaagaagagcagcatggacgggtttggtattggattcgtcttgttttgggcatttctcgcttctgctccttttacctttgtttttctgctcctttcccaatcgcaggacgtacgatctagcggcgatcaagttccgcggcgtggagggctggaggccgacatcaatttcagcttggaggattatgggggatgatctgaagcaggtgagaacaagtttaacgagatcattgtggatgagcaatctgaccaaggaggagttcgtccacgtgctccggcggtagagcacagggttcccccggggaagctccaagtagaggggcgtgagctgcgccgtgggcgccatcggcgtcgacgtcgccgcgaacctcctccggacgcacgccatgtcctacgccgtcgtcgtccgcacgtcaccaacaaacgcgacggccaccagaggatgagagagagagaggggaagagaaggggaaaaagagatgatgtggcatcctgacatgtgggacccacatgggtcccacgctgactcagccgccacataggacaaatccggcgtcaatactgccctgggactttgggtgaccggttttgtatagttaagggacctcgcatatctggttttgtggttcgaggacgttttcgtatctcgctaacaagttgagggaccttcggtgtacttttccttttttttttttgcatgcggctcacttaagcgcccgcatggaaaaatcgatttttccatacaggccacttaagcagccgtatgcgaaaataaaatttgaaaaatttgaaactagtgtatctcacttatatgaactccaaattggatgatttttttcctaaatgtttctaaaataatgctctatcatgttattgtgttcttactggtattattttagctatttttttcttgtgactttgttttatcaattaaaatttgaatttcaaaacttcaaataatattttgaagcagtaaatgatttaatctgaaaaagtcatcaataacaaagttgtataactcatcaagattattggcagtatgacatgaggcccttcgaccaaacctgccaaaaccatgagaccagcgaggattcaagcctgagacgtccagattagtcggggcgaagcccccatggcgaagactatggagcaaggacggcgaaggaaggagaatcgcgtgggtacctcgcgaagccaaaggcctcttgggcgaaggatgtaaggcgaagcgtgtatgctgaagggagatgacttcaccatagcaagtttggcctcgctaaggccgatgaggccatcctagcttctcaagcccaatggccgttgggccagcgatcgcctggcggcccattaggagtccatataccttaattacactgtatgcccatataaatgtccctgtcgtaagggcaaccgtgtaaattcccctgtgtaacctaaactctagtagtaagaacctgtaatgaggctataattagtctcctagagccatgtaataggggatcctaagaaaaattctcaatttaatacactttacttcttttccaagcactgttgagtaaccacgtctttcaacgtatacagttttcgtttcgacaacaaagatctataacttatattttgattatttcttcatccgataaagtgatttgcaagattgttcacaaaatgtacatctcttatatattcttataaaactatataagagaggtacattttgtaaacaatcttgcaaatcactttgtcggatgaaaaaatgaccaaaatagaagttataggtcttgatgagttatacaaccttgttatttatgactttttcagttgaagtcgtttagtatttaaaaatattgtttgaagttgtcatattttgaaattcaaattcaaactgtgtaaacaaagtcaaatataaaaatgaccaaaacaaaagttgtagatcttgatgagctatacaactttgctattgatgacttttccatttaaaatcatttactacccgaaaaattattttaatttgttatattttaaaactcaaattttgtatagtccaatcaaactcggatggagaaataaccaaaataaaattggtagatctcaatgtattctacaaatttgtttttgacaactttttgatatgagttaatttaatgtcataaaaatcaatttaaagtttaaaaaacacatgatttttgcatgcggacgcttaagtggtccgcatgtaaaaatggtccctcttccttctctctccaccagtttaaaatttttcacacctatccttttatcttctagtccttcccttcctctcctcttagagtcttctctctttcactctctctctctctctatctatctcactctcagaccaagagccagcgcagtgtggcgcgcagcagtcgagggcggcgcgaggtggtgccggccgagggcatctccatgtcctgttggggtgacatctccatgtccaacccaacctatgccccaaggtccaaaattgttttgatacccttgtcaagtaaaccaataatctccgcatatagatgtccgacatctatcctattttatcatgataaaaagtgacactttgctatgtcaaacccatcacttatgatcacaaccgaaataggtgcaattattgaaagagcataaatttcacttaatttttctgagggaatctatcctaccatgtcatatcaaatatataacagcaataaagtaagatagatataaaaaccccaagcgaaatctaaggggcaacgcacacggcagtcccggggtacatagatctcatctacgattcgctatgtgaaaaccttaacggcgtaatcaaattatgccgaagccgagtcaatctcattggctcgttttttctcattggcgtgcagttccagtggacatcggactatccgatgaacacaatcgcgcttggccttggtgagtactagacatttataacatcccggcctagggcttaataggattaatagaatacttatatcaacaagttgcaacttcttttccggaagccaatctccaaagaactccagggttaagcatgcttggcctggagcaatttaggatgggtgaccgaccgggaaattcttcccgggtgcacacgagtgaggacaaagtgtgcagaaaagatatgtgttagtctgtgagggcagtctatgacctatgaaagctatcagatgtaagcgggcccggcctgggggaaggcgggacgttacaaaatggtatcagagccgaatctcgcggtttcacgggcgcgtgtgtcgcagttgcgcaggcatggtgcgcatggctggtgtagaccgggagtggttacacagcatggcacatgcgctggcactggacacatggacgtggccaagagaggacgttcctggcctagggttgatcgacgggggcgtcgatctctcttaagggggagggtgtaacatcccggcctagggcttaataggattaatagaatacttatatcaacaagttgcaacttcttttccggaagccaatctccaaagaactccagggttaagcgtgcttggcctggagcaatttgggatgggtgaccgatcgggaaattcttcccgggtgcacacgagtgaggacaaagtgtgcagaaaagatatgtgttggtctgtgagggcagtctatgacctatgaaagctatgcggctatcggttcatctcatgttccgatcacctcatatacaacataataaatctcatctactacacccgcacatcaactatatgcactgatctagatcataaactatacaaggcggctctgatactagcctggagcaatttgggatgggtgaccatcggttcatctcatgttccgatcacctcatatacaacataataaatctcatctactacacccgcacatcaactatatgcactgatctagatcataaactatacaaggcggctctgataccagcctggagcaatttgggatgggtgaccgatcgggaaattcttcccgggtgcacacgagtgaggacaaagtgtgcagaaaagatatgtgttggtctgtgagggcagtctatgacctatgaaagctatgcggctatcggttcatctcatgttccgatcacctcatatacaacataataaatctcatctactacacccgcacatcaactatatgcactgatctagatcataaactatacaaggcggctctgataccactgttgggatacgcgtaggctacgatagcataaatcaaaattttttatcgcgtaaaccaggaaccatgcaagtattagatcacagatcattactattcgacgcgctgtgcagcggaagaagacgctgagaagtcgaaggaactctcgcgaagtagcgcgcgtcgatgtagaggaagtagtcgatcgcaccggctcgaccttctcctcctcgtgcgttctcctcgccatactcccacgccgatcaacaccgcaaacaagtggcgcctctaccggtatccacacgtacagggacggaacgccacgcgcagatgtgctagcacccgtgcgcagctagggttttgctcggggagggaagtgacggctagggtttctcacgtgatgttatgcctccgccggtcatgcccctcacgaatatataggatccatcactcgggcctccaaggcccgtaggactcctattcggatccctatccgaattaagctcatattggatctctatccaatccccttattccggcccattaagcgtgcgaccctataggttcatatatactcagctgtaacccgaaaactccttttcggtccacgcgtcaacagcggcccctagcagaacgtattgacccacctggcatacataaagatcatatcggctgaacctctagtgtatacttgtatgaacccctttgcctcacgatatcgattaagctcaaggctagatatgtgtcatcctctaatagctcaatcattcactcgaacctgttgatagattatataacttgtgattgactcctcaatcacctttggcatggccatgcactttcataatctacaacatcgaggggcccagagatatctctccataggaggggcaaatcccatcttgattattcatatcccactatatgtttcatagcatacccgaaaactacttttatagctacccatttacggagtagcgtttagcagtccctaagtaagctactacacatgttgagaaccatgataatctcaggtctaaagattcaacaccaacactaaatgagatcactgatgacacaacacatatggctcttgcagtgtctcatgttgggtctatcgaacaacatgttcaccaacatgtgtccacattattaatttggtatctctataccatgatccatgagacatgatcatcaattaatacatgtgctgatcatataaacatatttgttccacatatgatatttgatcagggatcctttagaaatagtaacaaaacaacataaagagtctcatgaaagaatcacatattcattaaccaataaggagttatctatttcaaggaacaatgtcggataaatatgtaaacatagtatgtgatacaatcatctctatgattgcctctagggcatatcactaacagcggcggccgagggcggcgcggcgcgaggcggcggcgggcgggagcggccgctcgcctggatctgccgcctctacctccctctgtcgtcgccggcgactcccccgtactccttcaacgcggatccggcggcggcgccctcccccgcggcggcgacgacctcgggtggcggcactaccgccatcccctcctcaccgcccctcccccctcctcaccagacgacgacctcggacggcggcgggggcggctctgccgcctcgggcggcgccgccccgcgcggatccggcgccaagggcggccgatctggagcctgtgacgacggcgggcggcgagggcggccgatccggagcccgtgacgacggcggccggcgggggagatggatcctatgctggcgacgatggcgggcggcgggggcgacggatccggtgccggcaactccggcaggcggcgggggcgacgaatccggcaccgtgcggtggcgggctagggtttaggtttttttatttttattttttttttgtttgctgaatttaggtataagcaaccgcatgcgaaaatcccattttcgcatgtggttgggccggccgcatgcgaaaagggtgatttttgcagaccttctcccccatgcggttgccaaccgcatgcaaagataccgcaccagagaaagccgtgtcgtatcttgtcgatggctttcagcacccatttcgcggggggggggggaatggcgatgagcaagtaaaccggatcgcactcagcattgctttgacaagtgctaggcgcccggctggctggagccaatttgatctccacagtggcagccactgcgcaatcttgttaattggaggctggaggtcctcacggcgcagctttttgatggagagaggcaaacccaaatacttgcatgggaactcctcaaccgggcaagtgagggagtcatcgagggctgcgacctcttccttcgagtagttgatcaggattgcggaacatttggtgaagttggtatgaagaccatatgcctctccaaagagagccaggatcccttgtgctgcagctagttccccagcaaccggcctaaggaatgcgaccacaccatcggcgtacaagcggatccggtgagggatacctaggggccataggatcccatcactgatatagtttataagcaaaattggtttcatatcatcgaaagttgatctttgaattttgttacaggccatcgaaagttttcacatttatttattatgatactgagtatcaaaatcagtattaacgatcgtcaacaatgctaaaatatgtaagctccaattcattcgccgggcaagctccttaattttttataagacaaaaagaaatatctaaaaaaaattaacgatcaccaacaacgctaaaatatgtaagctccttaattcattcgctgggcaagctccttaatatgtaaaacatttgcttgactcgtcatccaaaatagagtatggacctccgatagattggcaacctgtgggtagccgaatggctccgtctgcccctttgtcgaaggaaccaggaaacggccctccacctcctggtggagtgtacatacgtgaagagaatctgggcggcactcgcagactggtcggcatatgaacagataagaccaacatcgtagcaacaagcctcgacactactcaagtggtgggaggccaccgcatgtaccaatgaagtgccaaagaaggccttgtggactataatgctattagtcgcttgggagatttggaacgaaaggaaccacagagtcttctagcaccaagagctcacggtggctagtctgatagccaaaattaaggaggaggccaaaacatgggtcttggcgggcgcaaaacatctcggcaggtggcttaccttctaacatgttcgggccaaaggccttgaacctgtaaagttttctttttgcgctttgcgtatgtacagttttactccttctctgttcaataaaattggcggctcgccagttcattaaaaaaataattgatcgttgtcttgcagcaggcatcaagttagtggcggacagatgactgcactaaaattgtagcgaaaagtttaaaagtttaccaattttttgttaaaatattcttttagaaactatgacatacattctagaaaaagtgtccgtgtgttacaacgggaagaaaagacgagaaaattgaggaaagattgagaaagatttacattatctaattaattaaaatacatattttctagaatttttgggtattttctaagtaggtaggtatataattaagttaatttacaagtaaaataagtgtgagaaataaaattatatggttggatttaatttttattaaattctccatattgcttacactttttgaaattttcttagaatttccagatcttaattgctaattttgataatacaaacataatttcaatatttatttaaataaaaatcctcctttttataagagccatttttagcccattttctttttcaacccgcaaccgagccggtccgctttcctcaggccgcgagcaagcgttcagcccaggaagcaactaaagtctaattgatatccccctactcctcctcaaacttgccgtgtgggccgtaaccgaaaatctaaccatgttttgtgttggactgctggcccgcgtgcggcccagcaatgctgcgattcgacaatggaggtcggcccaacgctcgatcaatctgagccgttcattttgataaacgactcagatcggttccaaatcaatcaaaaccccccatgcaaaaaaaaaaaccctaaccctagatcattcccactccctaccggcggcgcttctccccctcccctcccctcccctctcttttccctactggcggcgcctctccctctcccttccgtcttgccaacacggtgcggccgtagagaggtacagcagcagagacgacaatgacggccgtcccttcccctctccctctcctcgacggccgtccctccctctcggcctctttgtttctgtcggcgacagcgccctcccccaccatgagcaacggcagcgatgtcagcgtcggtggcttcctacgggcggatctggtggcggtggcttcccgcggcggatccaacggcgacgtcggcggcggcttcccggtgatgtttttgtttttcttcccgttctttttctctttcgctggattgccttattggatttaatatcgctacttcctatggctggtcgctcaccgacgctgctggacgactgaccgattggagaagcgtgggctgccgaacccaacctattgtcttctgcgaccaactggaagagacaatcgatcacattctgattgggtgccctgaatccctccagctatggtggactgtcctttcgagcctcggcctccctcagtgtttcccctctggcgctgattccttccatgagtggcactactcttgccggctcaaagtttcgagggagcgtcgtcatgggttcgatacgattgtgactcttggtgcttggtctatttggaaggaaaggaacagtcgtgtgttcaacaaccgttctcggttctggcctaaggttgtcacggccatggtgcaagaggccaccctttggcatctcgcctgtcccctatcgccaaagtttcctagttagggtgtttggtcattcagtcgtcacattgtaatagcgagagtaggcttaagttcatatattttcctttttccccttttctttcccgtctctcttctttgcttgctgtttgtataaattttatacctcttaatacaaaagtgcgtaatccttttacatattctaaaaaatagtaaaaagtatagatataaaacgatgaactgtatcggagtattgtattccttatattacaagcagcagaagcaccatagaagcggagaagagcatgagcatctgcagcaggctgtagcgaaggcctaggctgctggcgccggcgccgtagcagtagtctgaagcaggaagcgtactagtcgtagttgggtattcgccctcctcgctgccatagtacccaccgtattgctgctccgtcgtctgctcgtggtggctgtagtggtagtactcgtcgccgcactgcttacgctccctaatctcaaacgtccctgcacgtatatatgggtaataaaaaaaatcaagagccccgttggtggtcttaaaaggataaaaaaataataagtcaaagtaaaatttaagtttgaaacttaacttaatttgaagttaattttaatatgttttcaccacttttttttcagtattagcttttaaatagtaagaatacatataaaaaaattaaaacaaattattttttaatcgccaataagatgttacggtgtttataataaatttttgggtagttggtgacttaacttaatttgaagttaattttaatatgttttcaccactttttttagtattggctattaaatagtaagaatacatataaaaattttataaaaaaatatttttttaatcgccaataagcctttacggtgtttataataaacttttgggtagtcgatgaggccccaactcaagataatatattgtctgatagatatgcaagcatttggcattctagacaggatttataaaacattttaaactccaaaatgtgtaattttatactagaataaatttataaaaatcgtttttttccatatacatttgagaaatttcatgctgcggtctatatattttcttaatttgtgcgcgtcaatagaatttaaacaatttaaacactcatgtttacacagagagatatcctattatagtttttgttgtccaaactttttttttttgcacgtgatcttgagagttttttttaaaaaaaaatattttcaggaaaggagaatatataatttgttggactaaattaatatactataatttacctctgtcaggagtgtagctgcagccggtgtcgagcgcggccttgaccgcgggcagcgaggcgccgctgtagaacctgaagccgtcgtgggcgacctcctccacgcactgcagcgccatcttcgtctccatcaggcacggcccaccgcagtactcgtccacgctctccttccccacatggaacgccccctccacccccagccgaagctcctccttgcactcgctgtacacctgcaaattcaaaattattaattcggttcaatgatcaattgcgacatgcatgcatgaagaaacacacttgattataaacagttaacagttaattaattaacttgattctgtttatagctatatatatgtgcttacgttgtgatcgtcgaagcaatggcaagccttctcgaacatttccacggcagctttgcctgcatatgcgacgatgaaattaataacgatcgtgttaatgttagagaaagctgtggctaacttcagagtttgttgctgacatgcatgctgtatcctaatgtagttatgcaatggcaccaactagctagctagcagcatgaagattatcatgcagaaaaccaagaagaactagaattattgaggcactcactaccaaagcagcatgggagcaaaagacacactgcaattgcaaaggccaagcagacacttcttggagagggatggagcaatactgccatattgctgagttaattcgggagaaggtgatcgttgtagttgagcagagatgtaatttaggctagtgccgctgcatttcggcgatgaggctagctctatatcttgttatatatggttttctctgcttgattgtttttcgtcagagcatgctttctttctttctttctttgacaaaacatgtgcttgttttctatcaagatttaccagctgcattcctagtcctaccaacattcccaaggatgcccaattgtccactctttcattttgcaaaacttcattcaaaagaaatcactgccgtctagctttgagcaatgctatctagcagtaattatggaccgcttcattcaaaagaacattttgtgtctagctggagatttgtcgtaaagtttagtttgggcaattgctactgaattaattaggactagtaaccaactgttaacgaaggaatatgaaagaagtgcagttcaagttatacaagtcgaatccaacaccttgcaaggatcgcaacttttcttgcccaaatctttgtcaattccatcgggctaattaacaatcgatgtcttgcacgaaaggaggaagatctgtctatgcaaattctccagccaaccgctgccaatagattatttcaagaatctaaacatgggccagaactgggccatgcaaagcctgctctcctagctaggttgggccggtctggctgtaaatgataggaataagttcactttgtgaccctcaaaatgatcgaaatttaatccgtgaccccaaaccacagaaccggatatctcaacccctaactctcgaaaccggtgcaatttgactccctgggtggttttggatggcggtttcgctgacgtggcgcctacgtgacggttttaactcggtcttctttccacgtgacgttgacgtggcgcttacgtggtattagaaataaaaaaatatgtgtaggacccatttgtcatacacacggaaaaaaatgtgggagcccctgtcatgtggagcccacataatcctctcctccccatcttcctcctcccttctctcctctccacggacgatggagtctgcgccgacttgccgccggccaccgccttggccgccgccacagacggcatcaccaacacccctctcccgcgggttgtcgtcggcctcccccacccctccccgcggagacgttgccagcgcacccggcggcaggcgggagggcgggcgctggagcagcggcgacgacgaccccttctctcttgctctccttccttcttcaagcggtgtggcgacgaggagcagccgcggagcatgattcctgcggcggagatggcgatggcgcagtggaggccgatcggcctcgaggtagcgcgtcgtggcggcccacggggtgaggcaggcgtggaggacgcggtggaccgggtggaggaagaggtggaacgcatgtgggggcgaggaggaagcgaccggcatcaattatcacgacgagctgctttgggtgttcgtccacgccgatatcggctactgcttttctgactcgcgccaccacagcctgccataactccaatccagcatccaggtacagctcttactatacaattaaactaaatctgccattagttagtaactaagcttgattatatttgataatcagccagatgtacagcggatcttggctatctccgagatatacagcggtgatgcctgcatgacaatcaccggtgagatgaatcaagaactgatatagaatttctccagtctctatgccacggctcagagaaaggcacccgcctgccgccgccggaatcatgctccgcggctgctcctcgtcgccacaccgctcctcctcgtcgtttctgtttcgccggaacatctccgccgctggcccccatcccacggccgccgctcgccaacggaagagaaagagagagggggaggatgaggagagaatgatttacgtgggccccacatgtcagtgggtcccacccatacttttggtgaatgacaaatgagtcccacatatattttttatttctaacatcacctaagcgccacgtggaaagaagaccgagtcaataccgccacgtaggcgccacgtcagcgaaaccgtcctccaaaacaagggagtcaaattgcaccggtttcgagagttagggggtcgagatatccggttttgtaatttagggtcacggattagatttcgatcacttttgagggtcacgaagtgaacttattcctaaatgatattcacattttaaattttgtttttgagaaggaaaaagtacaccgaaggtccctcaacttgtaatcgagttacaaaatcatccctcaaccgaaaaaccagatatatgacatccctcaatttatagaaccgttcactttaggtctctcggtggttttgacactggttttgtccgatgtagcagctgagttagcgtgggacccacgtgggtcccacatgtcagtgaaccctcgactttttcccctcttttctctattctctccctcccgtgcacgcctgaaataggatggagtggcggagcgggcgggcggcaggtagagtggcggcggccggagcagctggcggagcacccccgccataaatcacacctcctccagcatcgggaggacttcctcggtgaggctggcgccaacggcttggccgtgcgccgcgacgtctgcgtcgtctgccggcgtggcgaggttccgctcgcgatgggagttgtggcggaggcaggaaggaggcgcggtggtctggacagccggactacaccaacacgcagccgacggcaaggaaggaggtgcggccgtcgatggggaatccggcggcggagcagcggagtgcgtggacagcgtgtcgatgacagtcatgtcgtcgtggtctgcgtcaggctgggcagcgccgagaggaagaagcggtgcgggtcggcgacgaggtgcgcgtactccaggtcgccctcggcgagcgccgggcatggagaggcgtgaccaccacggcgcgtcgcgcttgtccgcgtgcctgctctgcacggcctcggcgtaccatgactgcagctcgtagtccgcctgcacggccttgtcgctcgggtagtaggccgccacgtacgcctcgctccaccgcgagatcgccgaccagaggcagcccatcggcggcgtacgggtattcctcgatgagcagccggagcccgtgcggctggctcgggtcctccacggccatgcctctgcacgacacaaccaaatgcccatttcactcctcgccggcgcccaacgaccaccgctgttgttttccctaaatccggccaccgccgctgccccaaaccccagatccggagtttcacgccgccgcccaaggctgctcttccgaccgccactcgcttgcacgtgggggccacttctctgagccctgcgccggttgctgcccttcaccgccggagtcgcgactggtgaccaccgttgcctcgccgcgccgagcgttgctcggcgcgagtgagaagagagcaagagagagacagaagaaagaaggagagcatgatgatgtgttcactggtagggtccacgtggatcctacgctgactcagctaccacatcagataaaatcggggtcaaacccaccaaaagacctgtggtgaacggttttataagttaaggaatgtcatatatctgtttttgtggttggggaacaataccttcggtgtactttttccttttgagaatgatttatatttgtattatttttatgtggcacttaataaatatgtttatatccgtggataaatatgttctattttttttgaggaaaaagatgtggtaaatatgattaacaaggtcaactcctttcttttgcattgtactattggagagttgtgtatcatattgcaatacaaaaatacaagatcaattcgacttttcgacctgaatggacgatcaagaaaaccggttctcaaccgtcgatattaaggtgaaggaaacaaacacgcatcaaatttattattcatcaaatcaaaagacgtacaaattacagattgttgttacatgaaatcagcactggtgcgtgggttgtagaaatcaatatcaatatgctacagtactattcactattcaggaaattaaaaagaaaacacaacacatctttgaactcttcagcaacgtttgcctgtgtccagtcaaaagctgctcgaacagcagcaatcaatcaggccatcagccttgttccagcccagacgattagcagagaggaaaacaccctcgtgaggctgacagtgggcccagctgctccgctggtcggataacccggacgctttaccgccacgtgtgagcctacatgggcacatattcatcaaacaccaatgtttagatgaccagtgtaaagcatagtaaaaacaaataacccttccttcagaaatattatttgatatttataacaaatttgattggaattttaaattgccgctacatctccagacgtgacatattgggacggatggagtaatgatagtgattttcaagccgattttactctttttatttcttgtcttaaacaggtcaaaattttaaagatttaatcaaatcttatcaaacatcgaatatatttctaaatggagagttaagagtaactaattagctggtaatctgctagcccaacatttttacctgaattaggagaagcattccccgatccagcgccaccaccagtagcaccgccggcgccgccgccaccaccaccactaccgccggaggctcctgcactgccaccgccaccgccaccggcggcggcgccggcgccgccctggccattgacgttgccgcaggccatctggaagacggcctggactccctgcatgaggcccgggctgtagccggcgaagttgccgaagatgccgttcacgcaccccatcatcatggtcatctgcccgaagcacggcgcgctgcacatggtcgccgccgccgacccgttcgccgccgccggagccgacgtggtggcgccgctgccaccggttgtggtggtgacgttgatgcccatcgattgcaggcacccgttgatcacctgccacaagattaattaatataattaaacgttttttttcttcatttagttgggtgatgagcgaacgtacgacactcaaaagtcactgacactggtaatatacagacagaggagatcaccggccatgcataatttgtaataataatgttaaatataagaaaaaaaatgcagtattactattatgttaattttatcctaagctgaccaaattgtagaacaattgtccacgctgtaattatggaaaaagcgaattgaacatctgataacttattataaaaaaaataaacctttttggctatgagcattgtttgttttcaaaaaaagttaatagtgtgtctatttccataattatattaaaaattggttcaaaaactaagagaagtgctagtttgtttttgaactatatacttccctccattttcttaataattgaaagcaagcactatttatttatggatacgtcactttgtaaatatttgcaaacaataaaaaaagatgatttgttattaaagtgtataacgtcctaagtatatgtatggagcttttgttcactttagtctaaccatctaagaataattcgcagccgaatttcatatagtaaagttaggattgccagttgtttaaaaacgaagaaagtaataattttcaggtatttgactgtcgtgtacaaaatgattgcacatggtgtaccagcctaatttaaacaaaacaatgtaaacatctccatcctttaatatagctacatcgaccttaattttttccaagttgaagtgtacacactaggagttgcttttggggctgaaggtcaatgcttattttgcactagtgacacagtgacaccctaattaaattaatgtttcaaggccattatacatcccaattggttgaactaatataatttcactgaagagtgccttttgcattgatctcacagtatgcatgccacgcactcagtcactttcattctgcatagtttttggtcagtaagaatctctggatccatagaaatgttctatgatgaaattcaaagtgaagagaagagaatggaacttacttgtctattgtcaaagcagagagcagcttgtgccacaatctggattgcatcctgtgtccctggaactactgcaccaccaccacctgctccccctcctccttgccctgcattgttcagataaatacagttacttaattacttagaaccaaacagatggagtgatgatacttccaatgcaaggatcgtaaaattccttcagattatatatgctgaaaaatccctcaatacccctatctggaaacgttaaaactatggcattttcaaatttaaagctgatcatttccaaacaagaccaaagtcctacttttgaacaaaaagacaagaagccatgcatcccatatgttaattaaaagtggatctaagatagattaattacctctacagctggagataccaatggagaagagcaccacagtgaggcacacatgtctgagcttgagacaggccatggcatgcaaggacatgcaactgaatgaactgatcaaaattcagttactactccctcacagcttgagattctgcttctagcacacctagcctgcagtccctctttatatgtgcaggttatgcaactgaattggcaacaaagctgcttataaaatgcagcactggattaaagaagcatggcagccttgcttcttggggaactctggatggctactgaatatgaagcaaaatgtgatcccttgaaccatttggtgagttaatattcaggcagaggcatatggatcactgggagatgattgcaagctagtcccaattgctataaaaaccatgcatgacatgggtaatggccattctgtgcaggtgtttggtacacaagaaccaactacccctcactagtttcctagacttggtcctgtgttggagtgtgcacaaatcacacctaaactggacatcgattaattggttaagttcttaagtttccagcctagttttgttgactatgctggaccttgatgtactttggatgtctcagttgcttccagtgagctttgagctcgcatgagaatgattcgtatcaaattaagtgcttgtttttctaccatggtagacgagttctgtctggttctggtaattgtgacgtatggcttaggttatatgcagaattgaattattgaaatatcgctaaaacggactatactgaaatttttattgatttgatttcttccaaattaccaagcaacgacatagtatatatagctagtgaaaatgaacaagaaattgaaatacaccctccggcaatgaataattgacgtttacagtaagttttggtcaaactttaaaattcacttctatcaatttcatattagaatcagtttaattataagattcaataggtttataatatcacggtagtacttttcgaggtaaatctatatatatacaatttcatttggttttaaactacacatttgagaaactttcgacggtttaaattttaaaactttgatcgaaccctactctaaacgtcaaatatttataaatgtgctttctccatcttaaaatatatagttcaactttgaacttaaaatggcagctatatttttttttagtgatagctatattttaaaacatagaaagttaattaagacgctgatcgggttagcggtggtggcagcggttattaattgacatgatgatgagtcatgggctcatcaagcatgtggagtggaagacatgcgtacacagatcgatgacagtaggcagttccttgtgcttgcggggggaggggactgaaggggatgccaatggccgttgagctcaccttgactcgcctgccgattgttgccaacaaccacaacctgccaagaacgcctctcgcaacctgattcccagctagccgctatctcgcaacctgattgcctgcaccgctagctgcacgtatggaaatacatattctaacttaatatcctttaactttaaaaggtttatatgtgagtcccacagattatggatccacatgccggcgatccatattacagaaccgacgtcggaggagcctctccttgaacgcacttacataggagaaaaatggcttggaaatggactaacaccaactctgccatatctgtttttatatctttttggaatcggaattgaaataaaaaccgtagataaaaaacataatatgatactgatgaatatagatacggagcgaatattgtaactaatatttatcggaatatgaaaatagaggttgttgcttcttctttagcgaagagatgtgcctcactatttttttctaaaacaataaattaaaattcctattttttatcaattaataatatataactagttttacactttacttttcatgaaaattacaataagcaagaactatatattagtcagtacggcatggtctaataaaaaatagttattagacaagagaaaagcatatctaaagcattggtagaaaaaaaaatccattcaactaaccacctcagtactgtgtacaaatctgagcatctaaagtagagaatgatcaagctaatcagctacataaaaataatttgtttatgtttgtgagaaaaaaaatacaaattcgtttttggaaagcttgcaaccgattctggtttccaacgaatattagccttactatattcgttttcgtttttgagaaaaaaaaatctaaatgcatttctgtttccgagaaaaaaaatccagattttggaaagtatctaaccaattccagcttttgacgggcagtagtcttcctgtattcgtttttgttttcaagaaaaaaaagaatttctaaatcgttgttgttttcaaagctttaaaagaaattccaacacttttcgttcgaaaaacactagttgaagccgaaaacttttcgaaccgtttgcaccctacgtgcgtacacgctcgatcgagagcattgcgtcgccaccaaaccatcggacttgggtccgtcagaactcagatcgatcgatcgatgcccgcagctaagctcccaaattaacctacctaggtcgggtacgttcgtgctacctgcctgtacgacgctaccaatcaaattggctactgatcatcaatagaatctactacatgcgtagtgacgcctagcttctctccaaacctcacacgagcctgcatgcaggagctacctacaaacacgaccagagcagagagtgcacacgaatgaatgcgacgcggtaggtaggtccttggatcgatcgatcgggcttagcattctagaagggttttgctctcaattcccggctgatctctcacctaaccatcgatcgatcgagctagctagcgttttacatatactcctatgtgcaagctttaaattgttcactgaggcacgaggcagcacgcgttggtaatatactaggatgcatatatgtggtcactggccataagcgagcagatcgaaaaaacaaccaagaacaagaacgagataaaaccaatctgataaaaccaacacgttacaaatagtaagttggagctctaaataacaacgcgtgctgcaacgtataacaaatgataagttgagacgcacgctgccggtgaatcaaccctattcctacaagcaaatcaaagaaataagcaagaacaagataaaaccaatctaatatagcaaataggaattgaatacaaatgataagttggggttccaaataacaagtagatgggtggtctagccaacacgtgcctgcaagcaaatagcaatggctaaactttaatctaacaaacccaagaaatcctggagaggtacctagctattttataaaggtgggaagaacgatttaggggtccctagggtcgtgcactcgcgctctacctggttaggatgcaccccacatgggccccacttaagccagggtcccaaacaaaattacaatccctctagggcgaggtcggggagcgcgagcagctcggcgggcaacgcgcgcagcgcgtccaccagcggcgtcgccgccacgagcgggagatacaccgacgtgagcttctcgaaggtgtggtccaggtgccgtgctgccacgtgctgcgccgccgtggtcttgccccgtgcgtgagcagcagccgcggtggccggcggcggcgtctctttgcctcaagcgaagtcaggatgcccaggtactagatggccaatggcggcgtctcgtttactctctcttgaggtatcacgcctagtacccaggtactatggtctgatacctaggtaccagctcgataccagggtatcggataccaggtaccaactggtactcaggtactgggtacaaggtaccaggtaccagcctataccaggtatcagaaaggagtcacttaaggccatattgctaaggaaaaagtgcattgaaggtcccttcacttgtcatcgggatacaaaaacgtcctcgaaccgcaaaaccagatatgcggagtcccttaactatacaaaaccggtcacccgaggtccttcagtggtttggacctctgttttggtctacgtggcggatgagttagcgtgggacccacgtgagccccacatgtcagatgtccacgccaccttctctctttcccttcttctctccctttctcatctctctctctctctctcacttctgtgcgagctggccggggtgaggcgggagggcggccccgcgacggccaccggcagaggcggcgtgcgagcgcggcggcttctccgctttctccgcctcctcgccccgctcggccgacgtggggcgcgctcttgtcgtcgcgtgcgccggcgaacgcgtcggccctgtcagcggcgccggcgacgagtacgcgcagtgggacgcggcggtggggtgcagcctcaccggctcgtggtccagcacggcgcgcccatattctcaccgataaattaagcagccaatcgagctagctagacacacacaatgagcaagcaaatgcaagcagccggtggcacatatatatattcccgagcggccggcaaatgacgtcggcagcggcgccgctattagaagtggtagtgcgccttgcagttggcgtcgcagtcgtagaagcaggggccctcgcactgcatctggcacaccagcagcgcccctcggcaccgcctcatcgctgccatgcaccgcgcgtactcccccacccggtacagactcgagttgtagctcggccgccgcccgtgcctcctcccccgccgcgcgctcctcatacccacgccaccgccgacatggccggccttttccctctccgccctgatgcccttgccggcctcgccgccgccaccgccttttttgccacctttgtagcgccgtctaccattgccgcatccccaccagcaccttcttccgccgctactgccgccaccgccacctccgcctccactaccgccaccgccaccgcctccccgtcctccttcgccgcctcccccgacgccactgctcccgccaccgccgccgtcagtgccccagccccacccccatccatagctccaagaactccccccgctgcttccccctcctccaccaccaccaccgtctccatccttccggccggccacagtcgccacaccagccacaccacgctcgcacgccgcctccgccggcggcggtcacggcgccgctctcccgcctcaccccggacagcttgcacagaagtgaagagatagagatgaggaatggagagaagaggggaaagagagagggtgacgtggacacctgacatgtgggaccccatatgggtcccacgctgactcatccgtagaccaaaactggggtcaaaaccaccgaaggacctcgggtgactagttttgtatagtaagggaccctgcgtatctgattttgcggttcgaggatgttttttatcccgactataagttgagggaccttcggtgcactttttcctattgctaattagcccgttaaaacagctcgatcagggcccaaacaatgggccgaatttcggcccatccaaccacgggcttagggaagccatccccctcctggcctcccctatataaactcgccctcgagtccaagccatccccgaaaccctagacgccgccgccgacctcctcccgtgctcgcgacttctctcgacgccggtaagagaaccgtaccatctcgtctcctcgcgcatccgcccaaaatctcctcttcctcctcctgtttctcctctgattcgtttgaccctcatctgctattcctgttctaggtggagtgagagagagagagagagatcggagatggccaagtcgaagaaccacacggcgcacaaccagtcgtacaaggcgcacaagaacggcatcaagaagcccaagcgccaccgccagacctccaccaagggggtgcgtctctttgctccttccctctctctcactctcagatccagattccctgcaatcctgtagccttgccttggtttcttgcaaaaatgatgttttcttcatgtggacatagtaattcactgcaaaaaatttgttcatactgtgttgccttttgtttgaattacagttcgaataatgtgtatatgtggctagaggcttttggaaatgttcgaatgacagttctaggttttccatgttcgaatgacagtgtcggttagactgttattaaaatctccttactattgagttaggcattatatgcagttgtaatgtggttatatgaaaccgtacgagttgcatcgatattagacaggaatttgttaggtgcctatctgagttttcctgcgattaactgtgtcaatttcactgcttaagttctcaaaatggctttctactcctgtgtcacttagccttgtggaattggatattttgcttggttttagccctgccgtttgatgattattagccaaagattaagtccaacgttcattggacccagtgctcaggtagtttgggcaatcgtctgtgtatgtcaatatacttttctggacagtataaacaatttaatcacaagtcgaagcgactttgaatttgtctatatagtcttgtggtgtgtaggaatctattttgttgcttattcttgcatcctattttgttcttaggatttattttgttttcggaaatcaattcaaatgtcctcgctgttatgttgaaattgaatcctgttgccttgtttccgcgttcttacctgggttctttgtaaattgcttttatagatggacccaaagttcctcaggaaccagaggtactcgaggaagcacaacaagaagagtggtgaggctgaatccgaggagtaaggtggaggagccttttggttatgaatgtttcttgtatctctggatctacagttttgaacctatttcactgttctgtaagggcaaaggagattactatggtacttaagttttatcatgcgtagtttggctctgtgcaacccagttccatgctgttggattgcacctgaaatattatcttctataagaattggttatccatttttaaggttgtcttgtttgcattagcacatctcaatattttgttgtgatgcctggatgactggaagtgcttcttgactgcttacagctcgtgattcgtcagaatgtgttatcttttttgtctttctgagtgtatggtattcgtggatttacatgcttatttgaattatcatccccaatccacccgtgtagttaccttggatgtgatttgtcattcactctggttgctgattagcctttaagaacagattcaactagatggatcccaaagcttctgctggtgtataaacttgtagcttgtaggattgtactgtatatcttatgtgaagacgctcgcttgtagcttgtaggattacatttcacattcttggggctaaaataggaatggtgtcatatttgggtctaggaatgtagctgggttccttgtggaatttctttgttcctatgggcattgttaggaaatggagcccaatcttttctttttcaacgtgagcgatttggggaactagaataaccgagtcaatcttagatagtaatgctctgatgttgcacagtaactgaagcaagcctagcatttgcatatatacattagagagtgcaataatgttgttacttgttactacaaggaaaacatgtactactacacatacacaaactctgcaccaaggccactatatacatacacccatattatcacaacattccacagattgcatcctggaccgcggagttggcgcatcaagaggccttggcgttggtgccgggcctcttgacgacgacgacggggcacttgcagtgctggacgcagtggttgctgacgctccccagcagcgtcctctgcaggaaaccgtaaccatggctccccatcaccaccatgtccgcgccggccttctccaccgccccgcagatcacatccctcgggtcccctttctccacccgcgtctccaccttcacctgcacatcagaggagacgagatgatcagtcaatcgtaccaccataagtgtgattcgtgtgtgtacgtcttccatgtaattgactttaggaaaaaaaaatcctccgcttgtaaggcccgttggtttaaggcaattgaatggtaaagtcaaaaaaaatcctccgcttgtaaggcccgttggtttaaggcaattgaatggatattattaacatagacattgagaaaactcgttagcacatggttaattattataaaattaaaagacgaataattagattttctaaaaataacttctagacagaagtttttttttgttagaaacgtataatttaaccgtctaaaaaacgtgctaacggaaaacgagaatgtcaaagtttggagttgagagaaagctaagttacattggggaaggcggtgcagatgtcgcgggccttggcgacgacggagtcggcggcggtggccatgtagcggtccatgctgtccatcacctcctgggtcagcacgtagccgccgccgtcgatcaccgggtagtagagcggccgcgccggccgggcgtggaccaggaccacggccggcggcggcgcggccgcgggggacttggcggcggcggagaccacgttggagaggcaccacgacagcgcgtgcatgctctcctcgctctcgtccaccgccaccaccacccgccgcggcgatcctcctcctcctcctccggtgacgttctccatggctgccggattaattaactctctgatctcttatgtggtttcaattgatggctactatatatggtgacaatctgacactgtgtattgctaatgctgaattgctgatgattgagcaagccggagagctttctatatagaacatggatggatgcttagctgatggcgggctggcggcaggagtaagctagcttcggtgatgctttcgaacattgctgcttgacggttttgcccttcagttgcggaatatctttgggataagtatgagttgaaatttatgattttctagggggcgattttcatgttggtaggaagtttctacagggtaggtagtttggcgctagggacatgtcgacatgaggaccaattttcgcgcaactgacgagttcatttttgttctaaatagatgatgcatgatctaattctaataatattagaaaaaatatccgtgcgttataatagaaaaattattttaatcatcttattattatacggtttagttaatgtgaaattcactataagaatccgcttgaatttgtttcttttataaaatcatgagttgcaattaagagtttgatcgtctcaagtaatcagcatgcaagtttttttttaaagagatttcctatacgactcttttttatttccaaaagcgaatgaacttaaaaccgactcaaacaatgatctatatttctaaaagcgagtgaatttaaaaaccgactcaaacaagatgacataccaaagtaccagtaaaaacatctttaatttttataatagtagagattcgagggtacaaaacgaaaaatagaagatttctctctactattataaaaattgaagatgttttttaccggtactttggtacgtaatttttgtttgggtcggtttttaaatttatctatttttggaaatacaaaataaatcgtataagaaatttctttttaaaaaaactcgcatgctaacttgatacgaaagtcgaactactaattgcagcttataattttctaaaaaatatatatcctagcgaattcatatagcgaattttatcctagttaaatcgtataacaataataagattaaaatagtcttcacccgttggaacacacggctatttttctattaaaagtattataaaaaaactcatacatatagtttttcttaataaatagaagcttaggaagcatgaagtgattacagtagtagaactcacttaggtcccgttcgtttctccaacaagagttggacgaagataaagatttttatggcacgtttttcaaactattaaatggtgtgttttgtgcgaaaactttctatatgaaagttgttttaaaatatcagattaatccgttttctaagtttgtaataattaaaactcaattaatcgcacgttattaccacctcgttttgcgtgaaacacttaatctgatatcttcaggagattcaaacaccatcttagcaatattttgtttaaattctagtaatatgtttcttttaatcccgaataaacggactatatgtattttgacgttgatcgatctttcagtggttgcacattcacatccatctagaaatgaaaataagattgtatagaagaaggttttggttggataaggagaagagggtcacactggtaatttgtttttttttggcaggtcagcaaaactgcgtgctgcggcacaagagtcgccggttttctcttgcacaagcagctgccgatatcctgcaggccgccggactggatagcaattagcaagaatgtacgcacgacaagacagacagacagacagagacctctctcctttgtgctcgcagcgtgacggcgaagtagaaatatctacccacaagggcgaacgtaagattttgaaagtgtgggtattcaagatttatattacaatattttaagatacatatttatgttatatatgaaaaagaggatgtatctattgaaaagtaataatcagaaaaaaaaagacacaggaagaatggggattgaacccaacgcccattaaatgtactaaccaattgagtaattattattattcttttgcatagatggatagctacttttaaaaaacattgggtattcgtatgaatacctatgatcccttttgtgctcgtctctctgtctacccatctacccaattctagtacccagttatccaggtgcagagcagttcaataaattttgagcatctcaaaccgtggctccaaacgtgcatcgcgaactgtttatttgaaatttatcaaaattccattcgaattaattaaaacgataatcgaagccttggacaggatttaaaatgataaaatccgttagccaattgagattgtaagccccggtgtataggatatgcaagtaccagcagaagaaggtggccggccggggtctcatgatcttatccaaactccaaaccaaatggattagatacatccagcgggggagctatcgactcgtcgatcaaaccggccgttttggtcccctgaatagcttggcagcttgcaaagtgaaaatacatgagtgtgatgagtgaaaggggtgagtcatgcaaagctacaaaaatgcatcgatctattcccaactaatggtacacgcacttgcacttggaaagtgagttgggaatgcattatttttactgtaggaatgactgtagaaggggataacgattcttttgtaagacacgcggcacgatcagatttgttatggtaacgagacagatctggtttgttttttttttttaatcttgaatcttgacgagctactaaaagattagcttggcttgcctggctcggcgagccaatgtgagctatattgctagtgttttttttaaagggaaaattacaaaaaccaccccaaatatcactctgagtttaagatgcctccccataagaagatttgttgcaaatccccacctcctaattcatcttgatttgatttaggcacattctctccacatatgcgtgattcccgattcatcggcggcaattcgggatttcaggatgacgaagcgacacggctcggcctcgatctccgcctctccggtctcgcaagtcgcagtcgcgggcagacgaagcgacgcgcaatcgcgcacgcgcctttgccgctgatcggtgattgcatcatcgcacgcgattgaacttctgttgggctgcggctgggctgggagagagagaggggggtggtaagtgatggggccccctctgccctgggccctaggcggtcgcacaaccggcctatgccctgggccggccctgttcccgaagaatcttgtagcgaaatcaactgagtcccactaggcgggagcaagagattatgttgtttgttctgtataagatgatcatttcattgtgttatcatggatattttcactgtgtttttcatggtatactagttatataaattcgaaaccgatatcatgtgtactgaataacaaatccattttttttttcacggacgtaatgagcatacataaacatttgaacacgaagcagtaatcatatagctagattagaactgcatgatttcatctgttgcaattggtcagatgacccaaaatagtaggtttcaatacagtttaataaaaaattaaggccacacaatctaaacaagagacctgttgacaaatcatcacgatgaacgggacttggctaatttcaccacgagatactccaggattcacgcatgtatagagagaagttgcctaaatcaaaccaatgtgaattaggaggtggggatttgcaacaaatcttcttataagagggcatctcaaacttagagtgatatttgggatggttattacaattttccctttttttaatgatgaaaaagagttttcggcctttatttgataggaagctagagccggattattacaagtttgcagcacctcagtttagatcactagaacaaaataaggccaaacaaaaaaatattttgaatatttaaatattcattatatattagcaaaatgggaagtagggagtggtaaagggtatattaagtaagcacaaatcaaataaagtaagtttaaagaaaaagataataggtaaaatagataaagaatggtgttaacatatatatatatatatactgacaagcttaatgcatgatgatgagtacgtagcttacaacttggttcattaagctaaagagtgttgtcttataatataagagattttgtttatttagttatataagttaaatctcttatatatcatagcacgtagttagttatagacagctcaattcggcttgtttagaacccgagtgcattcgtccaaaaaattaaaaaaagacctcgagtttgagcgaatagaaagttttgagtcacccctagatgattgtacttgtttactgtgaacttttaagttgcacttcgaaattttgccacgacttaaaaaagaaagaagaaagaactatgaaaaatggttcaatttcaccgtgaaatagaaaaggtccatggaagaggtctagaaagcaccctcgatcaacttggcccaacctagcaacttccgatccaaagctgatcatatcagagaccgtcggcctggctaggcccagaagcagcaccgatttggagctggtcttcgcagcccatgtccggcccgttcttcttcttctccttgtttttttaaagtaaatttcagaaaagagactatctaataaacgtttgcaagttttttgggtgaaaaactttcaaatgtaaagtagtgtaaaacatgaggttttctggaatttgccctcttttttttttctgttgcggaataaataagggagctcttcattgtctgtcttatccatatgggcatggcttcacaattgtttgatgagattataccactggaaaactggcgaaatccagtgaaatttgaacacatttcaccaaaagttttgaaattttttgaacagaccggtttacctggcgctttctagatttgagccggagtgaatcatctggaaactaacgaatatcaagcggttttcatcggttctgtgaactctgctctggtttaattaaccaactagaccattgtccatcgctctaggcttgctttgcaaataaatgagagccgtctcattacaagaacaggaacgaatgaaagtttacagctatgcaaattcctacccaatctcctcaatttgtcccaggaccacttctattttctgagcgatgacccagatggaccatttacaacaattccactagatttagggaatcgcatttaacaaagaccacctgaaaaatcaattaacccaaattaccttaaaagatatgaacaaaattccagctaatgcattatcatagagtattttgcaactcacttcgcagaattgttgacaaatacatacttttgctgtcataataaatctgtgaagaaataactatattttaagggaaaaaattaacgataaaagtatatttaggactacgggagtatatatattacaccttttgtcggtttatagacactgagggaaagaacacattaggaaaagtcctaaaagaatatttgcaattccatgtaagtgggaaaggaaaaagggaaacaaaagcatttgcaaaaggggaatgcttgtgctcaaaaggatgagtggattatcttatctctgccgtttcatcatgtcatgaggtggcattctagtgattattgcgaccgttactggctctttcattgtcttctttcattgactccttttttattagttaggtattgaggcgtctcaagtaaacaaaaaaagaaattaaagataaaatagttatccaccagctggaaatatatatataaatacaaaatatttatcctgaaagccaaagattacgcgcctaacgagcaaggcgaacgtgcattagttaggctcatgataaatggcagatgagaataccagatgacaaaaggtgacagtagttaggaacaaaatgaaaggttttatctttttctttaacaaatggttggtagtagtaataggccctatttgggggagcttgtcccagttgcagtttttcccaaaagatgcttctgctagaagctgccctaaacagtccacacttctaagaatctgtagttacaaattctgaaaaatgaactaagaagccagaagctggagaagctgggtttcagagtttttttagattctcagaagctgactatcaaacagctgcttctcagaatctaaagctcccccaaacaggccgatagactagtagctggtgggccccatgacacagtcacttggattttcctctttccatgaggtgactgcttgcatttggtgttattctctgccatatataaacaccaccattggtcgccatggagaaaagagggagagggtgagagaaagcagcagcagagcatatcttattgagcagccaagaaagcaaggtattggaaggaattgaggaggagaggaagtgatggaacagcatgagctttcttcttcctcttcctcttctgaaccctcttctccttcgttttcttcttcgtcttcgtcatcgtcctcgtcctcgctgctgaggcagtgcaggatttgccatgaggaggaggatgagtggtgcgctgcaattgagtccccctgtggatgctctggctctctcaaggtaggtacaaagttacaagctgatcaagtgatcatccatccatgatccttccctgcatttcttgtagttgttacatgcatgatatggttcttgtgatgattaatttactagtttgttagtggctaaaatgatgtgtttatggtttgtgtttgttaatttgtgcatgtgcagtatgctcacaggggatgtgtgcagaggtggtgtgatgagaaggggagcacactctgtgagatttgcctccaggtagactcttctttgtgaaagtttgtgtttgatcattagtgtaccatatgacctattcgtgtataatgtgaaacagctagccacttttattggggttagctagaaaggtgaaatttgtgcaggaaaggtgccaaacagctagctccttttttcttgtttatttatgatttgtaattatgtgtagctgtgcaacattatgtttagaggataaagtaacagatttctttggggttaaaagaaagttagctaatgcttctaatcataagcaaagtgcacttttcttgtgcaaaatgtaaacttctgccaacctttcataaactattacactagccgcctaaataagacattctgaaagatttttcatgcataatcctgtttttttaataatacaagatgcttttcttgacagaattttgagtcagattacaccatccctcccaagaaagtgcaggttgttgaaacggcagtcactgtcaggtacctcctccatctcttgcattgtcaatttctgataggaaaagatcattaagataatgctcttaggataaggtgtttctaatctaagcctatctggctagtagtatcatgcaactgtgaactgtcaacaccagtaatgtagcactgtacatgcccttaaacggagtcttaaatcagtaggtaacactctgttttcaaccaaggaaccaaccaatcatgcaatgagagacaggattagcatactaacaaccagtggttgatgagatgatctgtgtagccatttattaatgttaagatggccactcaggtagatcccccaagatgtcctagataagccacaggacccaaccaacaaggcaagtataccttccaaactagggaccacaatgacacggtgacagctcttaagatgttaagatctatcaataatacaagacaagaaatgcagtaatgcatcttggcatattacattggcctgattagtggttctccaatgagattacagagataaagctgcagctcagttttcacacagaaccatcacaacaaaatataaaaagagagaaaaaaaaaagaagcttcagctggcaacatttccacacagaactacactgaccaattgcgttaggctgtgtgaaatgccattatctgaacaaaaatgtacaatagggcatcatgccaaaaatgaccagatagacagccaaatcaaaccgtgaagtatgagctgtggatgcatcggtgaggcgtcctgtcaagagcgtgcgtccaaatcacacggtgtcaatgcacaaatccaccttcccggccatccagcattccagctaacgtggccaccttagtcacactcacatcatcacccggggttgcatcttgctgcaaggtttcagcagttgcaaccaccagatcggattagatgggggacacatgtgccaactcggtacactgcctgatgcagagccttcttttgcagagacgaggagatgctccctgaggaactctctcaggaggatcaggagcagtatgcaggatccgaggcgcagacgggtaatggagactgctcctcatggtgccgatcattgacgataacggtatgagacagctgaagcgaaattgtccattgtctggcaggccgttcagggtgtctcctggattctgatatcatctgtgattcttgtgcagttcaccattatgctgctggtgtggcatctcattgcagtggtgacaattgaagcggcggatcactgtgcattcagccttgtcacagtgagttcactatctcaacagaggagtaaactaatcaattgaaattaactaactggggaatgttgcattgcagatattcttacttcgggctgctggaatcttgttgccgttctatgctatcatgcggatggtccgcatgattcagcagggccaacgacagtttcggttgcagctgcttcaggttagtcttgactgacttctgctcaatggcttataggagcataatagtccgcagtcatgataccttctcttcctctgtttctgcaggatcaacggagaagaaacgcatcaaacttgcacagtatgagtggccaggagcagcaccagcagcttgtaattaatgttcactgaacaaatgaacttaaatgcttctacattggaaggtcacaggaatgtgcaatatgtgttgaggggaatatgttcaacatttgtaaaattttagtatatttgtagatagcatagtaaaaaccatgaatctgcagtctgatacagtttcgacttaccagtgccatggacgcctcaaatatgaatgaaggttcaaataagtgaagattgcaacaaaagaaaaagactatttttttcttttttcttttttcttaatttgtttgtcatgaccaagtattggtgtcaagatggtataaacccagcatttacagaaaactaagctaacacactaacagaactaagataaaattgagaaaataaagtacctaatcttgttcatccaatctaaaagataattttaccactggcagttggagaagcccaagatatgatcagattgaaaaggcacccacacatgacacttgaaagaaacaggttgcatcagtcatgagacaagcaggattcaattcatgcgtctttcgtaaaatctcagctagatttgagaagccagagcaatccgatatcctgaatggatgctgtcccattatcttgatataaattaatatgagaaatccattacactaatccagattatatttcagttaccaggtgtgtttattttctttaaaacaaacgtatatactgtctgtacaagggaccatcaaagaactaaaataatgcccattataccaaataagtcaatttcaacctgatgcagttttccttgaaaaaacgcatacgtaaatttaattcaggaaatattaggacaagagcattcagttttaagctgaataaatctaaaggctagattcatggcattattactattttattttctttctatcctgcataccaaatgtccttgaaagattaatcaaagagtaaaagctaaaaaaaaaatactaacacatgcatcacaaaagttgaaatgtgagcatgttatatctgtcaggtttaaatttaaatcaggacagtaggaatcagaataaattaaattcaccaaacagaaaagtacaatagaatcaaagagcattgctcatgtttggtgtaacagtactaagaggagctagctaactgaatactgtacattaccttgactcttaccaaccaagtgccaagttagaatcaagcaccacatgatagacagaaaggtctcccatgtgctgtgggacagtagaaaagtctgagacatataaagccagataaggaacacaataatacaacggaacagatttataaaacaaatgtggcaaataattacaacgtactgagcttgcagttttcataagcagtgaaatatctacaattagacacgcaaatcatatttgtaatagcatttagtaaaggacggaaccagtgcacatctaatgttgaaaggcacaacaagacaactccatgttaaagaaccacagaaacagagctaaatctttgatcacatgtgaacagatcagcaaactgtaatacacacaacatttttagtaaaattgacaaatctatccccaattgtaaacatatggcaatgttgggtcctttgtttatgcaatggcatagcaacgaagcgaacaaacagccagataattgatctattgaacataaagataccaaacaaggaacttagtcatactacataacactaaaacaagtagccttttgaataagacacagaacatgcctacctctcaaacaagtgagtaatgatgcaaaagtacttagaagttgaagtgtggtatggaacaaacatttattgtttttaagaatctcaagaaaggcatgagctataaacaggaccaaacatgtgacatcttaacaattgacagtgaagactggtgcaatagctctcatctaaccagactaggtttgttgtggggtgattcgctttgtatatagacatatactaaagaatgccattctacagtattttgataggaatttctgacaagtgacagacaatgaagtagacaagatcacaagattcagctcacaggagtaagaggaatgatcatattagtaaactgcaacagagctcaaatcacctttaaactagaatagagatcaacaaacatggaccacatggaataaatctgcataggctcatagctgctgcgagatagcataggcaaaataaaccttagcaactttgctacgaccacatctcaaattgcagtcaagaccaaaactaacaactgcagaacaatgccattcctatttctacaatatagatagctctgctgctagtcaaaaaagagaaaaaaaagcaagatgcctcatacgggtatagtgccattgaccacaaaaaaacctggtcctgcacttgctctactctgcagaattaccaatgaattaggatcccaaagcagggaaattggtcaattttgagaaacaaaataaatcttaatatacagctttctttcagaattaagaacacaaaatatttggacgcaattgagatttgctaactacaaactaaaggcagtataaattgctggatggaaccacagagttgcggctcgtaagttccggctatcttcatccttagaacctactccgtccgtcccaaaataaactaacctaggttgggatggaatataatctagtacaacaaatctagacatgtctctatccagattcgttgtactaggttatgtcccatcccaatctaggttggtttattttaggatagagggagtacacatcagcattgcttaatcataagcacctcaacatacttgaattcaacgatatggctgacagactaagccatggtacgatgcataatccagcataatgagttattgagatatactaacggaacaagagagaaatggaagaggcactcctgaatgaagatttagcgtaacacatgactgaactaaaataaaactaccataggctacatcataattaactgaatcattttgttcacacatgaaaacacactaatatttcatggaccattactatacaacacagaaaacaactagcacctttctcctaaaaagcaggagcaacacctcaaatttcagccaccatcaaagagatccacatttctgctggcaaatggtaatcttagaacgtcctgctctcagtctgattagggacattcctcttgacacgttttttcattctctctgcccactggtggaacacattagacgcatcaaatttacctgtaaacttcaccttctgagccaattcatacaatatgtcaggcttcccagccttggagaaatctgcagcaaacttattgtagtctatctgtggagtcttcatccctttttggatcatctcttcaatgtatttacatgcctcctcaggtctaccatgtcgtatatgcccattaataaacactgtgtaagagttcacatctggacaaatccccttccggtgcatctcctcccacaccgcacaacccatcatgtagttcctcccgccaaggaaatatgacttcatcatcatgttgtatgtatggatcgtaggctcaagtcccttctttatcatctttttatatattcttgccgcatcatctggcatattcctattcgtaagtagcttaatgagagcattgtatgtccgtccatcaggagggcaccccttttgagtcatttcctccaatagggctgtcactctatccatcctctttgcattcccatatcccacaagcaagcatgtataggtggcgacatccggctggcacccaacatcctgcatctcctcgaagcaccgcattgccatgtccatctttcctcgcttacagtggtcccgaatcaacattgtatacgtccacacatttggagcaggcccctttgccttcatgagctcaaacatcttcacagcctcgggccgcctctgcccgcgtagcaacccctcaatcatcgtattgtgcacgacaacatcaggcttcaacccattctccagcatctcattccaaacccgcccagcctccaccagattcctcgcgttgcaccatgccagcatcagcgcggtatacgaccgtaggtctggagcgtagcggtcacgcattctgtcgaacacctgattagcctccctccccagcccctcctgcgccaaagcaactagcaagcaattgaaggactccaccccatcgtcgaagccgtgcgtcctcatcatctcaaacacgccgaccgcattcttgatctcaccggcagcagcaaacgacttgatggcgatcttgaacgcgtccatgcagagggcgccctccttccccatctcttggatcaacgccaccatcgactggaactgcctcgccttgccgaggatgtggaccatcttgcagtacgtgatggtggtgtgcgcgaagccgccggaggcggcggcggcggcggcggcccaccggaagaagcggtgggacggcctgtgcgcgtgcttgaagcggtcgagcaccgccaggacgagcgtctcggagagcggcggcgagagcgcggtgagcgccgcctcgaggctcgcgtcagcgcccgcgcccgcgcccgccgcgacgacgtccgcgatggccgcgcacacccgccccacgtgctccgggtggctcgagtccgcatgcgccggcgagcccccctccccctccccctccacctcgtcgccgtcggatgccgagcaggtggaaacgcacctcgccccacatgccagcggcgagagcagagggagcgaggcggcggcggcggcggaggtcagatgcggtgggggcagcggtgaggggcgaggaggtgggcgatgggggagtggcagtagaggcggaagtagacggtgagggcgatggaggaggcgatgagggcgaggaggaggagcgtcgcgcacgggcacaggagcaccgtcgccggcccgggttgccgcggcggggagaagggcggcggcggcggcgacttggaggtctccatggacggcggcggcggcggaggaggaggaggaggggaggaggaggaggtaggtggtgggtttgggcttaacggccatggacggggatcctgccactgcgtcggtggaattttggtgttccccttcctccctcccgtcttccactgttccgctgtaaaaatgtaaaatcctttttcggtgctttgctgtaaatacctaaggcatccgcaatgttgtgtttagcgggtataagtagcattagatactcttttttcttttaacccgataacaatacagtaagagcaagtataatgagctatatgcctactataagtttatgtggagaagagatgtgacaaaaagttaagggtgttggctttcataccagagctagcttaacacaagcttcaaaacaaatacaattaatgtataagtaagagatatagagaggagaagaaaattatagccaaccttatagctaatctattatatatgttggctttaagattggctaatagtaggaagtgagctctattattatccttgctctaagagtcataagtagttacttccttcgtttcacaatataagttattcagcattttccacattcatagtaatgtcatctagattcattaatatgaatgtggaaaatgttagaatgacttacattgtgaaacggaagaagtagaacctaattacacaggtacaatcaataaagaagagttaaactacagtgtttctgacaaaaaaacaattataaaagggagctggtcattgctttccaaccgctgttctagctgttgcttcttgccaatacttcatgccattttacagctccatactctaaaaaatacttatatgacttgtaacttgttgaatcaaaacatatacattctatcaaatagaagagatggatccctccaacagaagtttataaaagaattgcaggcatgatatttatcatatacttcctccatcctaaaatgtagctacttagtatgggacgtgataccacctagtactacgaatctagtactactaaaatgtaactaaagacaaatattttaaaaatgattcataatcaaagattttaaagtttgacctcacccttatttaaaacgacaagtattatcagcccggagggagtatatgaatctaatcggtggcaagttttttagtcaagatgaattaaaggacaaatattgagccgaacccatacaaccactctcaccgaaaggacaaatattgagccgaacccatacaaccactctcaccgaaagaagagaatagttgaggccttatgcaattagcaatgggttgaagacatatgacacaatatgacgtctgcccttctcgaggaatactttgttacatggcgtgttggcacgcccaacttacagccgtcgaaagaaactaaagacacaataagatggaagtggacaaccatgagaatatagtgcaaagtcagcatatgaaatacaatttagtagaataattgaggtggcatcatgcagtcaaacttagagaacatgaatacctaccaagtgcaagatatttgtttggtttatattcggtattcacgtagatgctagatgccagatgaacaatgacccatggtctaggttggagcaaagtcgacggtgacaaattatcagcaaaggagacgatgaaactacctatggcagtgacaaattatcagcaaaggagacgatgaaactatctatggcagtgagtaccttagagcagaggagaaacgtttggaatgggtcaaaaccctaagccacatgggcgttgagcagggtacaaagtttcatctcgtgccacacaaaaaatgcattggtccatttcctaaaccatagtctaaatgatagttttacagtttacactgatcccaatgttttctaattgtgtggtctagttagtataggaccgtttttgactgactagatggttaaatagtctaattcgcaatttaacttctaaaatggacgagaaccgtttgtctagcatctagacacggtctagactgtctagactatggcttaggtgaacattgttcactagcacgggatcggttatctctaacgggcttcaagcctcatctctttcgggtaaggcccccgccactaagcaaatgtcactggtgtgagaaaatatctcaatcgggcaccaggccatcacggatggatgttatctcaatcgggccaacaacaaagcccgtcacagataagattgaccaagcaatacgagtcaaaccaggttaggtaggagcccgtcatggatgactaatcatctcaatcaggccttaaggaacagcccgtcaccgatagttttgacctacctgttgagtcaaaatagtcccggtttggatgacttatctctatcgggcttacaccaagagcccgtcacagatgactatatctctatcaatctttatttagagcccacagatgactatatctctatcaatctttatttagagcccacagatgactatatctctttcgggcattttaaaactgcccgtcatggatgattatgtcaacatgtactgcgtgtatgttccatacagtcatagcaagccttctttcctttcacggtttatccagaaagattacccagtgcgggataatcattaatggtgcataacaatagaacttgtagcttgaagttctcctgaccatatgcatcccaagtttccacaccttctttctagagaatctcaagatcattgataacaggctccaagaacacatcgatatcattgccgggttgcctcggaccttggattaataagcacaacataatatatttccttttgaagcacaaccatggcgggaggttatagttcgcaataagaactggccaagtattgtgagaactgctcatgtctctaaaaggattcatgccatccgtacacaaacatatcctcatgtttctgaggtcggcagcaaagtctttgtgcttttgatcgatattcctccattgaatcgaatccgcagggtgtcttagcaaaccgttgttccttctctctgtggcatgccaacatactaactttgcttccttggggttggcaaatattctcttgaaacgatcaatgatgagaagatacaacacaaccttcgccggaccacctcgcttcgacttctttccctcccccacacttttctttagcttgtatcaagaagccttgtagacaagacaaacatctaagtccgcatattgtttgtggtacaatatgtagtcgtatggacaagcgtgaattctacggacctctaacctcaggggacacgaacttgctttgcttcatatgtcgtctcgggcaatgtgatctcttcaagaagcatggccttcaatattcccaaaagttctgtaaaactcttgtatgcccatccactacttgccttcagcttcattaggttcaaggtagctgacaatttggtatgtttttggcttgcatctggtgtatagaggtgtctccgagtcactaaccaacctgctgaacttcgtggaatctctctcgttgtaagttgggtcctcgacgtcacgtaacatgtcttgcagcagatcagggtctacattaaccatttcaccgcccaatggagatggtataaacatgccatgctcatcttcatctccttcttcatgattgtctgcaccacttgtctgcaactacaccacttcccgatttttactctccatacttcacccaacatgtgtatcccttcatgaattcccccgttgtatgaagtgagagtgtacgtccattctgctttcaaacatattctcattcttgcaatctctacatggataacacatgcatttgttgtttcttcttttcctatcctcctccgcagcgttcataaaacttaatgcgccatttctatactacttgcaatgacgcttcaaagtagtcgcatacatctaacttcgatccaccgctgcaaaaatgaacaaaatattagttaacatcttataaaataagtactactaaattaataagaaattattagtaactttttacttattttcatgattttcctgcttttctttggaaaaaaaatgataaaaattcgctcccttcaatctcccacaaaaatagtgaactgtgggagtcagacaacagacaggtggagtatttatagtgtgcaaaatatatctcaatcggtccaaagaaacgagatttctaacgggcataaataaaagcctgtcaccgatatgaatcatcggtgacgggcgttaacctcatctcaatcgggccttatttggagcctatcaccaatgttcttcatcgctgacgggcttagtagttgggcccgattgagatataggaggtaatttcaatcggatctaacagtgtgcccgtcacagatgagtgtcatcggtgacaggttataggtatatacacctcgattatgtatgtacgagtacatctataacaatgttaatttaggcccgattgagatgactttgttctgacggcccacgaaacccaagcatgtgaggggccagtggccaaataactattcctattagctgtgcatgaagaatttgaaaatcgctaaacatctgattttggagtgctcggtcactgtgatgtatggaatgaaaccttcacaaagttgcatcatcaaatgaacaacacctaagaccatagcagccttcttgactagttactccctccgtttcagtttataagacgttttgacttttgtcaaagttaaactattttaagtttgactaagtttatagacaaatatagtaatatttataatactaaattagtttcatcaaattaataattgaatatattttcataataaatttgtcttaggttaaaaatattactacttttttctataaacttgtttaaacttaaaagtagtttgactttgacaaaacgtcttgtaactttaaacggagggagtagaatggttgtttcatataacaagtatgcaacatattccgcgcttgctgaaattttgaagcctatttagcgagaatatcttgacatggcagtaagcctatttaccgttataagagtatgtacctatacaaatcatatataccatttggcaacttgtactttgtttcttctgagataaatagaaggcccacttgcccaagctgttttttttttaaaaaaaatctaaccagatagagcaaacatgtgacaaaatttgaaggaaattcactctaaatttctatcaaagaagattagcaattatgtttttttcctacattttaattgcacgggatgggatcaaagctatgggtgtaatcttttttatcgtttgtcaaatgcaggccaactcggtatctatacgtccaactaaaatggaagatttttgctattttttatttttattttttataagattcccgtgtttcaaaggagaccaaataaaggtcgctttactcaaatcaaccttataaaattacattccaattttacataaccaggtggcaagcacaaagtaacagggtaaccaggtatacattgtgctggtaagcatacattaagctttcacccaaagaaatggtactactggcgaagtgagcatagcgtctatatttgtactgtttctaaaaaaaaaaaagtacaactccatttcataaactcatgtaggcttggatgtctactttttatagtggtgttcgggagggagagaaggttatgaacttctatctcacgcatgtaaaataggttggcttattagtgcattaacaattaaatattagctataaaaacttaaaatttagattaatatgatttctaaagcaacttttctattagatttttttttcgaaaaaaagtatttttgagtagtttggtaagcgggcacgtgaaaaaaaaatgagggagtataaattaggaacatgtaattaaaaacactctcaagcattgatggaaaccgtcaattgagagattttagcaagcagtcatctcgttatttgttttaaaattaaagagagcaaaatggacgtggcaggattgagcagataaaaaaaaatggatcacggcagtcagatttcaagaattacatattgaccatacatgattgcttttttgtgcaaattatatctgtattctatcgtaccaatatcaaatgataatgtgcacaattcctgttaccatgaactatacagttaattaggatcctacgttggaaaattaagtacagaaaaacatctaaagtgatccctccaaacattagtctgcaaatcagaaaaaagttgagttattcacaaataccaatttgaataagaaaaaacaacttttgaaactagcaaaggatgcaaccagaaagcatcaaaacgtgctattgcctaatgcaagtagacctcaacagagcatgtcatgtcgcagcaaattagctgattcatttgtgtaagaaaacctcacctggcattcatcacaaataatccagaaaacttcttgtttggaggagaaaaaaaaaaccactttggcatgacaaaatcttcccatcaagctttaaaaactgcctgcttttgagaagcgtcctatccaagacccaattctgtataaataaacatatgaacaagacaaagttgcagccagggatggatctctcatttcatggccaatgatgccgctgacgcctcagctatcaacgagagaggctgacgagcttggaggcaggcgccgatgtcaaaagggtgaatctcagctccatcaaatataagattgactccaggtaagaccacatctttggtgtctgcatcatccggttctggttttgctacaggtgtggtgggttggtcctcagtgacagatcttgtggcagcttcatacacaggggcgagagcgtatgacctattagagttttaaatttagaatggaatgatccagtggcaaaattaacattacaagaatcatattaacctatacatcacaagaacaatgtattgagttgcatactgatacacctgccagttcaacccaaaagtttaaaccgatgaggaaggacggttaattcactttaccgctacactatgcggtgcagttctttttatgtatagaacatacctgaggatgctcccgtcgaagcttagaacttcagtgaagcatttctgccgtcttgcaactttcagtctgtcattctcacggggggatcctccagtggttggcgccactgtgtcatgaaatggactccatctgccactgacaatgttgattagttggcgcggcgagttctttgaactgcccctttgattgaatagccttgctgttggaccagttgcttggtactcagcacaaagttctctcagcctctttctcacattctgcattgcctcgtaatgttcagtgaggtcatctttttgaagcatgtgtgactcgatgaccctttcgcatattttttcacataactttggattgaacagtggaattccaaattccaggctcaaaggtatccactcataattttcatcctttgagaaaatttcattggatttgcttatcctgtgaagcctaactaaactaagataaccaactgtgcccaactcgactctactggacagattatataatagcgaagacaaatttaatattttctcctcaggtaaatccatgctggctactgtggatgcaattgacccatcagcatttttcaggggtaacgggacatcaacggtgacaaggtttccagtttcatcaagatcatttaagctcaatggctgcactataacagcagaatgctttgtcattgagttcaggtaatgcagcagaaggcttccctttactaaattcccttcgaactttcctcctaatccacccaccacagattgatcccaagaccatatcaacgccttttcgcagctggctaatggttcaggcagcatcctcaaacggtgtcctttcataaacacagcagatactgggccacaactcccagatgtatacagtgcaagcttcatccaaggtgtcatggaagagtaagaaggtggaccaaaatgtactaggccggcagtgctgggtagaagtactgatgaatatggaagaggaatcatagacaccataatgtcatagtccctgacaagtaatctttcaagtgttgttgcggacagtgaagccaagctctcgcagcgaagaatattgatccggtaacttcttttagttttcgacaaggaactactgtcagttgatccatctggtagaggggttttgctcgtatcagaatcatttttgtctgtgctttccttactttcagagacaatacttgagggtgatgatgtactcgcatctgcaacatctgagtcaaccattgggtggtctgcttgtgacagttcattatgatgatcagtatctgcagtgtcgacggtttcaagtgaacctccattactcttaacaacattactaatgccctcatcaatgctttccttggataaagttttggagaaattctcctgcaggcagaattcctggctgttcggttcaatagcttcatctggtgatgtccctccagacagcaaacactcaaggaagcatctgaggctaaaagcatgatttgcaaattcctggagcacaccttcaaacctctttccttctaaactagcaaggtccttgcatagatcagcaatgcaagaatcaccaagctttccggcctcgtatagtgtcacagcatgagacttcagacctgtgatacgtatgtgagaaaattattaccaatcaatgacattgaacagttccctgcctagaagtagaaaattagtaacaaatggaatataacctggagataatgaacccatcatcaagtacgaagttacattggcatcaacaatgaaacccacataagaagccccagatattctcctgggtccatcggaatcactggtgagcaatgcatgacctgacctttctgagttgatactcgtaagtgaaccttcgtcatcatcactaagaatattactaggtattgtagatccatttgaatctctaagaatggagtctgcatccataagctttacagcccaacccagtcgacaagcaaatgatgcagctgcctgaagctgatacaggtcagcctgcaacgttttagccaattcagcaactgtagcattttcacttgatacaacaaatacagcatatagtagtctgcaaacaagaaaggcgtaaaatcattttaatagctacagatgattcttgcaatgcactatagtttaatagggaatggagctcagttgtgtggaagaatactcaaggcaagtactcactcttcaattggatcttcgtaagactgatccttatttgacacaaaaccttcaagccttgatactgaaacaacaggacaagtacagaactgaaccaattggcatttagggagaattgagctgtgttgtagtttcgtgtctacagaataataccctcaatatacacacactgttagtgcctctaaggatgttataggtttctaactgatattgtacttatcagcagtttaccgttacaagcttgaagcaactgtgccattgaattataggccaatcctccaacaattttatgctaaaccataataatagaaatcatacataagtatgtaatgacatagatttctccgaaaccatacctctgaaacggtcctcaggataaacagccacatcgaagtataccattcctctcttgtaaagaccatttataaccttcggatcaaatagaacataggaattatcttcgtcctttgatattttatctattgctgatgcctctgcttctgaaagcctctacagtaaagtaatattatcaattaccaaaaaagaacaaggtacttttgaatcttagagagaaataagtttaactaacactgttgtatgccatcatggtaagaagagaaccacaaaaaaaaaaaactcgctatatcattctgttaaaagtacaatatccttgcacaaagaaaacttgtcactgatgaacctaaccttaaactcttccaatgtgaagttgacaaaccgaactccccaccatggttctattgctaggtccgcagggagtgctggcagcagctctttcgcaattgatttgctcagcttccacattatcttctgacataaacgagtggaacaaataaaaatataacagcgagaaactaggctagatatgttcattttctgaacatacgataagcacttgtgctgcattcaaatattacagtccattcctacatcacagtaataatgctaaaatattcccgtggattcactaattaaatcttgtaccctggcaagaatataagaaccaataatatcatagacgacagatcatgatatggaaggtaatgatacctttgatctacacttgttcataatatcgataaattcatttctcccaacacctgtgatcctcagggaatcagcagcactgaagtttggaatactgtcatatggttgctctgccagtattatcaacaatatacaaatataaagaggtgcgcacaaaacataagtctccatgatgaagataaacggattgtaaaattgttgtatagtaaccatatatcaataaatgcaatatataaactcaaaaggtaccacatattacaagctagaatcagaaacgtattgtgaagagaacaaaaggttcctccattttaaatggtataaactgaaaccattttaatcaggaaagctttgtcagatgagttatcctctgaggactggaatcagagatatgagatggaaaatgaactagaacacatttatgagatggaggaactctattggcataagagatgtggtgaacaatggatccttgagggtgatagaaacagagttctttcacagggttgccaatggaagaaagaggagatgtactattacttccttatgggatggagacacagaactaacaactaagtcagaaatcaaagaccacattgtaggatactataaatccttatttagagctgaccctccttctaatattcatctttcccaagaggtttggagagataacttttgcttatcaaatgcagctagtgaacatctgatcagaccctttgagattgaggaattagacaaaataattagagaaaccaagctaaatacagcacctggcccagatggttttagtgtacctttttatagagctttttggccccaagtaagaaatgacctctatgagatgctgattttgcttcacaatgaagaactggaccttaagaggttgaactttggtgttatctctctgatcccaaagagtagcaatcccacatacattaagcagttcagacctatttgtgtgttgaatgattgtttcaaatttctcagcaaggcggtaaccaatagattgacagaggtggcaaatgatgtcatttcccccacccagacagcctttatcccaggaaggtttatccttgaggggtgtgttattatccatgaggtgctgcatgagatgagaaccagaaatttagaggggattgttttgaaaattgactttgaaaaagcatatgacaaagtgaggtgggactttctcatagaggtgatggagaggaaaggcttccctactaaatggattagctggattaaaagctgtgtgatgggaggtagagtctgtgtaaatatcaatggggagaggactgacttttttagaacttttagaggcctcaggcagggagatcctctttctccccttctctttaatttagttagtgatgccctagctgtaatgtttgatagtgccaaaagggctggagttctcaaagggttagttcctagtattttccctggggggatcacccatctccaatatgccgatgatactgttttgttcattgctaatgaggataaacaaattgtggcaacaaaatttattctgtactgctttgaagaaatggctagtcttaagatcaactttcacaagagtgaagtgtttactttgggcatgaatgagattgatactttgagggttgcccaaatgcttaattgtcctgtgggttgttttcctatgaaatacttgggccttcccattagtccagacaagatccttaaccatgacttcaagtttttggggcagaagttagaaaagagactaggtacttggggggctggagacctatctcatgctggtagagctgtccagatcaatgcttgtctttcttccataccctcatatgctatggggttctaccagctaccagagggtgtacatcagagatttgacaagataagaaatagatactactgggctggtaataaacttaaaggaaaataccatatggtcaagtgggaggatatggcttttccaaaggactttggaggtttggggtttactgaaaccagaaagatgaatattgccctcctggcaaaatggattattaatattgaatcagatgatcagagtttgtgtttagaggtgctcagaagaaaatatctgcaagagagaggtgtgtttcaatgtaagtctgattttggctcccaattctggagaggcttactcaatgttagaaagtggttgaacctgggggctgaatggaaaattggtaaggggtctcatgtctacttttggaaagacacctggttttgcaactgtcccttgagtgtgaggtacccagctgtgtttaggatttgtaatcaacaagaggtgatggtgtcccatgtagcccaaaggagactggagtgcttctcttttggaagatcctttggacctgaggaactgactgaatggggggaattaacaaaaaccattgatgatttagaggtgactgatgaggctgacagattgctttggggattagcaacaaccaagagatacacaacccaaatcgatgtatagaactctgacctttaggggcttgagggaggtgaattcagatatgtggaaaagtccatgccctacgaaaatcaaacattttctatggctagctcttagagataggattcagtcggctgaacaattgaaaaagaaaaaacgggagggatctgagtcatgtcaactctgtgggaatttagaatcaactaatcatattctctttaactgtgacatggctaggttaatgtggtgtatttgtagagatgttctgaactggaatgtaattcctcgctgtttcgatgatttcttccttttgtgcagtagtgacactaacccttcctccattagagtttgtatgagtatgcttgctgctgtttgctggaatttgtggctgactagaaataatatggttttcagagatagattgctttactccccactaaccctggctttccaaattgcttctaatcttttgcagtggaggaagctctgtcaacctgaggatgtgccgaagctggaagtaatggtggataggatcaagtcagttgcgtcaagtctgaaaccgcagaggacgggtgttggatagtttcctgatgtcttgagtccctttgataagtgatgttggctggctgctagaacagcagactttgatattcatactgataggctctttagctacggttctttctcccgctttttaatctgctagctgatggtctaagtagagttgtcacgatcttttgctagcccctgttggctcctgcttttctatgtcttgatgctacgatgtatgctggtgtccccagctggaacactgcctatgtggctttctataaaaagccgggtctatgaccttttctaaaaaataaataaataaataaactgaaaccattttaaatagtataaactttttagctgattaaaattcacaatcaagtagaaactgaaactatagccaagcttacgtagttgtcaaggtgaacagaaacatttttagtagtataagttatgagtgagaaatca

SEQ ID NO: 5908 - DNA, 26909 bp, Oryza sativa
ttgttgtcctatactgtacagcatcaaagctctaagtatttaattagctgattaagtagtagttaatgaggagagaaactaatctgtcaacgacaggccggtcattccttcaaaagatagcaaaggtcttagcctgcaatagtcaacaaaacttgatctggtttcttggaccaactacgtacatgaacacaaaactattgacagatcttttcactactccatatcagatattagtactccatccgtttcataatgtaagttattttagcatttcccatattcatatggaggttagtgaatctatatagatatatatgtctagattcactaacctctatatgaatgtggaaaatgctagaatgacttatattatgaaacggagagagtagtatatatggagaaaataaatggtccctagctttagcttaaccaaatcaacataaggccggccatttgtcaagtttaaccaatgcttacagcaggcccgcaggtcaatttgctccaactacttaatttggcatatataaataagtcagatgtatatatcgatcaacgcctgtgtaggatcaggggttatttaatatatattcggctagaacttgaattctactactagtagtagtattttagtatcaacttgatgtatcacatatcctataaataaggatccaaaccataataatttgaacggggggagtcattttacaacttaaataaacatccatgccatgccatgcatgcataatcttctatgaccaaactatatatatacgcctagtggtgtggtttgagcgcagtgatattacaaatgggatagaatgatgaaaaagggatgattaattaattaatttaaccacaatgcatgtacataaagaaatactataatgtaagcacatatctatggtctatcactagcaaagtagcaaactttaattagtgctttcatgtttgatgactagctagaagtactaggccgtgcaaatgtctgccctaaactttctcccatcaagatgacaagaagtaacatctcaacaaccatgcaagaaagcatgaatgtttgcaagatgctagctactagctagatgaatatatataggtatgatcagatcgatgcaggtacgcatgataaaaaccatgcacgtaaaatttctccagagtgaagaaaaatgtcgttaacccttacaaattaagaagaaacacaaacgaaagggggaaaaataaacaagaagatggaagcaagcaaatcaaaatcatcttctcgccaagaacttgttggcgatcgatgaataaaaatggatgcaaatctaggaactaaaactatcatctccctcctcgatcgctgcaacccaatgtgtacgtacgtacgtgatccatttctgtagcttcctacgctgtttcaaaaccctacatgcctttgtgtgagccgccattaatgtcgatcgtgacacacacgagagagcttgctagcttaccccatgcatggtggatatgcatgcgtgcttgcttagctatggagctcttttcttccatgctgttccactcaccggtgagctttgatccatcgatcacgacgatccgatcatggccgccacgcgcttgcccacaccagaggctgctccttccacgcgaggaagacgccggctccggccgccgagtcgtccgtgccggcctcgcgcatcgaccacccttccctgtaccggcgcagcagcgatcgcacgtcgtcggcgacgtcctcgctgaatgccaccggagagaacccggccgaccgcatgcgccgcgcccacgacgccgccgtctcccgccgctccatcgactccgacgccgggcacgagaccaagtcgacgatggcgcgccctgctcccctctccaatgccagcctctcgttgctcgtcttggggaagctctcctcgagcgaatccatgtacgccgagaagaagcgcaagccctcgccgaacaccttgaggaacgccgcctccgtgtcgccgccttcctccgtcgccgacgacgcgtcgggatcggacgccaccaggtccgcctcctcctcgacgacggtgacgacccgcgggtccagccggcggagcgacgccgcgaacgcgtcgcgccggcgggccctgccgggaaccacgccgcgcagcgagttgacgcagttgacggcgagcgcggtggtggcgccgccctcgcggaggtcgagcgcgtcgaggtcgagctccgcgaggtccccggagtggtgcacggcgcggaagcggaagggcacgcccatgagccgcgcgaacttttccatgcgctgcccgatctcccgcatgacgcgctgcaccgccgccgtgggcgcggacggcgcggcggacaccacggtggtgatcgagaggtgcggcgtctcgtcggcggaccgcgtggccagcgcctccagcagcgtcggccactgcgtgcagaacgtgttgctcaggtcgaggatgtggaaccgctgcgtctccgacgacgccgcggcggcgacctccaggaaggactcgaggatggcgccattggcggcgacgtgcccaaacgaggaccaggggctgagctcctggaaccgcagcgccgtgcgccgcgtcgagtcgaacgacgtgttccggtcggacgccgcggcgagcgtgcgcagcgtgcgcggcccggacgccgtgagccgagcgaacagcccctgcaagaagtaggaagccagcttctgctccacgtcgccgtacggcgacgcgagctcgttgagcatccacatgagctgctgcacgcgctggctgtcgcgggcgggcaccgaccgcgcgcactccagcagcagctggctagcccacctcccgccgccgccgcccccaaccgcgcccgacgacgctgtcccgccgccggacgacgacgccggggacgagaagtcgaggttgaggtccggcgggaacgacaggtccgccgcctcgaacaggccgtgcccggcgcccgccgcggtggacgaggtcgacagcggcggcgtcggcgccgtccccgtgggcgtggacgacgccggcggctgctgctgctgcacccgcgcgccgtggtggaagtgcctcgacgacgacgaggaggagaagtcttcatccatgtaaagctggtggtgtggggcgttgccgcattcttcttggtacggctccaggtagtagtactgcgacggcggcgggtgctggccgccgtagtagtaccctccgccgcctccgccgccgccgccgctgttgctgctgtggtggtagtagctgtagaacgcgttcgtctggtgcgacgacgacctggacccgctcgacgtcgtgctcctcgagttgtaggacgccgactgctgctgctgctgctgctgctcggaggcggcttggaggctaaccaacctaaacagcgtatccatctaagcaacggcgacgaggaggaggcggcaacatatggcgcggtacaaccaaacaacgcgcggtaacaaggggattttaatggcgagccgagccgagccgagctgagctagctagtagcagctacacaacctagtaggagccatgtaaattgcgaggtgtggtgagtggcttggtgtttgtgcttttgatgctctctttctctttgcttctcttttggtgagatcgataacatttgagtagcttttggccggatcgatgagagaaggagaggagggtggagagggagaggatgagagggagggggatcgatgatgcctcgctctgattggaggggttctttaaatttaccgggggcagcagcagcaggcagcggcagtgggtgtgggcgccttttgctgcctctgcctttgctttgcttgctttctccatctcgatctcactgccgaggctcgccttgcttttaggttttttttggttggctttgctaacgaactcagagagagagagagagagagagcgctcgcgacagtgtaggggatggatggtggaggtggaccggtactgtcaccctgcaagtaggagcactgtttattatttccccaccactctcaattcaatttatcaccattgttttaaaaattcaatttatcgcctttagttagtggaagagagagacacaatagtgtccaatcgattcaaataccgcgagttactatgcgagcgtacatgatctcagtggtggagccaccgctcgataaccctaggcggctacctgacccatcgacgaacacattataaaatcgttatgttactgttactatagggaataagattttcataacaaatactctctaaattttttttggccccaccgctacatgatctagacctagagaaatagtcttctgtaggactaaagtaatagagacaataaatccattaaacacgcaatctataaaaagtttattggttgtggctctctcacaactatgacggacatttagctagagcatttgtcttttaccatgtgtaagaatctagtgtaaaacacatttcaagcatccaatattatcttgtatcctaattcttttttttttctcttttggatgaactcctcttgcttgctttggttaggtttgacttatgtcttttccttttgttttttttactcaatgtgatagtcctatggtagaagtacaaatcaaaatcctatgtaatagattattaagaaatgttgtaacatttactctagtacatggtttattttttcgatggattgttggatcccaacctcggcggtgcaatggttttgtcaaattttgatgaaattttgctcatatatattgtttgaaatttgaatttataaaagaccattcaaattttcaatcacaatatactttatcctacgtggaaacctcataatttcatgggttttgacccgttccctttggaaacacgaaccctgctcttatactccctctagaatggagtgcgtgaacatatgcttcgtgcctctatactccatgccagacctaatattgcacacaatcgtaaaaactgttacatttctaattttttaacgtaagaaaacaactacaaaaccatttacccatttttatctagaatggtaaaattaattgtttctactaaagagacgtgtttcatatatgaaattaaggttgttttaaaagggaaaaaaatcaggatttattgctcatgtagtcatgtgctacggcatttgggatatgagtcgcaaatcttgaaatgtcactaaaatcttgatcaaattagtacatatgaacaagacttattccccatataccctatttacatgttgttcgattaatccttttcacatggcaattggagggtattgggcaatcaattaatttcacatgagattaaggagattaatcccacaccccttcaatcgaataaacccttaagataggagggatgtgagctgggttggctaatcagattgtggtgttagccaatagaccctaggagaatcctatgaaaattctgttgagaacaagtagaattttggaagggattgattaaagaaattgaaggacttctacggtacaatacactagcaatatatatttttggcatatacaaagatacactaggaatttccatgtacaagttcgcgtgagcatggtggagagtggggagttgggcatcattgctgctgcctcctccaggtagaggaactagctagggttttgggtgggtcggaaattgagaagacgaaagaaaggcaattcgaattaatttacaggcaggcaggcacaatagcgtggtgcgcgtgaacttgcagtgcgtgtggcgtctctctatggcggtatggcctatgatggacgacaactacgggactggggaatgaaatcaagtgaggaacacgtctagcattgtgcatttatgtacaacagttgtctgcaagcaaacatttagaaagacaattatccccttttcaattttatactacaattaatttaagttggtaggccagttaatctacaccatctgatcattcatactaataaaatgtactgtttgtattgatccatatgttatgaaacgaaggtagtatcgtatatagatcttctcagaaatttatgtcttctctctgttccaaactctccaaaattcctgtaagaaccccacgttgaaaacagggcctttaatctcactaatcatgctctcttaagcagcgcaactccaacatctgatcaaaaactaacaccgcacattttggccgttccaatttctggacaaaagcgattcccccgtcgccccaacaatcctgggatacatcaaagaccagctagtgcgcgcctgaaatgaccgttcaggccaggacgacagcaacctaccttggaggctttgtcaggcatcagctgcatgctgatatgagttgagaggaaagaaaaattattcccttgcttgctgcatgccattatattgctcccaatctcccatcgcattgcccatttgccctccagttgtgacttgtgaagaaggaattatactctctacacaacagcagcagcagcagcagcagcagcagcagcagcacgcagtacgtactgctacgtagtagtacgtacactggcgagcccatcagtaggctgtacacatgcgcgacacatgaaagaaaggctaaaagaatatggagatcagatcgaagcaagcaaaggcagcagcagcagcaagcagcaagcagcagtgtgatgcagcagctagcaactagcacggctgaaaaacaaaaggggcttagctagcaagcaaaaaagctggagctcgcaccgagagcacggcgtgcacgcggtggccatcatcgttcgtcgtcaaggccggccggccaccaccactactgcaacccaacccatatacaactatatactggactagtacattctttgtgagatctcccttttggatagtagagaaaggtcctagatacacggccttcttttggattttgccacgaatttatcgcccggtttcaattctctccttttggaaggccaaaaagacagggccctgcatgcacatatgactatagtgagtgactattataccaccaactttccttttctcttttctgaagaacaagaacctgtctaacatatcgtttgattaacatatataattattatatcacgtactagttgggatggacgccggccggccggccggcactgtagctagtctatagcttaagctttgttgctccaaaagagagaaatgtgctcgtgtctctttcttgctatgcagtgctaccgctgctgctgctgctgcacacagctgcatgcaggtttagctagcagctgttgctactgctagctcttctctctctttacctaatatcatatgctagatcgtgcagtgatggggtcgtggaaacgcagggggacctttgcactgtccggccgggtaggtcgagcagacgagcactgtactgactgatagagaagttgtgttgtgagttggcggtatttgactgttgagctgtagcaaagcatgcagtacgtgcagcggcagcggcagctgatggtttcggccatgatcaggggtttgaaagagaggggagaagctaggcctggtccgtttgttgattgatagatcgatcggtagctgatcactactgaactttgattgggaaaacttctgagaattatctgaaccccggcaacttggcaccattcttgcagagcgtacctccaattagaacactagctagtgtctctctttcatatccatggtccatgctcacatctcacatgttaccttttttttaagttttgtataacggttccagcttgtcctgtcagtcacaaatgttgacgaactgttatctcggaaattaaacgtgttcatgtggctccatatggtggttctctgaatactactacagctacaccctgaaatatattacgcagctagacggctggatgaaccgagcagtacttcgagaattgcagacatatggtaatacgtacaatttcatttcgtattctagttaacgtatgcagccagatataaaacaaattaacatgtacatatacaaaatctgaaactgaatatctggatcaaagcatgcttgaataggatgatctctatattgatccttctcctgtaacttggaaagctatgcttaaaagattgatgagttgacgttaaggctcagaatttgagatagacctttgtttcaatcatggattggcgctatgtaattttcatgcctcacataaaccctgtaaatattccttaatttgatatttaccgtgggggtcctcccttactgttctcctgtaaaaaaagtctaaatctctgagttcaggtgcaatcaccttagacggcgagcaactcatttggaagtgggaagcttcagggcaatactccaccaagtcagcttacataatcctcttttttggtcgtgaaatctgcccatccaagccattttgaaaagaaaaaaaaacacgtgccgccgtgctgtatttttcctattggttgcttatcgccgttgttggacggcatacaggctaagcaagcatggcttaattgcctcatcagagcaaatgtgtcttctgcgactagcaagaggaaacgatcaactacatctagattggttacccagagacctttttgggtggattatcataaacaccattggccaatcttggtgcttcctatccaatccacaatcgttctcactgtggcggtacaacagtaggaagttggttatcaaaaccccgaggaaaggatataatacaattgtcatcctagccacgttaatttggaaagaaggtaacaataggatctttaacaaccaacacaaaactcggagaaaggtggttggcgcagctgcagaggaagtaacacgtttacgccctatctaagcgggtttcccctctcctctacgggagtcctcagggatgctagccttgtgccaaccgatggccctgtcgtggtcacaaaaccatatatatcgcaagatctagccatacatttacatagcctttgcttgtgtataagtatctcggtcttaatataaagatatgtaattcttttgtatattttcgaaaagaaaaaatctgaaaccgaaactgcgatcgatctcatgtgtcatgtgtcgcagaacgaaacaaccatctctctgcgtaggtagcgccgtgtcacaaacgaagggggtgtgaccatcaataatttaggccaagaaagcaatattaaattgcactcatgctgtaaatgtgcaatatatctgtgtgaatgtatgtatattcagatcatgcatggggtcgacatggggtaccctgtaccaactactgtactgccgccgtagatggagcagcaaaagtgacaaaattctcatactttgtacgcttccgtagcagcgtgcagtgcatagcatggatgccatgtgaatgaatttggcctgatttcgttttgcacccccggtatggcacgataatactgcagcacatggcatgtatgtacaggtatataccctcaacaaatagaattttcagtccaatgatgatcagtgtgccccagctagcatccatatatgcccagtttggtttgccagaaaaatttcgcaagccaacaaaatggactgaaaaaatggcagaagaaatacatccataacatctcagagttgccactgttgcagtagctgtagtttcttatctaaacaccctgttttttcgtccagtttcagaaaaaaaaaatcgcatgtttgaacgagatgcatctttcttggggaaaagtcggaaaactaaattaaccagctttgcaaccccaatgatgaagagaatctctgaagtggattcatccgggaggctcagaatttgcctttctttttctctcttctcgacgcgacgacgcagtcataagtacttgtagctttgtgctgccatgtatgccgggaacttcttttttttctttctttctttcattcttccttctcctcatttgaatcgatcgaacaagcaggaggccaaagtacgactctagacatcatgattctgcactcgtctcaggactcaaagcaatcacgcatgcacatataaaaaaacggccgctgttcatcactgtctttttctctggtttgtcgtctccccgttcttcgatgttcaacgacaccatccatcgcctttcctaccaccggccgtaaacccgcgctcatgcgggcaaaagacctacacaattaactagagcttgttcggattgagaccgtcgtaaagatgaccatgattcttggtaatgataaatttacactttggacattaatttgagctgaagctgataagccgtgaaaaaaaataaacgaagcaaactaaaaataatttacgaataaacttttatatctatgctattagcattgtaaaagtcaaggattgataatctagaccacaataaaaaaacccaaaattaactctaaaattgtctttcaaaattttaattttggtcacaactgataggccaacaactagatggggattgatattgccatttttgtttcctttggtatggttaacataggcaacaaaccaaacaactcatcaacacaattttttttctaaggaattttggggtagtttactcgccatggtatgaaaaaacatgaactcaattaaaacttctccaaagcgccagcccattttcataagaatttcgatacagtttgtgtaacccaataatcttttgtccgaggtcatccttgcttggaacaatggtgtgtttatgtttttgaaaaattggtaggaaccctaaactacttaaactttcaaggtgatattaaaccaccaccattacaccgtaactgggccacgtggaccaacacaagaaccactacggactccaaacgagttgggtgttagagcaggtacaatagcaggctatcagccagctgtaacatattttaataagataaaagatgagagagaaaagcagcgtactacatatctgtagccagctgcagcgcggactccaagacacaatgtgtgtatgacaggtgggaccatatattaatagtatagtaagcaactattatatgaattacctattaaattagctatagatgaattggagctattagtgggctatactattaaacttgctcttacagtcgactgtttttttttcagactttagaggtatatatctatcgtcccttgccaaaatttcttataggatttatagcctccaaaatatccatattttactatattttcattagagtaaattacacccaaggtacaacaacttgataggtggatgcgatatagtgcaataacttgagaattgaacagtcaagtgcaacaacttgataaattggtgcgttctagtacaggaacttgataatttagtattttggtgcatcaacttggctaagtatggtaggtgaattttttttcgaagatgtattacgtcaggatctgttgctcaaactgaatcacgcgagacaagacccgctagggattgattcacggatgagggaccaaagcgtgtttcaactgatattaacacgcccggggtcagttcagtaaagtaataccttttttcctggtcgcacgatatcattatgccattacatagtaatcctacggatattaccttatgctagttgttgtatttatgtgatcacttataaagtttttatactaaattgcacctacatgtcaagttattgcactagatcgctcatttctcaagttcttgcactaaattgcacccacttacaaagttgatgtaccgtgagtgcaatttactcttttcattacaagtggggcttgacaatctcagtcatcttcggtgctatgctaaaaaagaactcattctcattttcattttaactgctgatgtacagagtacccaccaaatcaaagcctttacagctaagagatccatgtttttataagaatttctaacatgttttttttcatttgtatgaattattaaagtattactattccttatcagctgcaaactacttgtgacaaactttttgttggtagatattccaatgacggtgcttcgtgatgcattagtcaactcattatttcatcttctccaaacagaaaaaggcagaatttactgtccaatcaaaatagtctagacctggaaaaaagatatccatgatcccccatctgtccttgcaaaatgggacatgatcccctacatttcctcctcccccagcttcttcccttgtgccatggtccaagatctacaacaaggtggtggtgtaatgggccatgatgcgtcaagctagccccccatagagcagtgcagggttttgccttttcgttttagaaataaaaaccgatcctcaccggtttatcaaaaaccaacaaaaaccgaagactttctttcaatgtcatatgaaaaccagctaaaaccgatatgtttctataaaccaagacatagcggttttacaaaaatcggttggttttgtaaatcctggtgcagtgcagccacactctcgagctgtggttagtgatagccagctcaaagctgcagctagctgaaaacaacactattcccggcctggccctggccatgcctcccatgatgcggctcatctgcagacagcgagcattgccatgcaattggttgctttgctagctgagctttctttcgtgtcacctcacgcccctgttcctgcatgaacgctgaatgcatatgcccaaattattctgttgccactgttggtagcaaattgttgttggccattttcggttgtcaggcggccaacagtgtgtgtattaattggggacaatgcgtcatagcttagctggagaaatttggaatgatggattggtcactggtcaaaaactcaaaaggtgtgatttgtgttttctcaggggagggggaaacctgaaatgggatcatatgatggctgaccagtgctagcttatgataagtcagaattttcttaacgatttttatggaaggaagacgcacatgcgcaccacacacacctgcaaatgtgtttcctaacacggtctcaatgagatggaggtcaacctcactaaatttctattgaaaacacaccatatacgtaatattcgtgggtataaaaattgaacattagtgaactatttatccaaccatatgtgtaatctgatcacatactttacatggtcgaaatggcatctccaaaatatttgcctaatttgaacaggggactttttgcatgataacagtgcaatgcctgcataatttataactaaccagccttgcttgatttagcagcaactgatctcaaatccatctctcgtacgtctttacaacttctcttcatcttttttagggtgccagatatcacatgtatggtggattggtggcccatccaacaccaacagaagcaaattaaagaacagaaaggaaagtattggtggcatattaattaaagagattcgtttgctttgatttattgcaatgccacctgcaggagtctagtacattcatgtacggacgtaccatatgcattgagttggtattgatttggtgaacacatcccctgtattgaagtttctgcaggcactagttcatataaggccgtgtttagttgcaaattttttcttcaaacttccaatttttccatcacatcaaaactttcatacacatataaatttccaatttttctgtcacatcattccaatttcaaccaaactttcaattttaacgtaaactaaatactccctaaggtgacaacattgctcaccggctcaccaagtttggaagactggaatttccttttattcagaaagaactccagaatgtttcggattcttatgaaaaatgatttgggagagaatcctaagtagactgaactgtaacgaaattgaccagacgtgatatagatgagccgctgttggaatggtggatcagaagggcatctcaaggtgaaaaagacatagccaaagaaaaaaaaagtttacatgctagtagcatgggaaaatggtgtgagcggaacagacgagtattccgaaatcaggaaaaatccctgccgcagcttctagacaagatacatgatgaaatcaagctatggaagatatgtggagctacaaatattgtgagattattggcctaggatgtattcattgtttagtagcttcttgtttcctctctctttctctttcaccgttttggtaatcttgtaaatacttttttctcccctacttaaaataacaccagctttgctgacttcggttttcaaaaaaaaacaataatttatccatgcacagtttcttaaaaaaaatgtgtgaacttcattctttccaattggagacccgttctttctaataatgtggatgaaggctaatagatgatcaacttgtttataggaagtagtactatcatcaaccttgtaaatagcttagaatggatggactaaacaatattgatgtttttttttttttgagaaatcatacttttgaaagcttggcataaataatatgcgaataatgttggcccaataaacatttagaacaaggcctcaaatacataactgcactggtcccctaggaataagtccacttgagccccccccccccccccacctcaactttccgtcgagtttgtttaacatttcttttctccaatatcataaatcttcaccctaaaactatacaaaaaccgtgtaatttggatccaatagaaatatggatgtctgagtttgctaaagtgacatcgtagccagcaaaaagaaaataataaaatatgtggtgcccacatgttagtgaaaagaaaaaaatatatgtggggcccacgccacggccacacgccgtgcacttgctcgcgtcgtggttgggaaaggaggagaggcatctctgtggcggtgccatccaccatgcacatcggaggagggggggttggggggtggggatggtgacgccgacagtgattggaggcacgcaaaattttccatatctgcaaagacatggacaagcacaggtttaggttccgtgatcccccgcctcccgtgcgacagcgtccacaaggccaccatcgactcgtccgaggccacaccacgccgtctgggaagcaagcaagtagcagggggaaaaggagagcatgtaaaccccacatatatttttcctctcacttatatgtgggcctcacatattttttattttctttttgctgactaggatcccacgtcagcgaaacgagacatccatactactatgggacccaaattacacggttttatatagtttagggttgaaggtttctggtattggagattgatgtcaaacaaactcgacgcaaagttgagggatagcaagtggacttatatttcatagttcacatacttagttgagttggatggtattggtgtaccggagaaggcctaattctgacccatccaacatctaacacatttttacttgctctaagaggcgtacaaacttctggcataacagagtgttgcatgagtctgaactccattgttctgcggataagccatctcaaactcgatcaggcatcaccaatattctccacacatattcctcacgaaaacaaatattctccttttatatagttgcatgcacctggggataaacaggaagcattacaactttaatactttacattgatatcactttaacttaatcttatcttcattgtcataaaaaaaattaaacttatctttccagcacaagaaaacacactgcttcgaaggcacgcgaaactcctcgtcggatcagggtttatgagttagtagtcgagtctccatttttggatgagtttcagataagccattgcagcttggatcgatcagtcatcgtcaatattctccagacatattcctcgccaagataaatattctccttggacggttgcacctgaagatcaaagtactgttaccactttacattcatctcactttgtttcactttaatttagtttaatcttatctttacagcattagaaagctacctagacttatacttgctcctgattagtccaagcttgttgcactagcacacctatactaccagagattactttctaccatccctaaatgctactgcatttctactcgttttcttcttagccgaacatctcatcaacatcatcatgctgatcgatcgaatacgcatttcatagacaagagtagctagacaactttgagaccttgacaccaatgtcacaacagtgccctctcattaggggaaatctgatatcccaaacatccaatccaacaatttcagattttgtttcaggcagattcttccttaccacttgcgtacgaaggcataataacttttggttcatctttcttgaaagaaaaaaaaaccgatgccaactacaaaggaccactccactgacactctaaggaggaagtgaacacacagagtctagcaagagataagcataagattgataatgtattctattgaagtttcatgggtccaaatcacacttatatgattcgtgatcatgctttcagtttttaatgcccagtgtaccgtctggtgatcacaagctggcaatgcaaaaataatgagttatagattagtactttatgtttatatagcacctaagggctgcagatcgaccgtaggctagaaccaaagcccaacaagattctcattcccagtgggtttcaggattaatatgccgatctgtttgatggatacaaaaggtgctaataatgtgaagtaatataatatttaaggagcagtggttataacaattctgatgtaaaaacaacatggagctcattggaaatatatatatgaaacacacgctccaggaaataaaattgccttgattaattactagattcctgctagtgttgttaattagttcgtgtcatctaacgtgagacgtggcccagttcaacatcatgtagtgtgtggctcaacgcctcaaccactcaacccagcttggctctgcaagcttcagcagcccgaacccggcctgtttatgtaagcaacaatagctgggtcaaccgggcggctcgggcccttttgagcattcaggaccagtccaagcccaaacaaaggtcccgttcggcaagctggttgtggctgtggccatgccgtatgcgtgtgcactattggtgccggttgtgccacagccgtaagacagcagctgaacaggtacaaacaaaaaataacctgtgctctgctaattaagtagactagatagtaaaaacttcataaagaaacacaaaatggtggtttttctatgcccggtatgaaatagtactatttgtctgtaaagtagtgacttttggatacaaggtttgattataagttatatataaagtaccggggggccttaatgggcgatcgatcgccaggcgatcgcccaggcaatcggatccggcccccctccccctatactcctccctcctctcccctattcctcctccccttctctttctactacagtagaccacacaaatttttttgaaaaacaaaagttagaaaaaattatgtatagaaatactatatataaaaaatttgaattcaaatacaaatttgaatcaggtatgtaaacttttgacttataaactttgggtctataaattttaggtgtataaactttagatgtatagaaatactatatatagaaaatatttgaattcaaattcaaatttgaatcagatataattcaaattcaaatttgaatcgggtatataaactttaggtctataaactttagatgtatagaaatactatatatgaaaaatatttgaattcaaattcaaatttgaatcggatatttgaatttaaattcaaatttgaaacgggtatataaactgtcttataaactttaggtctataaactttaggtgtataaactttagatgtatagaaatactatatatatatatatatatatatatatatatatatatatatatatatatatatatatatatatatatatttgaattcaaattcaaatttgaatcggatatataaacttttgacttataaattttttgtctctaaactttagatgtgtaaactttaggtgtataaatttactaaaatagaaaagtaatgcggtgccaaaaaaggaaacaaggtggagatgtggagggagggaggggggtgtgcaaaactgatcgccctgggcgagcgagcggatcgctcgcccagtagcattcccgtaaagtacctagctttaataataaaataagtcatggtaaatacttacatagtttttttcaataaggtgaatagtcaaacatcatgtctaaaattcaacaatgccatatattttaaaacatatatagtatattgtaaaattgtaagtctaacctaaagctcgtagttaagtagccatgcgggcttgagatggtcttgctctgcattacactagggtttaaagtagatttgtgtattctcatgttctatgtataataagtattaacttatttggaaaataaaaccgatgagtccttatttgttattggcatattgcgataccatattcgcattaatatttcattgaaatgtaaaccctgtacacacgtctttgaaatagtagggggaaataacggaagaggccaccatccaaagataaataaagatttttatcaagattaaaataggataaattgtcggtgaacatccaagaattaaaagttaacgcagcctcagtcacatgattagcatgttcacattcaaatgtgaaaaaaaaatctgaaactattttttgatgaaggtgctatgtgatttatcaaacgctctccttctcttagaacaatggatgtgtttagttcagcgcaaagtttagattttgattgaaattggagatgatgtgactgaaaatttgtgtgtatgacatgttgatgtgatggaaaaggactgaagtagccaatgtcatgtttccacgcacttgcgtgtgaacgaaatatgcatattccccgtaactttttccaaagaaaaccaaggcccccctttttcttaagaaaacaagaaaaccaagcccgtataagcagcttgactcccgcgtctaaccattacgaacgagaagaaaccgcccacaagccagcgtgtgaacgaatcaacacacgcggagcgcgaccgaattaaccccccttcccccaacgtcatcagatggaacaaattcccctcggtttagtgttaaacgtgccacaaatcacctcctaatcactaatttttttctctcccatcctctcgccgaaaccacccaaaacccaaaagaaaacggaaacataagagcaggtacaataacgagctattagctaactataaacatattttaataagataaaagataagagagaaaagcagcagactacgaatctgtagccagctgcagcacggacttcaagacgcaatgtgtatatgacagatggactatatatgttaatagtatagtaagcaactattatatgaatatgctattaaattagctatagataaattaaagctagcagtaggctatactattaaacttgctctaacaaagaaaaagtaaacgacccaatcttcggcactaatcaaccggaggacgacgaaccaaccaaccacccttcctcctgacaaaagcaaccccactcctcctacctgtccccgcacaatccccaaggcgcaaacgcgtgccccacctgtcacccacacgtaccctgaggctgtcagattcgatccttagccatgttaatttagggcaattaaactacaccgagacgaacgaacgaactataagccatggtccagtgcttagccgtggcgaatatatgctccctcccctaaataaagctcgcgaacgacgtacaccatccgatcgatccatcaaaccagacggctagctggaggcgactattgtgaacttgtgagagagtgagcttacgacccacgggctgcacgttgccatccatcggtcggatcgttgtgatccgtcgatccagtcaagtcgcaggaaccgtgaaaagatcggccgatccgtcggtagcttagctcccgattcggtggctttattcccgccattaattagtaaaaagcgaaatgaattcggcttgatcgatccatccagcttgccttccggactccgcgtatatatttcccgccacccctgcctcgccttccctacgacatcgagggcgtcatcgagtgagtagtgtgagagctgagctgagcttagcttagcttgcgatggcaatggcggcggcggcgcaggtgaacgtgtcggtgtggagggacgacgactacaggaggatggtgatggcgtgcttgatagaggcggtgtacctgctggagctggagaggcaggagaggagggacgcggcggcggtggcgcagcagtggtggaagccgttcaggtacaggctggcgcacgagctggtcgacgagagggacggctccgtgttcggcgccatcttcgagcgggaccaccagccggcggccgcggtcgacggcgaggcgccgcgggcggtgatcgcgttccgcggcacgctgctgcgggggccgaccatccggcgcgacgtcgaggacgagctccgcctgctggcgcgcaacagcctccgcggctcggcgcggctcgccggcgcgctccaggcgctcagggcgaccatcgagaggttcgggtcggagaacgtctgcctctgcggccactccctcggcgccggcttcgcccgccaggtcgccaggatgctcgccttcttcttctcgccgccgtcgccgggccaccaccaccacgccgccggggcgtcgctcgagttccacctcttcaacgcgccctacctgtcgctgcccatgggcgtcaggagcgtcgtcaagacggccgactgcctgctcaaggcggtgcgcaccggcgtcgccgccgtcggccggtggcacggcaaggcgctcaagaacgtggcctacgccaactgcatcctcggctacacgaggctcgagagcagcaggaggttgtgagagagatcgaccacgaagacgacgacgaatgatacgtgtacctagctatccatcatctgatcatccccatggaggaattcaattcgaggagaacaataaaaagcatctggcacacgaggatgcacggtttaggctgccctgcatgcttgcttgctctgtaaatgttaaaaacgcttttgctaattgtgaattatctagctactactgttctttttgtcatggcctgttgactttgcccagttccatgcatgttaactagttcaaatgttcaatagatctctacgcatgcatgaacggtttgagaatcatctttctcagttaattaagtcgtgtatgctagtacggtgtatagatgtgttgaactaaaacctttgaaatggaggaaatttaaaggaattttagacgagttgaactaaatcctatgaaatttccatgaaattcttatgatttaataaaggagcatgaaccaagtagagcatgtaggttaacttgcaaacccactctagttcatttttttactagtacggtgtatagatgtgtaattttgactacaaaatagatgcatattgaaccattagttatgagagattgggttaatgggctaagtgcatatttaacacatattttctccatctcatagaaaaccaagtacatcccgtactagcttggtttttacggaataaaaatagctcataacttagcaaaaatataagatgggggagagatataaaagaggtctctttgtggttgacttgtgttttggccgagaatattatgcggacaaaggcgatggtgtagcctcgctccccaaggcccttgctggtagatagagtagacctagataagggcctcgctagctagcactatggctccaaacaggactaatcgagtactgctggcaaggtcagagatactacctccatttttagtgcgtgataacgttgatttttttaaaacaaatatttgattatttctcttattctaatatttttgtaaatataaaaaaataagtcatacttaaagaaagtaacaataaaataaatgataattacataatttttttaaagtaagatgaatgatcaacggagggattactgtgttatatatatttttgcaaatataaaataataagtcatacttaaataacatttaacgataaatcaaagtaacaataaaaccgttaatatatatatttttaatatatattaacagtgttatatttttaaaaacggagggagtactgtatacggtcatcaacaagctcgatcattccaaatccgcccaaaggttggaggcgccaaatctaacgattggtgacacaatgatgccaaatcaggtgatcatggaggacaacaattgcatttccatagtctgaggctggcaacaatcgttttggccaccagcaaagtgagcagcgtaggatctagggacccacgaagtctaagtgtgaatacaacagctggagtggtcgaccaacaagcttgagaacattatggcgatcataacacgatgacaacaagatgacagtggtcgattggtcgaatgaggtgattgcaggcagctggtgtccaaacaagagatgaaaaaaaaaacttctaggtacgaattttagatatagcatatgtccagtactgtaattggaagattgttttttctttgaaaaagaggaagtcgtaggttgtaagagaatacaatgataaaatataatcacacctaattgttgagtacaagggaaaactctattcatcccttaaataggatgtctcgtcgtttttacatgtcacttaaaaagtatcaaacttttttttaaaaaaaaagtaatatcttacttcacaaagcatgaatattcaaatttaacaggtagaaaaacaataacaaatttaattatgaatagaatacgtaattcattgtcaagtttattatattttatttcgaattgtattagtcgaattttaacttgcatgtttttgaaaatatattatatatattgatctatcttgataaatatttttaaaatttttgatgactttttcaatgacatgcacaaaacgagtgtccctcgagagacaaaaattcaattccgcagttcgagattatattacatgattgtactgtaacactgctgtacgacaacatgccctaacccggctgtatccgtaccggcaactgcaaggacgcacacggggacgcacaattgacggtgaaaaacgcaacgcatgccaccaccaccacaccactgacagcaaaggcacccaactatgttggggttgtgcatgcattgtatgcttcctgcctgtacgtcgcaaggcaaagcgaactgccacttcaccacctcctgtctcgcaaagccaagattagatccaacaggtgaaagaaagaaagaaaggaagaaaaagctgagcctgagagagagagagagagagagagagagatacagctggagacgggcaaacaatggctcacaataatactaacattaacggccgggggggaaaagagatggataccctgcctgcctgcctctacgttgtcgttgtgcaggcttcctaaccttaaaccagctgtgttctctcctgcgtggcctgttcatcgcaacagcacacagcatgattaaccttttcttgggcctccttgctctgaacaaatagattctctcttcgttcagaaagaaagcatctctgttgtgttgtgtttgtgttctctctctctctctctcgtttcgtttgatccgtcgcttcgtcgcaaagcaaacggcgatatgcagcaccgggcgagcagcttgcatcacgatggagcaccaggtaattaattagtaattctacaaatctcagatatatgctgtttcggcaaacgtctattaaattgcattccgcctttggcaaaaagaggatttggctgattaatttttttttgaatgccttcttttttttgaatgccatttggctgattaattagcgtgtgctttggcaaaatttcgttcaatcgatcgccttaattttgtggtttgcaattttttagggccaatggcgccgccgtcggcggcgtacgacgagcccgcgccgccggagcatcctcagcccaaatgtggattcatcgcaggattgtaagatgctagaaattcgttttcttggggctatgaatttcgtgtagaatttttatcctcatgacatttttcttacgtgatcatgcagcttcatggcgctttgctgttgctgcctggttgacgaaatgctgatgtgacacggtttgcatggtatcagcgattgtacagctgtagattttatattgtgctttagaattaggttgtatataaaaatcgaatgacgggaaaattgatacatcatgcagtgcaaaaattccttgaaagtttgagttctcgggtctgtttaagtttgtagccaaattcaatctagctaaagtaaatttgacagtgcaaaaatattagtcatttatttggtttgtagccaaagaaaattgacactgctcaactaattgcttactttggtagcaaactaagcgaaaggctaactattttttgccaaaaaaaaaagcaatgaccaactcttaccgttgccaaaaaaaaaatggcaaggttaagaataggaatgaaccaaaaaaaattcctcgcagtacaatttccacgaatgcttagaacatcttcagtaaaacccctaaatacagtccttaaacaactttgagaggttgagactaaaaaaataaagtacaacagggcccctacttaaggccctaaagtaggaaggctcccaaattccctcctacagcccctaggcctgggggctctatccccagcccctatccagttttctttggcgcgggggaatgcttccacgacgcgtgctccttcccgtgcgattgcttgcacgctgccgactgtcttgttgcgggtgtttctgctctaatccggccatcgccctgctatagtattggtcacctgcatggatgcacgtatgcatggatttttccacatatcgatgagacgtggtttggttcctgttaagtgtgaacagccatctgccgccagtggccaactgagatttgatgctgatctagaaggagctactactatatctccttgcatatatgcatgcagttttgtgtatgcactggatataatatatcttattaatattgtccagctcatatatgattatatgcatccatatatgcatgtatatcattggatactgagtgtaggatggatgaactgctactgctactagccgcaacagatgcactaatcgagcattctagtgagtcatccatgcactcacactagtgtacgtatatgcacatatcagtgtgatattagaaaaaaaaattcaaatttcaattgaattgtgttgtttgaaattattaatttaaatttgattaaattctatgcgttggaaatattaatatttacattattgtaatattaaactaaacataaaatatggattataagatgaaatagaggagaaaaagaaataggggctaagaaatagacgttgttgctggagttagaaccattcttagagtcctgaggaaatgagggcagcccccatttaacctttagggactctaaaataggagctattgctgaagatgcttaccaattcaagtaaagcaataaaagtctctataggacccaaggtaaagagagaaaatcctgttgtggacatggcttggacctaagacctgaacacattgattgcctagactcatcgccaggcctccccatcatggctatattatttttaaacaacaatattcatttctatctttatttcacaaaagctacaacaattattacagatgttacaaccttgcaggtcgaacaactgcgaattacaaaatcgtaacttgaaagcatagacaacaagaaaactatttagaacaccaacttaaaggcatagatagcacatattgttaaatatccatatatgtttgacaaaatatgcataaccattgttgcctcaacgggttgcaaaacagttattgtcttctcctgaaaacaccaaggaaacaaattaaaatatcttaaatcagcgaccgattattgtgccgatcgaatttcgcgtacatcaccatcaatgattgacgttaaatcatagtggaagataatatcgaagagtaaataaaatgtaaatcgtccactcacccagattctactagtagaaataaacaatttttttaattgattgagattggccacgaaccaaacaagctatatatatatatgtgtaagttcggaactaggaaattcatgtccgtcgctggttacagaaaacatgctacatcatgcatgtcttccatgcaaaatggggagggagagacaaactatcatttcaaacttcaaagtgctatatgagggacatggggaattcatgtcaccaattttttctcaacatgtttctccctcaatctgaggcaaaagaagagaatgtgccccctttaattcccctgcgaggaaaatatgtaatgaaaaccacattatagtggaaaaaaactaaaaactatcatagcatagaaaaataaatgtctcggattatttatgtcattatgagtaaaacttttattcatatcgacgtagacaaatctcatacatatatttttacatcctacaaaagttttaagttttcactacatatttttctctaataatatatagtgaaaatctaccacaattattaccgcacgagttgtacacagtcacactatagctcgaatggcttggacagttagagtacctgacaaatgaaaccccctttgtttttccaccactcttgatctggactaggatttaccaaaccgtttgaggtggggttaccgtcaccccgcagtttggcgattaccgcgcggttatcacgaggtatatcgtggttttccaaactgaaaagttaccacatgtgataatcacaataaccatacggttaggtaaaccctcatccagaccatcggatcgtcaatccaacggccgagcgcacacggccaaaagctgtttcccacaaccccaacacaaacagcgcccaggcccgggtcggatcgagccgcgggctacagggcccaaacccagcccaaaagagaacccgag

SEQ ID NO: 5909 - DNA, 7955 bp, Oryza sativa
catgccgcccatggccgcgcctgcaccgccgcaaaccaatcccccacgacctgttcgtccgccaccgccgccgcccccgccgaggcagaggctgctccggccgctcccggcagaatcgccgccgcccgccgcgctggccaatctggaactaaccggttcccccgtcaaacccgctgttgaagacaggggaggcgagaattccggcgccgcgcggccgcccaagccgccgcacctgaagccgctgcactgggacaagctccgggcaatctccggccgcaccaccgtgtgggatcaggtcaagaactccgacacattccggtgcgcccccctctcttcaccccccccccctccattcttccacattacccccatctctctgtttcaactgagctgtctatcgatggcgcggcagcgtcgacgaggaggcgatggagagcttgttcctgaacagcggcggcggcggcgcggggagctcggacccggcggcgaggagggggggatccgggaagcaggagaggcggttgcttgacccgaagcggctgcagaacgtcgcgatcatgctcaaatcgctcaacgtggccgccgacgaagtgattggtgcactcgtgcgtggtgagattgtgctctcaatttcttacttctcgcatgacgtatgtggtgtttggtcccctactactgtgtcattgtggaatttatcaattactactactgttatgtgctatgctctctgcaattccggtggccacatgtcattgcacagtagtacaatctagtcactgttaaattaagcacacaaacatatagtacctgacaagtgatttggtttgtttttttttttggaagatgagtaagcctgtttggtttctggggcaaaaaaaattctcagaattaccttactgctatcagagaaggaaatgaaagatgagctaaatgggagaaattccagctttttgactgtacttaattttctactagatgctaggttagcataatttatcaattcactctgtgctaccgttgaatttctgactcttctattcatctgaaatcgacaatgaaagtcggggcatctgtatgccacaaatcataaatcacatgtcagtatgccaccaagacctcaatgtccttacaaaatcatatttttagtaatcttgttgactgaacggcagtttttgagatatttaactctgtactcatcactataatcagtaaatatttctagaagtgtcacactgttctacaccaacgcacaaattatacctgaaggttctcgaaatttcaggcataagcaattgtcgtattgctcacctaacaaatatgggagtacatgcctagcataccagggaatctctctccctctccaatcccccaacatgacaccttttcctttaattttgatgtgaactgatagagaaggctcctatacttgtcctgcattttgacctccattgtcacattcaattatatttttggtggggggttactttcataatcaaattttctggatgtaatgcgttccaacaaggataatttgtgcaccataagtccgatgattacatggcaatgctgtgtttgttccaaataagcttctattggttgatgttaagtttctagagctgagatcctgggactgtgggtgcaagtgactggactggagtatcactatgcgatgaaacatggacgttttctttttgttatgtaacttttaatttgttggtacatatacttttgtgaatagccagtgatacagtctgttgccaaaaatatatttttaaagaaacagtgatgtagcatcattggtcatgtcatgttaggccatggtgagatcagtaggcagattgtgacatggatagaataggcgagatgcatctttcacaaagacactagtgctttaccttttcgtgtctgttctgtattgggataatgttatattacatgtctgtattttcaatgtgataatagctgcatttactagtggcatgcacacagatgagctgtcagttgctttagaacttctgcactattagtttgtagaacgtagattatgaggacttccttgccaattttcattatccaaattaaacttacatcttcatttcaaggtttgttttctcattttattcatcacaaaccatcaacttctctcttatattggcctacagacgtgtcactcgtttatcgtttgagctggaaataattggtgatataatttctattattttttattgtgaatatgttaacacaatattcttgagtttatcatgtccaatttgtgaaccaggattctataggttttgtgagttactaatccattcttaaagtaattgaataacaaattaacttggttgatattacatacattgctcattgttaaaaaaggacagttgaaattcttgtacaccgaaacaaatctggttgaattatagaagtggttgtagtaggtctaaacgtctagtttcatcaatgccttactgtcaagggacatcccttaccaaacttaggtgttttattgcctgatcttgaatagtacaatcatctttcaggttgttatttgaccatctatatatgctaagaaatatgttttctttttgtagataaaggcatattgcattccgtactaaaaactacatatgtcatcatgataagcatgtcacattccgtgctataaactccatcatatgtcatgagtgataagttgtcagagatcacgactgtgttgggaggctaactaccagtgaacgctattgattattgttgttggtgtacaaataaaattcagtagaaaccataactgaattgttgcttctttacccatgcacagtgacttatatccccagattttcctattatttctattgttaggcgtctcgcccggcgaaaaaaatttttgcccggcgaaaattgttaggcgtctctgtatgtggttggtatacatcaactagaattatgaatgctgtgaacctttgtgggattatttaatcatcactgttacgtgcatgcacggtttccttagggaattcctattatagaaaaggttaatgctgtgtatgctacagtagtgggcctatgatgcagttgttttcttatgatgtcacatggaaacattcattggctatgttggatacttggatccaacaacttccattccaactggagtatttgtttattgtccagagccaacatatctcatcaatagttcaatacatttggcgtgatatttaaaacatagttgacagtactcagtgaaaactcttgcataactgcattactttttggagtatgaatgatgcaacttttgcctgatttagttataaatgttttaatctgtgttaccaggaaatcctgaagatttaggatctgagttctatgaaacactagctaagatggcaccaacaaaagaagaagaattgaaactaaaaggttatagtggcgatttgtcaaaaattgatccagcagagcgctttctgaaagatgtacttggagttccttttgccttcgagagagtggatgcgatgctgtacagagcaaattttgacaatgaagtgaattatttaaggaaatcttttggaacattggaggtaaaatagctatgatgatcttatcattccatgaagcttacaatacttcctccattttacctaccaattatatcaaattaccaactgtttagatattattctcttctcttaaaaaatgtaaatttaagataggtgttttcatgcttcacaaaagatatgccacacattctaagtttctcacccgtgatctgtccccaaaaaaaaaaaaatcaaatagatcacttatcaaacttctgaattctcaattattttggagtaaaatgtaatattccttcagaaatctttcaggcagcctgtgaagagttaagaagcagcaaactttttttgaagctgctagatgcagttctaaaaaccgggaaccgcatgaatgatggaaccaatcgaggcgaggcgagggctttcaagcttgatactctcctaaagcttgcagacatcaagtcaacagatggtagaacgacattgcttcacttcgtggttaaagagatcatccgatcagaaggcttcgattctgatcagagcgcggttaatcctggcagcggcagcaaggaacagttcaaaagggacggcttgaaattacttgcagggctcagcagtgagctctccaacgtgaagagagcggccacactggagatggacacactgagcggcaacatcctgaggctcgaagccgatctcgagaaggtgaagcttgtcctacagctcaaggagacttgctcagatcaaggcgcgagcgagaacttcttccaggcaatggttgtcttcctcagaagagcagaggcagagatcaagaacatgaaaaccgcagaggagaacgcgttgcgcctcgtgaaggagacgacggagtacttccatggcgacgccaccaaggaggagcctcaccctctgaggatattcgtggtggtggatgaattcctcctgatactggaccgtgtttgcagggacgtcggcaggacgccggagagggtgatgatgggctccggtaagtcgttccgcgtccctgcaggtacctcattgccgcctcatcggaatgagaaccggcgagttcttagctcctccgatgaggacagctcgtcatcttaggagcaaacatttttggtgcataggttagctgataagatttgagagtagtgattcttccggagctgaacattgtggtgtatagactgtaatcaccgtcagaaataagggagtcgtcactgtctgtcactgttaaaagtagatgtttaccaaagctaaagaaaggtagctgtacaaactacaaaggcattcagtattatggtagtatgttcttaccattcagctcaaatagcatctgtttgagaattatcatattaagagaaaatatatttgttggaagtgtaacttcagttttcttttcaatatagtcatgttaccgctgaacaaatctatgcaacctttgaacaagtcatgaacagatttcgtggtcgaaagtgacaattcaattatcagctcggtagcgtcattttagagaaactagctgttgcgcggccactacccaaacaaaatcatatattttttagtatgattttacttaaaatttattaaatagctatctcattgtcttaagactttaaaagaccaaaccttatcatcctcgcgtttctaattatatagtttttaaaagtcacaccatttgctaccccttatgtcatctcattctttatttgcttgctcgatctaccactatttctattcattcttcttggaacctttaaaaattggattttatagtttttagagtttattgtcatgttgggtttcgtttttataatttctatatgtcccatcaaatgttgccattatattcctctacggcccgtccactgtttcttctctttgttgttattgagattttaaaaatcgaacataattatcgtttgggttcatttttactttctagaagtcccgccaaatcatcagcggctttgccattgtactcctctacggcttgcccgctgcctcccctctttattgtcattgagattttaaaattgaacatgattatcattgggtttttttttacttttttggaagttccaaacctttaaaaattggacttgtagttttttttataatttttagaagttccatcaaacgatgccactatgcccctctacagcccgtccatcgcctactctttattgtcattgtgattctaaaaatcaaacataactatcgttggaatttattttttattttctagaagtcccgtcaatcgtcggcggctctacaactatactcttatacaccccgcccgctgcttctcctttttattgtcattgagattttaaaaatcgaatatgattatcaatagggtttattttttttactttctagaagtcccaacaactgctttacttgtttgcttcatggcatgcctggcgcccctccttttaatcgtcattaggattctatttggtgttttattaataatttttatatgtcgtatcaaccgccaccactctactcctttataggtatattacttaatttatctcgtcatgtgttttatatggttttttctttcaatagtctttatttttatcacaaattttagttatttataaattgtattcctaattgaaatcttatttttcttttttctaatttcagaatttattttttaaaaaattagttaataccgtattgtgttcttttaatgtttttattttttattttcaatttcagttgtttcaaaattgtattcctacttgaactctcttttaatttttctaattttggatattattttattttttattcaaaattttaattaatttcatattgggttcttatatggattcttctttcaatattgcttatttttaattccgaatttcagctaattttaaattgtattcctacttaaactcttcttttattttattttgctaattttggatttatttttatttttattctgaattttaattaatcttgtattgggttcttatatgggctcttcttttaatattctttatttttaattccgaatttcagctatttttaaattgtattcctacttggactctcctttccttttctaattttagattttattttatttttatttcaaattttgattaatctcgtattgggttcttatatggaaacttctttcaatattgcttatttttaattccgaatttcagttatttttaggttgtattcctacttggactctccttttcttttctaattttggattttattttatttttatttcgaattttgattaatcctatattgggttattatatagaaacttctttcaatattgcttatttttaattccgaattttagctatttttagattgtattcctacttggactttccttttattttttttctttttctccgattaatgtgggaatttctagcctccatagcgaatgtggtgcctccttttcgagctgtcttaataatataatagattttcagtcagttagtgctatttggagaaattttcagttgaaagaaggattggggtgcgtttggttctttgccaaacctaaccaggtaaccaaaatttaagcattgctatttttttcggtttggttgattttattgagttacatttaccgatcactacaatccaaaagattaaggaattaaatttgaaaatatactattcatttaattttttctcagtaatattcgggatgtaaaattttttagggaaatataccgtcggtctctaaaagatctgcgatttattttttccaaatcttcgcaaaagctttgccactgtgcctccatggaactgcaaacctgcgatagtagtacaacaaatgcataatttatccacttcaagccctgggaaaatcccatattacaaaagggtccctcccttcttttcgatgcccataccggggcttcccctcctcctcaagatcgcctacgcgactgccgccggcgcgttggcgctcattgtcgcggcggggctccggcgggatgacgccgtcgcctccctccggcgggagatacgcgacgccgtcgccgccctcgtggcgagcaacgaggactgcttagtcatggggtaggtccaaggacaagaaacctcctctgacccatcctcttcactacgttagattcagtattgcaacacgaggaagatcgttctagtgattatctacgtaaaatctcttcctactacttttgttaaataacttgtacacaactcagccgcttctaaaagatacttccttctataccactactagtggactcgtggtaatatctttaaaactactactgtactctccaatttctcaattccttgtcttcagccataatactgtattacttctataaacatctttatttccccttcttcaacctcacacaactcact

SEQ ID NO: 5910 - DNA, 27121 bp, Oryza sativa
  unsure (1)..(27121): unsure at all n locations
aaaaaatttgtatcccgaatattcgtgagaaaaaaaatcgaatgaccaatatattttcaaatttaatgcaaagattaagttgatgagaaacgacgagcaatttattttatatcctaacactaacacacgtgaggcaaacaatttattttgtactcagttactttcccaaaactttggcaatagccaactcttgccattgccaaaaaaaattggctaagactacaaacgacaccaaaccaacaggctgttggagatgtttggacttgacctgaaccgtccacatcttatgggcctctatatttgggccttacattttcccaaccaaaataacaatacgaatcttgatgggaagtttagacggctgagatttcgcggtaaccgccattcaaacccgccaccgagttccccgccccaaactccgccccgctctctccgaaccatcaaacaatctcgcaccactttctctctctctctctctctctctctctcgtcgcgtgtcgtgtcgtccggaaatgccgccggtgtcgtcgtcgacgtcgaggccggcgtcgctgccgtcgtcgccgcacaggccggcgctccggccgggcagcctgcagcggctgctccggccgccggacccctccgacgacgacggcgccgcccccacggcgccccgctcctcccgcggcggcggccgcgtcctgctccaggtcaccaacatcacccccgcgctctccggcgccaaccctttctccggccaccacggcttctacctccgcctctccgactccgcgcgctcctgttacgtctccctccacgccgaccacgacgacctcatcctcaccaacggcctccacatcggccaggtcatcgaggtcgagcacctggtgccgtccgtcccggcgcccgtgctccgccatttccgcgtcctccccggccgctacccctgcatccagcaggaacccgccgacgacgccgccgccggcggcgccgcggcggagatcaaggaggtcgtgtccgagcgcccgcgccgctcgtcgccgacgccccccatcccgggcgagaggagggcgcggcaggcgggcggcggcggctccccctcttcgatcagctaccgccacaggtcacggtcgatatcgaacttgtcggaggcgggcgcggcggcgaggaggagcggcgccgccgtcctggggaagctgaggaaggtcagcgtcacgtccatcgacggcaccagcaccgacgacgacgacgaggagtccgacgtgtcgtcgctgtcctcggcgaggaggaactgggatttcaccggaggcgtcaaggacaggaggcccgtcgctccacggagacgcgggaacagcgtaaatccatttctttgaatctcccaaaatttcgcgccaaataacacacaaattgcaacaaatcaaagctgattcggtcaatttttggtctatcatttaggtttctccaagtaaatccggcccaaactctactatcacgcagaatgatgatccgatggagtcggtgaggaggaaagccgagaaggcattcaacgtgctctccaagagggcgtctgctaagatgaccagagaaagctctaattgcacggtggcgacgccgcagagcgctgcggcgtcgagcagcatcaagtggtgtgagagcaatgtgatgtggagcacactttcatcaagcttgctgaagcatggaaaggtatactggtatatctccctagttgattctactgcatttttttttgcttggttctgttctttcaacaagttaattctggtgattattgtttgcccccaattgcaggaagcagtgaagcagagagatatggcactgcaggctgtgcttgatggattgctagaggcatctaccactgagaaattgataaaatgcctgaggtgagtgatgtttagagcttatgtagaattggcgagaatgattgggtgaaaattttacatgaggattgagaaatttgggaataatacagtctgttagaacagtaaatttgattgatatctgatttcacttaattatagaattgtatgatcaagtttctatacttgtaaataacattgcaccatgtaattgatagttcatttccccctctttttgcagtacttactctgaactacaatctgacaaggaagaaaacccaaaggagctcatcgacaggttcttgaaattctctcaggaactggatcatgctatcttcatcgcccaatcacagaccaaaattaggcatgtaaaagcatgtggttccaattcaacatcctcagcttcaaccaaagctgctttgaaggctgcattggataggaagcagtctgccatcttatggatcagagaagccattgaagcagacctctcacctttttctagccatacaagacccactgaatcaccaaagctatcactggcagagtcaaagcctatgaccccattgttctgttgttccaagccaaagtgcaactgcagcaaaaggtcctcaaggaaagcatctgatggttcctctcaaggaagtaacatgagtgctgccatggacctggctgtagcactgagatcagagtgcaactgttggttcctcaagtacatcgacaagttcttggacgatatcgaaagcgagaccatgtatgcaccatgtgattcccaagttgcaggccttctgcagcagcttaaaagggtggatgactggctcaaccgtgtcgcgctacatgagaggatgctttcggttgaccgaacaaacaaggatatcatgttttctgaagaagaggagagcgatgcgtgcgagagggtacggagaaagatttatggagcccttttaaggcatgttcaatatgctgcaatggcgctagaaggtctaaatggtgtaattgatgaagagaaggacgagagaaaataacagtaactgtgcaaagagctttatcaatatatagaatgaacaaataaattttgtgtagctgcagataatataagtttaccatcgtcagaattctagctggtagaagcatgttaggcataacttccaaatgctgtctgataaatgttggatgctctgatggtattgttgcaactattgctaatcttgtctgtgatgagacatggcatccaaaaactaacaattgcctcaagtgcgactttaaggccatgaaagatctgaatagtactattggtgaacctaagtaggacattgaaacaaagctgaggatatctggtgcaatttacactctgatcaattacttgctacacttgtcattacatacttgcatacatgctcatgactgcatctcacatttcattacatgttcttcggtacatttcaatttgtgttgatgtactggtgatgtcaattgtcaagtgtactgcctttttcaaagttagggcccctttgaatcaaaagaattatgaaggaattttataggattgaaatcctataggaaattttcctatgtagccctttgattcaaaggattgaagttttccaaatcctacaaatttcctatggaatggcttatagtatataggttttggaggaaacttagcaagaggtccaacctcttggaaaaaatcctttaagtctatctctctcatccgattcctgtgtttttcctgtggtccaatcaaacgatcattcctatgtttttcctgtgttttgcaatcctctgttttacgcttacattcctgtcataatcctatgtttttcctattcctccgtcttttgcagggatgaagcaaagggtttacccctgtgtgtctctgggttagtatgtgtacaacaaattttgaattattttttagaaattagcctacctagtacctctcttttgataggattaagcttgtattattcctgtcaatgtatatttctctctcaaaaaaataaacaaggtataggattagtgttacaaatgccaacactgtgacatgaaaaatactcatctcaaatggaagtcaatcatatcacttgatctttgatcattaacatgatcatgattacttcttcttatggctttatggtaaatgccaagtagtaggaagaaaaatgaataaagttacattacatgtatgatatttgggactatatgggccagaatcaattaatctctatgcaattcaatgttagctctgtatatccgaggcgatattatttttgcagagaagagatgttcagatcaatattgctgatgttgactccattgtaagcgattggtgcatacatccacgtgtcatcagagcttagcaactgcacatgatagtttgcagcaaagttaggaaggtatttcacttactgtttatagaaaaataatttggttattaacaatccttggctagatgacaatgatatgtaatgtacccaccttaatctgaagttgcaaaaatttgacatactgcactgcttcctccagcattgtactgatgtcaacctgtcagatcatacttatcaagttacacccaaatttctttgtaccaattatcatgctcaaatgtatgaggcaaaaacttagttattgcctgtagttaagtttcatattgagcttacctttgttccattgggaaccaagttctgcaggatcctcaatctttcattgatcctctctctcctcttctgtagaacggacaaatttaacctcatcagaattccttgaatcactttgtcattttttttacacattttattttatttgtacttacccttgcatagagactctggggatcggttgccgccccacggttggccctagtacccatcttcttcgagctcggcttcgcgttgccctccaggtttccttcctctgaggtgcaactgctagaactttgcgtatcaatgtaggtgttgccgccttcgtcgctgccaataggatcttttttgccagccttcttgctcttctttgatgcctgtatcagttcatcaatccaattaggcatggaaaataaaacagcatggtaactgaagtagatcactgttctattaagttatttgcaggggcataccgtcatggcagcactagacttcctcttggtagccactggtgtaacaacctttgtagcttcttccactcttgctgatggatggttgccatgtggagggctgatcagatcctcagtaaggtaggggatggcgcaatgcgcgtcgagatcggcgatcgggaacggatccatgaccgggaactcaaagcttccatagctatgagctggatcagggaagctggtgacgctagagctatggccatgctgaggccagcattgtggaggcacatcgtagttgagacaaccagaagaagaattggagtcggtgtcaaggccaggcaagaacatcgctgccattgcctccatggactcatccatttgctcgtaggtgaagcagtgatcaccatgagctccaagaaactgcgccatcgcgtcggcctcgatcaacggcaccgctgatgtgtatgatctctccatttcagcaaggtgaaaaggcctcaaggcaaagaaaagcactagcttaattagagagatgctgccgctatagtcagctgcaatggctgagttgcttctgccatgcgtgtgatgagagggtatttgtagggtgggtgcagctgggtggccaccattgctgaccacgaggatggagacgccacacaaaaacaattaatcatcaccaattgtttcttgttcttggcaaagaaatgttatctccaatcctcagaggtcaaccccgtggggacggtgctatgtttgatggcggccggattcttgatcttgatatcgacagtccataaacaaaaccagcatgcgcaattatgtcgcggaggtacggcgagtattatttatcttccaggcaagattggtatgatggggattgtttagccttgaaccaagagatgcattggcctctggccatttgcgcaattactactctcccttgtagaacgtgggaagtggtggtgagttgaagcgagaggcggatgcaacgcaagcaaattaaagattattgggattaagctcttgtgtggcttgctcagtatctaaaaaagagttcttgtggatgctgcattattgtggtgaatgatcagtagatacaccagttcatgccgttgtgatctcgtgcttgcaatgggagctgcagaaactacatatgttgccatttcctgcaacttggatagctgtcagatcctcaagatggggggaagaacagattccattgcacggagctgatgttgcaacaaaagttcttttgtgctcatttgatcttgcataacccatgtgggttcaattataacttcaaggtgtaatgtgaagattgtggcaagtcgtttatatttacaatagggatatttggttatcatcacaattggtaagtggccaccaatctttgtactatgaactaaacagcagtaatcaaatatggatataactatgtaactgttctctttttctttttctgttgataaatgctgacttcttttttgggtggaagaatatgcaaagtacaatctccatgtgagactttcagactgaaaaagggtttgcatccgatccaggcaatgttattggaaaaacagaaaaaaaaaacttatcttagctctatagtacgggataggtggttggatctgcaaaactcaaattagtcttaacttctaaaaaaactataactaggcatcaagttgctttttgtattttctgatcactacatatgtatttttttttaattagagttctacagttgattcgttgctgtttgtgacttatttctgaacagtatatttgatatggtggtgttcttctgaatgaattgacaagagttcctacccttttgcttcaaagaaactcttgctttgcaaatgtttcataaaatcaatttaaattcgttcattctttcacttatatgagattatgagcagcagatacattttttaatgggagtattctgcacagttcaataagcctaaaaataattagcattagttccattccagacaattaaatatgcttgttcagtacagttcaataagcctaaaacaactttcaataaacataaaagaattatcactagagtgaattaaatatgaaaaatcggtgattgaatctattatactatacatccatcgaattctttagcttaccatgcatcgttatttaactaatctctgtaaatgattacaacaatcaactaacttgagctatccactgatataatttacattatataacgttattaatgatagtctaagtactttgtttgtacttatatttcaattaaccctacaactcgtttagtataatcttatcatgatagactagtagctattctgaaattttgttgcatgtacttctgaagcactcttaaggctaaaattatatctctctctccttaaaatattaagggtggctccaagaaggctagaagtcaatgtacttgcaccatctctttctccaagttatcgcttttcagtcattgttggatcaattgaggccacaatctattgtactatttctcaaaattgactcacttgatatatattctgcacccagtcttaactggcaaaaactgtactacatttgtgagaaaaattagagtatgttgtcggctagaggttaaaataggcgatattttgcaccttgaatacttgatgttagaatcaactagggaagagaacaaatggtgctgccaaaaaaaaaaaagattgtaaattgcacgcaactcttttgtctttactccagacagattacttactgctaactcattgtcagctaaggcagttgacatttgcttactatgatattagactattattatttttagattattagtaattaacagagaaatatgcatacataagggtttgttttcttcactaaaattggttgactctcggttcataaacagagaaggaagtttccttagtgtcattaaagtaggtaaacagatttctgacttgttaataaaatgtacatttggatttaattataccgacttcctcatgtgtttttcctgtcattctgagtgcattgaacctatatcaaagtatgcacctttcctcatttaattacaaaattgaataagtctaacaataaagtttatgctaaaatacactgaacattcttaattttagacaactcttacgaaagagtatttcatagttgagttaataatccaggaacaaaaaaagcttagccttggctgtcactcttgtcacaaatctaggcagcagatcttgtgttggaataaaaccacacacacggaatcggtcagcattaggcagcactcatggttcattgcattggacgataattaccctaatgctttcactactaattagcactaaaccaaactattatgtatttaatcctaccaaaggcttccctgatccatggcaattatcaaaatgataaacttagtggttttgatgctaagatgcagtactactgtactgcttaagaatcaatgacatgaattatattaacatatcaagaagatgcacgtactcccctgcagaacagaaggattatcgaaattggggtccaagttgtttaatgattattcgatccttgtcatgctttgacatgattaaactacctaaccaccaatccctaaccacctagcatctaattaaactccttgtctgatgtaactaacaggattgcataaagtaatcaatcaagtacaactccatggaccaaagcagaaacagaaaaacaattgttgagtttactaagaacactagaccaacttgcagatcttagcataacacgtaatcagacggggggaagtggctattgctggctctatcctgcttgggttctttgttttttttaggccatcctcttgttgaggttactggaatgatgatgcagagtgtgcaatattgttttatataaaaaggacgctttagtacagtattgccctttattagacaattgccctttattaagcctcgtgttgcatacgtacttaagcatactgagtacttaattagctcctgcttattatagcctaaactttttttttgaacgactcgcacgagacagtgcgaagttctattgatagagcagaaaaaaattacaagattacggtcctggagggtcgtagccaggaaaaggaaaaaaaataccaccacccacgcaccgacatcaccaacacacaagcccaggagaaggctagcaccggaccggccgccgctaagcgtgaccgaccgccactagaccgacaaagggacacagacgagattgcccccaaggggatgccagaacgacgtcttcaagaagagaagcgacggaagaccgccgccgccgtccgttgggactcaaaggagccaagactgagctttcaccaggcaaacgccctcaggaggtgagacagcacgacaatgccctcaggagggtgatcatcgttgtcggtccggccgaggccggactaggttttcacccgccgctcaccacctacgaatccacggctgacgcaccaaagctccaccaccacactagcgtcatagcctaaacttctggttagcatacaagatattctacaaagcagaaccaaaattttcatttcttgatcctatcgtcatttgtataagcaagttccaatgatcaaatcctggttctgttgaaaccacagcagttcagttcacaaacgtcagaggctgcttacaagcttcctggaacaacaataatgtaaactatgcaaaatcagcagaaaacctttttcttccttgaaaatggttggtaaaacgaaattcactgtgcagcctataacttgtccggttaatccctacaagtaaggaatcgaagatgattaatttcacacctattaagattccagcaacactattaatttatcgtcccgttcttttctctaaagatacaaattttactcggttttcgttagtatgttttttaaactactcaacagtgtatttcgtgcgaaattttttttatatgaaggttgttttaaaatattagataaatccatttctttaaaacttaattaattgatagatttcttgttttgtgtgctctaacgttatattcgtatcatatcttactataaagttattccccactaactccttaagcttaacatgcaaagatgccacatcatcatccactaattaacaagatgccacatcatcatccactaacaatcatcacatttaaacatcatgcaaacatgctatatctttatagtttttataatttaagaacttttcaaatacaaacatgttaaattatcatccaacataattcacataatgttttaatgtatatctttattatgtgttatgatatcctatatacttatatagttcatcctcacttagttagtgcttaaatgattaatctctggtacaaattatctttcttcttttttcctctaattaagtcatatcacatcaattgtttttagcatttagatgattaatctacggtccgaactatctccctacttttttttcttccataaagtcataccaccttactttttacatttgaatcaccattctacatactatttaaatttaaattatcataaaccacattaatttacttaatctgatgttatctagctatcttacacgctaatttttttattgttatcacactaaattcccgtagcaatgcgtggggtttcagctagtacattacaaaagaacatatggcggcttagacttaaactccctaaaggttaataatgacaatttcgacaaaaaatcgtccttattaattccatgttactcttgaaagcgtttaaagggaaaaaaatagtcactccccatgatcatagatataaaaaccagacagtcacttaataattcttgcagaagagaagttcataataatcccatttccttaatagcttagtcctattttgattcagtacgatcaacaatggcgatagtgtcatgatacctcattaactacaccactaatccactaactactcacaaaccgatcttgaaataaaaatgctagaaaccgaatatatataatttcgatatgtaattaatgccggttgagtagctagaaagtgggaaatcccggcttacgtaacattgctttatctaagatcctaagataaacattcttgtttttctattcagcacgtgtaatgatcattgctagctccgtttccaagaattctgatattttcacatttttctggagctctgaaattttatttagagttctcacaacaaataatctccatgttctagaatttcaatatcttcaaagcatataccaacaaataagaaaaaaaaatacagagttcttcttttgcaggaaattgccgtcaaacttagtgatgggtctttgctcataattcagtagtagacaatagtgacatttttcttagataattaatctccattacaaaaagtttgatttaaattactttagttggacaactgaagcaagttcttgggacttagcagcagtcggcatggacagcaaaccttagccacgacacacactgaagaaagacaaatcgatggtgccacctaacaacatttcgatttcttcaggtacagatattccaactggcaatatgggtagattatgcatatgagtcatatgtgacaggcaaatataatcaaattatgcgagttaatttagtttccttagaaaagtagagatgaacatatgctggcgatagttaataccactagaatcctcgagatatttcttgcttttatttattaagacagctattcatggagaactggtttttaattaagattaaagctagctttcatggggaagagaggactagctatagggagcaagaattccgagtgccactagagcaagttgaagttggtgagatctactgcattttttaaactcaatcagatcctagtattaatgaggttttagatgcagatatacaccatttgtcatgctcggcttccaggtccttgatcattgtgtttccccaggtatcatatatctgcgtggaacacatcctataaaaatatttcagttctgtggactaaaattgcttcaatgatctctgaattcctaaatgcagaattacagtatcagtcaaatcttcatcctatgaaatttgtttgtcttaattgtacatggaatttatgaactagaaatttctagttggtgaacccaagagtccaagttcaacttgtctaaaccatacggattaatctttctgtttcatatttttactaaaatgcaaaggacacaatcatgccatagaacatgatttccttgcattttcagagaccaattgaaccggtggaatatagagaattcacacaaattcgacgaatttcccctataacatatgcttatccaaatatttgaaatgcgaaaagatttttttttgtttctacaggtatttagctaattccccattatctaaaaaaaattagctaattccctcatgaaatttataggttcttatagattgcgtagctaatagaggaaggaaatgtacttatctacaccattttcaatatttttaacaaataatgttccacaagttttctacgagtacattcttagagctttattcggtttggaggaatttcaaccataaaaatagggaaaatggagaaatagaaatgcttgcacacttcaatccattggaattttttaaaaggttgaagtggatgaaaattttcctataattattcctctacaacttataaaaaaaatttccttcggttttcctatactgacattccttggtgacatttctgaaagcagcagactgagttccctttaattaggcactggattttacaaaacgggccgaatttagtcgagtgaactcgagtacaagcccattttttctaggcccaacagatataactcgcagcccatctcacggcgaggagcgagctaaaccagccggcctttccagaagcttctcctttatataaaccctcgccccgccaaatccccaccgctccaaatttcgaaaacctcctcctcccctcctctcccccaccacgagacctcgcatcgaatccttcctaccctagccaaatcatcgccgccggcatgagcaccgctcccaccggcgatccgccggtccgcgtcgccgtcgctagcggcggtggcgggatggggttggggaaggagctgcgggagccgccgtcggacggcgtctccagcctccggttctccaagcacagcgatcgcctgctcgtctcctcctgggacaaggtgagctggagcaaagcaatcacgcgctccgatcggtcggatcggcgcctcgctggtcgcgcgcgccgccgcttgctatttgtttgggaaaaaaagcaaaccctagcgtttgggttggtttgatttgatttgatgatttgatccatggggttttgatggggggagctttgcttttggttgcgggtgtgttcgccgtcccgcagacggtgcggctctacgacgcggaggccaatgtgcccaggggggtgttcatgcacgcggcgtccgtcctgggttgctgctttcacgacgactcctcggggttcagtgccagcgccgacaacaccgtgcggaggtgatgccgatctccttccagtcccgttcgattggttcttcattgagcgattcagttgagataacggttgcactcttagttcactattgttttgtgctgttctgaatggaattggggctttctgtaaactaatcctccatttcgcggacgtacactatgatgttaaaaataggatatgggggtaattttagggtttgatcatagtatgttacgaacttggatcaacgatcagtatcaaaattgtgctaattcatattttgcttttctgttagttcagatcactcatgtaagttgaagcaaaactgatggcttgtgtgttcctggaactttttttttttttgcaggttggccttcagttctggtgggaattatttcttggtacgccatgatgccgcagttagttgtgtcgagtactcctactctactggtacctgttatcgcattttcatctagctgaaaagtgtcgttgattcacccaacttgagtttttactttttagaggagtcccttccgccgacctggcagtttttagagaagtcgctagttgaattcatgattaagtttctagatgaggcaggtctatctcttggaatttgttaatttcatcctaaaaagtactagagcagtgggatcagaacatttactagttgatttcatgttttagtccctcctgagaagggtaatcctatcctagtaagctggttaatctgatttcagaatgaaattccttctttgttaaagacacataaccatcttttgtcaccgtgctacatgagtttttaaatagtttggctatgttctttaccattttaggttgaacagtttatcaaatacccattccatgtaggagtagttgcttataatatccatcttctgtagctattgcttatattctttttatggttgacatgatcattcaatcatgttgtattcaaaggtcatttgaatgtgaattcttcaattgtgtggtcccaattcactgtccagaatggtcgtcagtaactgttgaatgaatattgattaatcctagcaggatagctatctaatgggccatgttgtttactcgttatacctgcatatgtatcgttgatgaatattatagtaaacagtgcatgaatttaggcttaagaaatttgctactgtgtgaagtgatccttgcttactgctacatcacttcagtcaccactttgtgaaatgttttggtaaattctatctacctcttgaatcttccaatataacattcttaatgtatgtacacactacttttgaaattttaagcacgaagctgatgcctgatgccattatactatgatgatttataatgacatcaagttataattaactaattttacttcatgtttatttgcgtcactgcattgaagtagccacttgcatgaagatattaagaaaccaaccatatcaaagcttaaactgtctccttatatatgtggcagtcatttcctgtaaaacctcaattcagttagtgcaataattgccttacaatttgttgcttcttaatgatatcatggagcattttgtgtttacctctaccatgtttcacgccaggacaagttatcactggcagctgggataagactataatgtgctgggatccaagaggtgtcaatgggacaagtcatcatacacttgttgggacacataaccaacctgaacgtgtgtactcactttcagtatcaggatataacttggttgtcgcaacagcaggaaggcatgtgaatgtttatgatttgcgcagtatgtctaggcctgagcaacagagggagtctccactaaggtatcaaacacggtgtgttcaatgctatccgaatggaactggtaaggcactgttacttgattcgagtatttcttcgaacacttaagatctatgtgtgctaaataatgcccatgatatgttcactcttttttatttgtgagcaacataaaactgtgctaggtaaagaatgcttgtctagtttgatattgaagatccttattggtcagttggaaatagactatgaaactcaagtcatactagcttgtaataaatttctacatggttgctgttcccctagctcttgagttccatacttgcatgtatgattgaaatataaggtgcttgaaattcattcgattatattgttattgttttcgtgtgcctgacttcagctgatatacaagttgcttcaaaccatcatttttgtattggtcatttcggctctgttgcttctttacaatatacctgatgtgtttcctaatatactgaggtatgtggaggcatctcatatgtctgttattgacatatgcaattgatgtggaaatcatgaatgcacatccatgtattcttcattaccagagcatttgactgtttcatcttcccacgcctaatttctgattacatttgctgatttgcatggcagtggcaataattataaatttaataacaagagatatttttctagtttttgcaagggttctagccttaaattttatcttgcacgtaaaaaatgttacccaatagtggtcccgactactgaacatgaaggcaccatttttcaggacaaaaggcacaggatgactcatgcaatagatattttatttcgatttcaaatattcattttctaaagtaggtaatgcgaggatatcatctcttgaactaagtgacagctatcttttatttttatgccgtcttttaaatcttcttttagtttcttattaaaattcagcaaagcaccattgagtaaggttccaaagttttacttactagtttaggctttgaattccttgacataactttgatacaggatttgctttgggttctgtggaaggacgagttgctatggagttctacgatcaatctgaatctgctccctataagaagtatgcacctaagctgctgaaggaaaactctttcctgatagctatttacttaagctgatattattagctttgccggagatcatctttttaatctacatattctgctgtgttccatttatatacgtagttacatgcctttattctatccaggtatagtttcaagtgtcatcgagtgcctgaggatggagagaccaaagtctatcctgtcaacgcaatttccttccacccagtgtaatgaaatccccactgatccctcacaaacggttgattattttccgtttctttaatggcctcatctaacatatgcagacacggcacatttgccactggtggatgtgatagatttgtgaacctttgggatggcgctaacagaaggaaactgtttcaagtaatagtcccgcgaactattttttgaagatctctaattctctattctgtatcacaaattcacatcagaatgccttagttcttttttttttcatcttttggttgcagtttcccagatacccatccagcatcgctgctctgtctttcagtagggatggccgtctgcttgctgttgcatccagttacacttacgaggagggagacataccgtaagaccagaatttgtctaacccaactattctctgtcagtattaagtattaacagttgaaactggttctcaccagcattattttgtacaatgcagccatccgcctgacgcaatctttatccgtgatgtcaacgaagtacaagtaaagcccaggcccaagatcacattcactgatccgccatcagtagcgtccccatcagtttgagatgaagcaatgctagtgaggtgcgtgtcttcccccaattcgcctgcttccttcgttagttctgacgctttccaaacttgagtgctcagcgttaaccgttaggtgaaactgtggattatgttcttgatagtaacactggccatgtgacagactaagacagtatacactatccttgtgcggtagtatgtgcattgcgaaagacagaagacggtatagcttggggttattaaatcactaaaattcccaaaggtacaaactgctggtaattctcaacgtataaactcagttcagtacgtagttcgcctcaccctgccatgtcgagtccaaatccctcttgatcgtctttaataaaggagaaaaggatcagctcatttatgacagatccaactggatcgagcagcgagacccacaaacctagtattatactgctaataatattatggaattccaccaacatatgtagacagcaactcgtggggattattctccacggagacgattagggaggcaccgtgcggatctgctcccctatcgagcgcacttaaagcgttcgtgagcgagcatgtgggaagaagctagcaatcaaggcacagctaatgttgcttccaattgaaaattaatgccctgagtaaagtattagcttttgattctgcgaaatactaataccccacgtcgagagtgagtggcacagctgcaggctgcagctagttacagcagcagttgtatatatatgcctttgtcgatctgcctttgtgttttagattctggtacccgtgtggttattaaagcgcgaagcgagatcatcactgatctaagtgatcagctatggctatactgccatactggggcgcaactaagtgtgctaatgattgagccatgccgccaaattgtgctacaaagtataattgagcacgccgctgcacgggcacgcggtaccaaccgtccgttgtgcacacgttggctcacgttttgtcccaaattaatgctagtgttagtgtttctgtagtctcaggagcagaattaatgagtttgtactttgtactagtccttattttaccaaaccaaggttttgaccttttatatgacgtacgtattgcatactgacgacggaatgctcttgcttccaagccgaaatagctgtggatttgttagtgtttaattcttggacagaaaaagatgatttgaacgtcatatattgtggattagaactttcctgcgtgaacattttaataaaggttcttcaaaccgtccattttaatgttgccagaaaacaacagttcagagttcagatatgtatcaactggttaaatcattgttgttcatggggcggcctgtgatcaccgtatacgtgtggagctctctcccctgcgaaggctctcgtggcaggtgaggtgtctcgcccgtgcggcacacctggggcgaccacgcccaataacgtgcctgctcccccggcgtgcccagtagctagcggcacgccgttgtcgctgtcctggcagttgatcgatcgccggttggtcgagccctgggccgtcggtgcacccagcgtccgccgcgtggcaagtgcctgtgagtactggccagtgtcttgctgctcgagtactgaagcgtgttcagttcccattggtagcctggggaccaagtagcaaggaatcaggagtctcaggactgcaaggtgctagtagcagatggatctggtctggtgccatgtacacggcacacgtgcatacgctttgcaaggattcgcaacgagaattttgcggtggtgccgtggagctatacgtgacaaatgtggggccagcttccttttctgcgccgggcatatgctagcttgagtgtgaaaaatattactactccctcctttccttgttatatgatgttggacgtcaaacaaataaaatcagataaagaatacatcactaaacagattttagaagagaaaattacacgaacaatggtcagggatcaagtcgttctcaagctcgggatgaggtgaatggagagaaagtgtaacttacccatgacagcaacggtaaggagtaaggacaactatcttcttatattaataacgagctcttccgctccttcgatgctagtgacacataaactttggtatagagtatctatgaatcagggttttgggactaggagataatggagaggggacgatgaggatatcttatgagacaatggaatgggtggactgcgagatgagacataagcgttggtgctggagttgtgaggatagtgaagggtgctagggttgtgaaagagtggtcagatggcgggttggtggtggcgtctctagtggcttactccctccgtcacaaaaaaagacaaaccctggtttccgtgtcgaacgtttgaccgtccgtcttatttgaaaaaaatatgaaaaaaatttaaaagacaagtcacgcataaaatattaatcatattttatcatctaacaacaataaaaatacgaattataaaaaaattcatataagacggatagttaaagttggacacggaaacccagagtttgcctttttttttttttgggacggagggagtacatcgttggacatatagaaaagatgatgggaacgggacatctcaatgttacctggtttagggaggaaaggacgatggtccggtgagccttgccagcatcattggtaacttttgtgctgatgaggatgaggtagagtagggaggagcaccgtgacggtatgagtgagctttgtatggggattaggggaaatatacggtcgaggagtattgtattggcacttattttgatacgatttcagcctttcaggtgtctaaaattcatgtgatttttgaagaaaagaaatgtgtgaagtaatgcattgattgataaatagctaaaaaaaatcggttatttgatccacaatggataacctagatagaacatccgttgctattgtgctttactgcagtatatacgaccaccgcttcatcccaatgactcgatttgttcatccctgtattaggctgtattccatcggaagcaagccatcacatcccaatcgaccgtctcagatcctacaacccggaaccccgcaaaccaccaaccattgtatcatttcacacagacctggatgacacgttggacttcgcctcgccctccgactcggagtcgtgctgctgctgtgggtcccacccacccttcccgcgcgccccgccgccggccgccactccgcatccccgcaccagtcactccaccgcgccccgcacccccctatatatatggccacccgaacccacgcctctctccacttcgcccacgcacaccaccaccactctcccctggttacttgtccaccccaatctcatcgctcttagtcaactccgccgagagagactgatcgttctcgttcagctctgctctgcccatggcgctcgacgggaagccaccggtgccgccgccgtccacgccgccgatggactcgtgggcctgcggtggtcgccgctccaagcgccgcggcggcggcggcgggagcagcgggagtagtggcagctccggcggcggcggcggcggcgagtccaagaaggagtacctcgcggcctgcctcttgatgctcgcgcatggcgtccgcgacgaggccgaggtcgtcggcgtcgcggcggcgacggcgaagccacagcatgggtacgagtgctcggtgtgcggcaaggtgtacgggtcctaccaggcgctgggcgggcacaagacgagccaccgcaagccgccgtcgccggcggccgaaccggcggccggcgaagagccgtcctccggcggggtggccggcgaggcgaaggtgcaccgttgctccatctgcctccgcacgttcccgtccgggcaggcgctgggcgggcacaagcggctgcactacgagggcggcgccgtcggagacgccgtcaaggagaagaactccctgaagaccaaggcggcggtggcgacagcggtgctgaaggacttcgacctgaacctgccggccgcggcgacgacggcgggggacgaggccgagagctcaccaccggaggccaagagagcacgtctgctgcttctcgtctaacccgcggcggtggcggcggcggcggcgncggcttgtggttttgatggtttaggtgcttagccgttccggtttaggtttcagattgataccgggttgttaatttcattgattgatttattttagttcacttctggttgggcgatggagacgggtggcatgataaacatgccgtgtttagatggtttactgcaattctagggagctagaaattgtcctgggctccattttttaaatttttaccatgtataccagtacataatttgatacttaaatcaattcgattatgaaacccaaggcggactgataccattgacgacaagtttgctgccaatacggtgattgtgatttctatgaatcgccctctcggcctctcaatcgctctttctgcttgtttgggaataggaaaccctagttgtttcttttggtccacgtacgggtcgtcagcgacggcgccgcttgtgaaggtgacggcggtctccttgtccgtcccgtcccgttcgacttcgattggtttttggatgagcgattcaattggggcaagactactgcaagtgtaatcaagtattgtttgcgactttgcgttgctctgaatagaattgggttctctgaaaattctcttctccattctggagacgcacatttataatgagaaaagttggatatgaatatagtttcaggacatttgtgagttataaaaccagcgagcaccattgaaaattcggagttgtgctaattcatctttctcttttctgttaggtctgatcagtaacaaaaatcgaagtgaaactgatgcttatgtgttcctgaaactgtgttttttcaggttggccagcagttctggtggaaataatataatggggccccatgattccccagctcgctgtgtcgaatactcctacagtcctacatgcaggtaggtactcgttattgcgttttcgtgtggctagaaagtgttgtttgactttgtaaaattcattttttttagaagtcgctagttggaattcatgatatagtttctagatggggtaggtcttctaaaccctgccaataaaaaatgtctatcttctgaaatttgtcaattcgacctcataatgtgctagctgagttcaggttttactggtaaggaggataatcctatctagtatcttagaaggaacttccttcttggtttaagacaaacttttatcacagtgctacaacagattaaattgtttagttgtggtttttatccattttaggccgaacatttatccttctgtagttactgtttatatttctgtatagtcgatctgatcatggaatatatttcacgttgtgttatgcgatcatttgaaagtaaagtattcgctctgggtccttcggaacgacgagttgctatgattaatttgaatatgttctctgactaagtatgcacttaagctgcaaaaggaaaactttcatgaatagctatttactgaagatgagacattactagcattgccacgtgatcatatttttaatctacatagtctgcatgctcataggtggttgccattgattatctgagaatgcaaggaacatcgtttatgttgtcaaatacaatttcatcccactcaatgcaaagaaattcccttgatctctctccaactgtttcgattactttgttttctttaatggcctcaaatatcccacatttgcagatacggcacatttgcaactggtggatgtgacagttttatggcctttgggatggcgctagcaaaaggtaaattgtcttccgtgatatatttgttgaagaactatgtatgataacttcagcgtacattattattttttcttcttttaattgaagtgccccagccctcaaatacccatgtaacatcacttcttgtctttcagcaaggatggccatctgcttcgctgtcgcatccaggtgcacgttcgataagccgtaagggagacataccttaagaccagaatttggctgggacaagtattccttttcagtagggatggcaattttacccacgggttcgggtatccatacccgatccgatggtatgggtatggggttaattttttgcccgtaggtacgcccggccgtaacccgaaaatctaatgggtagtagccgggttttatatggtaacccatacccgacccgaaattaatgtagaggttgattttggtctatctctcatacctattttcctttgatctattaaaatcttgaactttgatgaaattatgctagcttgtttataatttgtattgctctttttaaccattggtgataattttacgatttactgattttattgctctttatttagttacctttctattgagatatcaatcatatgaaacccactgggtatccaccgggtataccatacccaacgggtatgggcatgggtatgaatttctacccgccaattctatcgggtatcaatcgggcgggcaaaagcgggtcaggtacggacttgctctacccgcacccaacccgacccgacccattgccatccctacttttcagggtactaatctgtattctcatttctcacatcatttgcaccctgcaggcataagcctgacgcaatctttatctgtaatgtcaactaaatggaagtaaaccagaggacgaagacattagcggatccctatcagcctgagatgtcagtgaggtgcgtttcttcccctcaatttgcctgtttattgttcgttggttctgacactttacgaaagttcttagcgttatgctcaaactatggattctattaattgacagaaacacattcagtagtatatctgcattagagaagttacaagatggtaggttgatcaatcatctgaggtagtataaactagctagtgacaatatttctccactgcacgaatgtataaaccgagttcatcaatcagcacgcagtaattcacctcaccctgtcatccatgttgagtccaaatccccattatcatctttaacaagtcagaaagaaatcatctcatttatgaccgatccaactggatcgagcaacgagacctacatccaactattatactaccgatgataatgttatcaaattccagcaacataagtagacattacctcgtggggattattctccacggagacgattagggagacaccgcgcgtatctgcgccccaaatcaaacgcacttaaagcgttttgtgaaggagcatgtgggggaagctagcaataatcaaggcacagctaatgctgcttcccattgaaaaattaatgcgacttggtaaagtattaagcatatgattctgcacatttctgcgtaatacatccacgtcgagagtgagtggcacagctgctgctagctacacagcaagcagagtagtatatatgccttgatcgatctgcctgtgtgtgtggtttagattctcgtacgcgtgtactcactcgcgcgcggagagcgagatcatcactgaatcagctcgctatctcagctatactggggtgcaactaagtgagctaatgattgggcctttgccgccacattgtgcaaacaagtagtgtaaacgatcacgctattgcacacgtcggttcacgtttcgtcccgagtttaatgcccacggtgtttagtactacccctttccaaaatgtatgatgccgtttatttttcgtacaacataagcatagtacctacgaaatatcatatttggtatcaaaggtattagatccggtacctataatatcatacacattaactatggataaaaacagtatggaaactttctggattccgaacctattttcgaaaacagtatctgtcggtcataatttttcggaaacggaaacggaaacgaattcggaaatattttatcggaaacggaatcgaatatgataatggcagttttcgtcggaactcggaatcggtcggaaaatttcttggaatttccggaattaagaaggcccataccgtagtctataattcctccccagcctatcccaattcagcatactaattccaagtcactcaattcagcccaacccaatacacccaattcaaacttaagaattggacttgacatgattgtgttttgtgatataatgttaaaatatgagacttgagaattagatttgatatagtttaaagcttagtttgaggggttttttattccgataaatttttgttactatatcagcgccggtctgttttcgctctgttttcgttttcgacaatatttgattctgttttttatccggggtttccaattctgaaaaaatatgaaaacaaaaacgataaaggtggtctgttttcgtaccattttcatccctaatattaactatttcattgtctatgtattttcggaattgaggtccacacaaacaagagtcgtgtctgatgtgcccagcgcatgaccggcagtccattatcgactcctctaagttaatctaacctttttcttttgaaacagttaatctaagctttcagtacaagtagctaggtgcctcaacccttctattttttgtcatttctatctttatgaggagctgtcaccccaaccactttgatgctctcaaaagaacagataatagagtggcctgttccaacgagcaaaacagcagcggctagcatcagtctcacctcggctagctagcaaggcacattccctaaagacactttatgaggagctggagatgattccaacgctatctatctgaagttttgatctgtgatatttcagcaattttgtgtaatcatatttgctcacgctaaagggtaaattaattgtggttgaatattcagtttagtttaaggattggaatattctaaactagctattgtagagggcagtactaatcgacatcagggacaatcttggtcatctctggtaaacgatgaatgtcctaagtcaagtgctacaggaaaatcactacaacaccaaaagactcgacaataccaaaagagtatagaatttcaaacaaaggtttccaagcttttagatccattgatcggttctagagcctagccaccttagggcatgttcagattaatatcattttaaatcattacattatttgataaagttgataaatatatggttgcatttagtttgttatcaaacattgataatgcatagaaaattttggcaacaatacatttaaactattctataaaatcttgacaatgctaccaatttaccgaaattttggaattagcaacttttgaaaatgttaattttgatagtaatctgaacagatcattagtttaaaaaatgtcctttatacgaaagcactttcttcatgatggctcaatcctcttcatgtgtagacataggtcaattgcatcagtggtagctccatagaagccgttcttccttgcccctctagatgtgaggaattcgcaatcaaggaacactgagtgaataacctctatgcccaacatcgctagcactggataatgttacatacatcctcgttcacctcgtcctaccaccttgttgtctgacaaagtcatctagggatgaacaaaaatgcagtagagttttgttcgaattttgaaattcataaaaaacaatcattcataacattcgatagaactcttaaatgaactcttaaattaatttgtttttgaaattttgtccctacccccttaaaaaattctcatgtcaaattattgaaccgtactatagttcaaaacacattaatgttcacacaacaaccttttgcatttattgcagaagatctatatcttgcaataaatgttaaataaaatatttcaaactaattcaatcgtaataactcacttttctcgaaaagataaaatgaataaatttggcagtccaataatatatatacttccataaaagcagatagatttatatccccatacaaatatttaggaatataaatgcattttattctcccacccaattaa
